United States Patent Application Publication US 2020/0157537 A1 - sequence listing, part 6

SEQ ID NO: 11228 - DNA, 1374 bp, Homo sapiens
ctcgagtgccctgtgtgcaaggacgactacgcgctgggtgagcgtgtgcggcagctgccctgcaaccacctgttccacgacggctgcatcgtgccctggctggagcaggtgagtgccccgcccacccgcccccccaccccgaccgcggccctcccgcctctaacctgccccttctcccgtccctgcctctgtccccacaaagcacgacagctgccccgtctgccgaaaaagcctcacgggacagaacacggccacgaacccccctggcctcactggggtgagcttctcctcctcgtcgtcatcgtcctcctccagctcgcccagcaacgagaacgccacaagcaactcgtgagcccacgtcggccgtcgggaaagcacggggcctttcccacccaccctcagccagcgccacacggcacccacagactgggtgccccggcggcgccacgcttggctggtcagcgctgcaggtcccgcctgttccagggcaggacccgggcccggcccaccggccccctggcttgggaaggcgtgggccacatggtcccctctggggcgtccccagcctccccgtcctctgtctaacctcaccctctaaacgttcagcggtggaaagatttttataattttaaattattactgctttgaaataaacggacgtttgagctcacgtggcggccatgcatggtttgtggcggaagacggggcccagcggctcccccagcgctgaagcacggggttcagcggctcccccagtgctgcaggtgccgccaggacgggccacgtgggcccccagcctccccctcggccgcctccacgacccggagtaggggggctcgggaccatgaggatgaccagcaaaattcaagaacaaaactgctccaacagacttttttaaaggaaaaaatatgtgtatcttgaaagctatttaaaatacactacttacaaagagaagccggtgctgtggctttccttctgcgcccgtgcgtcaggaaaaggccaagctgggaggctggtcgggctctgcagagtccggtcctgtctccaggggtctgcgcctcctgcagggcttggcacccagggccggctagcaaaactgctctcccgaagttaagcccaggagggctgctggcgaggtagcagggtggcagtgtcactgggtcgtgaaatttaaaaccagaaacaccagcgttaaagcgccagggcccagcgcctctgccccacgcttcggtcacacctcagccacgcgggttcctggccccttctgaaaagccggaccccactgctcaaggttgctggatgcctggcccggggtgcagccagctcgggcacagctggcaaggcgtggggacctgcgggctcagggggccgggg

SEQ ID NO: 11229 - DNA, 1181 bp, Homo sapiens
atcacgccattgcactccagcctgggcgacagagtgagactccgtctcaaaaaaaattttttttcctcattgtacggcattggctgcatccacagatgccaacagggggctttaattgtctgtcagttctgacggtgtaatctagttcgtgatttcctctttagcctggaggaggatacaagccttgccaaggtttccctcctgcctgagccaggtcactctctctgtccctcctgcctggagctgggtcattctctctgtctctccttgtacagtggtccatgctgtggacggcaccgccgagaacgggatccaccccctgagctcctccgaggtggacgaactcatccacaaagcggacgaggtcacgctgagcgaggcagggtccacggccggggcggcagagacccggggggctgtggagggggcagcccggaccacgccctcccggcgggagatcaccggtgtgcaggcacagccaggcgaggccacgtccggcccgccggggatccagcccggccaggagcccccggtcacaatgatcttcatgggttaccagaacgtggaggatgaggccgagaccaagaaggtgctgggccttcaagataccatcacggcggagctggtggtcatcgaagacgcggctgagcccaaggagcctgcaccacccaacggcagtgctgccgagcctcccacggaggccgcctccagggaagagaatcaggcggggcccgaggccaccaccagcgacccccaggacctcgacatgaagaagcaccgttgtaaatgctgctccatcatgtgagccggcccccgagaccccggcccccaccccacaccacagacacccaccagcccggcccctcccggcgcctgcccaccctccacccacagcctcacgggtccaggacttggcgtgttgttacatgttccttccgagttttctttcgctggaaagagggacaggggcccccacccgtcaccacgccccaacactccccccgaaccagagccgtgcacttgtgcctggtaggagagagacaggacagacccgcttttcccgagacaaggaccccccatgtcacggcagcttcacagacgcggctcgcgcccaccggggtcctggcgggtgggacccgcagcctccacgcggcccaggccagcctgccaccctctgggcc

SEQ ID NO: 11230 - DNA, 1186 bp, Homo sapiens
ggggaacctggccttggctgcctcggcggcggccgtggacgcagggatggcgatggccgggcagagccccgtgctcaggatcatcgtggagaacctcttctaccctgtgaccctggatgtgctgcaccaggtgaggtggtcccatcaccgccagggcaggtcggctgctattgctgtgggcacaggcacacgggaggggcctggcagggctggtgggcaccgggcaggagctcatgctgtggcccgggacctgcagattttctccaagttcggcacagtgttgaagatcatcaccttcaccaagaacaaccagttccaggccctgctgcagtatgcggaccccgtgagcgcccagcacgccaagctggtgagtggggctcccgggacggcgcccgccctggccctggcccggcgacgtctcacggtccctctcccctcagtcgctggacgggcagaacatctacaacgcctgctgcacgctgcgcatcgacttttccaagctcaccagcctcaacgtcaagtacaacaatgacaagagccgtgactacacacgcccagacctgccttccggggacagccagccctcgctggaccagaccatggccgcggccttcggtaagaggctgcccgacgcggcgccagtgtgcagagtggtctattagggccgctcagtccggagccccggcggcacgggcccggccctgcaccagggtgatgcacctgctgctctctgcacggccagcacagcacggtccagtgtcccccacgtcgggaccacggccccccctggagcagcggatctgcccgcgaaggctctgccggggccgcccgccggccgggttggggcccatcccgcagcacagcgcccgctcgcggtggaggttgtgggtgcgatgattagtgtctcatttatttctaggtgcacctggtataatctcagcctctccgtatgcaggagctggtttccctcccacctttgccattcctcaagctgcaggtattcaaacgcttggtcttggttccccagcgactgcatgcccacaccaccttcccaggcagctccgcatccacggcggcagcctgggcggactgggcactcgagtgccaggtcaggggcccttcccgggagaggggacgccacgtccacagagcaggcttggccagggcagtggtaggacagggctgt

SEQ ID NO: 11231 - DNA, 1186 bp, Homo sapiens; identical to SEQ ID NO: 11230

SEQ ID NO: 11232 - DNA, 1883 bp, Homo sapiens
cctgaccccctgtcttgcaggaaggaccgcaagatggcactgatccagatgggctccgtggaggaggcggtccaggccctcattgacctgcacaaccacgacctcggggagaaccaccacctgcgggtctccttctccaagtccaccatctaggggcacaggcccccacggccgggccccctggcgacaacttccatcattccagagaaaagccactttaaaaacagctgaagtgaccttagcagaccagagattttatttttttaaagagaaatcagtttacctgtttttaaaaaaattaaatctagttcaccttgctcaccctgcggtgacagggacagctcaggctcttggtgactgtggcagcgggagttcccggccctccacacccggggccagaccctcggggccatgccttggtggggcctgtgtcgggcgtggggcctgcaggtgggcgccccgaccacgacttggcttccttgtgccttaaaaaacctgccttcctgcagccacacacccacccggggtgtcctggggacccaaggggtgggggggtcacaccagagagaggcagggggcctggccggctcctgcaggatcatgcagctggggcgcggcggccgcggctgcgacaccccaaccccagccctctaatcaagtcacgtgattctcccttcaccccgcccccagggccttcccttctgcccccaggcgggctccccgctgctccagctgcggagctggtcgacataatctctgtattatatactttgcagttgcagacgtctgtgcctagcaatatttccagttgaccaaatattctaatcttttttcatttatatgcaaaagaaatagttttaagtaactttttatagcaagatgatacaatggtatgagtgtaatctaaacttccttgtggtattaccttgtatgctgttacttttattttattccttgtaattaagtcacaggcaggacccagtttccagagagcaggcggggccgcccagtgggtcaggcacagggagccccggtcctatcttagagcccctgagcttcagggaaggggcgggcgtgtcgccgcctctggcatcgcctccggttgccttacaccacgccttcacctgcagtcgcctagaaaacttgctctcaaacttcagggttttttcttccttcaaattttggaccaaagtctcatttctgtgttttgcctgcctctgatgctgggacccggaaggcgggcgctcctcctgtcttctctgtgctctttctaccgcccccgcgtcctgtcccgggggctctcctaggatcccctttccgtaaaagcgtgtaacaagggtgtaaatatttataattttttatacctgttgtgagacccgaggggcggcggcgcggttttttatggtgacacaaatgtatattttgctaacagcaattccaggctcagtattgtgaccgcggagccacaggggaccccacgcacattccgttgccttacccgatggcttgtgacgcggagagaaccgattaaaaccgtttgagaaactcctcccttgtctagccctgtgttcgctgtggacgctgtagaggcaggttggccagtctgtacctggacttcgaataaatcttctgtatcctcgctccgttccgccttcgttgctggcttcctctttctgtgccgcgggcggccccgactcccgcccgggtgtccgccgaagcgccaggtggggccacgggcggggtgggcccggccctgagagtgggggtccctgcgtggggcgtgcgggccagagcgaatgaccaagagccggacctcggtttctgccgctttattgagcatccgcgcggccgcccgcgccctcggcccgccccccgcccgcccc

SEQ ID NO: 11233 - DNA, 1496 bp, Homo sapiens
aggcatgtaccagcacaccggttaattttttaattattatttttttttgtagagacaaaaaaataagtcttttttttttttcatagtcttgctatgttgctcaggctggtcttgaacccctgagctcaagtgatccaccggcctcagcctcccacaatgctgggatcaccggcatgagccaccacacccagcccgtcttcacaattgtatctgcttcctgtgatgtgaggatgaaacaaaataggattttaagggcccaggacttcacacaccgtaggggtgagctctccattgctgggggaaaccaagcgggccatggctgtggtagggcccttctcggagatcctggccggccttgaccctgaggaccacccctgccccggcccacaggccccttcccagctgcctgcctgccctagccagctcccaggtgaagagactctcggcttccaggcggaaacagcacttcatcaaccaggcagtgcggaactcagacctcgtgcccaaggccaaggggcggaagagcctccagcgcctggagaacagtgagcaggggtcgggaggcgcctcctgggggctcctgggccttgtagaatggcatgcatattggtgttatctgttacccctcccatgagctgtgcctgggtggggctggggacccaaagaggtgtcagctgtaggccgggggaccatataaatagagccagacacaggcgccccctggactcttggatcagggctgggtgggagggcgccccgggcattggagctggggctttaaaggatatataggagttcgacaatccagaacctggggtctaggtggtctctgtaccttctggggaagacagttggagcatggaggtgcggaggttgagatgataaaaaaggaggaaggctagttcttgggtccccatggtgcctgggggtccccaaatgccaccccggcccagagagcatctgtttccacctagcccagtacctcctgaccctgctggagacagacgggggcctgcctggcctggaggatggggacttggcaccccctgcatcaccaggcatctttgccgaggcctgcaacaacgccacctatgtggaggtgtggcccccaaccccctcactccctccacacggggaccccggcagttctcctacggccaggccatcgcctgtgcccgtcccccgccagaagcacccgcccacttctgatctcctaatgaaggcccctcagtctccttcggggtccccagaccaggccagaatccccaccccacccctggaaccttcgagctcctggattcacctgcccaacacgtttgggaaccctccaacgattgcaggagtgtttcacctcaatcccccccaccccgagacagctgggcccaccccggttccccgcttccctgcgctcagctcagggcccgacacaagcagcggcccctcagtggacagaggtgaccgcaggagcgcgtccacgtgcttggcggccttaccgt

SEQ ID NO: 11234 - DNA, 1175 bp, Homo sapiens
ccgcaccaaccaccacacccggcccacatttgtattttttgtagaggcagggtttcaccatgttggccaggctggtctcgaactcctgacctcaagtgatctgcccacctcagcctcccaaagtgctgggattacagccgtgagccaccacgcccggctgagttttcccattttagagaggaggaagctgaggcttggggtcttaggttggacattatggatagaaggattggggcacaagcctactgggctcttgggccccagtgtccttctggatcctctttgttctgttcctgtactcctcccacccagggcccctctgaccctcagaggaagcaccaacctcacatctaccacctccagcctcgaagcctcttgcaggggcgaacacttccttgctggaccatgcatttgctcaaaccaccctgctcccgactcctcttcctggttctctgacttagccattgcccaggcgtcccctcccctcgccctccactgctgtagtagctcccgtgtcctgcatggggctcacgaggctgactgtgcatccttaggaccagctccagcagaagatcatgtgccccgggcctgtcacctgtctgactgcatcacccaatggtctctacgtcctggcaggagttgcagaaagcatccacctgtgggaggtaagaggagcaaagcgtgagcgtttcccacaggacatctcagcccatctgagctttgcctgcagggcaccagggaacaaccatgcggcctggggccctgggatgggtgactgctcaggggttatagcctaagcttcaccctgctgcctcctttctccaggtcccctcgagacttgcgaatcccagaccagccctaatcctgccttgagtgcttggatagagcccggtgcagcccagtccccggcactcacacaccgcagcatcttccagggctagcgggcatctcttccacgcaggcggcagcgcctggcacttgtgacttgaaagttataaagggcggccgggcgcagtggctcatgccggtagtcaatgcaacctctgcctcccaggttcaagcaatcctcctgtctcagtctcctgagtagctgggattccaggcgcccaccaccacacctggctaatttgtttgtatttagtagagaagggcttcacaatgttggtcaggctggt

SEQ ID NO: 11235 - DNA, 1178 bp, Homo sapiens
gcgagcctgtgcttccagcctcatggggccaggcctgtccatcaggaccacttccctgtgtccagatgagggtcgggtccgggccatggctacttcactcatgagcagtgccgcagccaaccaggctcccacgatcccccacagcctgcttggggtcacccagcacctgagcagcccccaggctcctacaatctcctcacagcctgcttggggttacctaggatctgagcggcccccaggctcccacgatcccccacagcctgctcggggttacataggacctgagcggcccccaggctcccacgatcccccacagcctgctcggggttacctaggacctgagcggttgccaggttggggcccacgtgcaccatccccacgctgggccaggtcaggccaggatccaggacaccctctcctgtgctctcggggggtcgtctctagggtgcgccccggctacgggactgaccctggccccagcccacagtcccaggcctggacaccacttaccctccacccgcccccctagaccttgctcccggtatcgaggagatctacgaggagagccagcaggtgttcctggctcccgggcacccgcaggacgggcaggtggtcttctacaaggtcagcaggaagccccacagcccctcacactctgcccaccccgcccccaccacactcacacccccccaccccgtgccgtggcagatcagcgtggaccgcggcctgaagtgggaggacgcctttgccaagtcgctggcgctgacgggcccctatgacggcttctacctctcctacaaggtggggtcgggcggggttacccccccagaggagggcccgcggggggcggaccggggcgcggcctcaacgcccccctccgcaggtccgcggtaacaagcccagctgcctgctggcggagcagaaccgcggccagttcttcacggtgtacaagcccaacatcggccggcagagccagctggaggccctggacagcctccgccgcaagttccaccgggtaggcggccgccgggcgcagctttcgctcgggttgccggccctgaccccgcccaggctcatgcggccctgtgtccctaggtcaccgcggaggaggccaaggagccctgggagagtggctacgctttgtcgctgacgcactgcagccacagcgcctggtgagg

SEQ ID NO: 11236 - DNA, 1145 bp, Homo sapiens
cggagcgtttgctcctgggacaggcggtgggaccggggcgtcgccggagacgcccccagcgaagttgggctctccaggtgtgggggtcccggggggtagcgacgtcgcggacccggcctgtgggatgggcggcccggagaagactgcgctcggccgtgttcatacttgtccgtgggcctgaggtccccggaggatgacctagcactgaaaagccccggccggcctccccagggtccccgaggacgaagttgaccctgaccgggccgtctcccagttctgaggcccgggtcccactggaactcgcgtctgagccgccgtcccggacccccggtgcccgccggtccgcagaccctgcaccgggcttggactcgcagccgggactgacgtgtagaacaatcgtttctgttggaagaagggtttttcccttccttttggggtttttgttgccttttttttttcttttttctttgtaaaattttggagaagggaagtcggaacacaaggaaggaccgctcacccgcggactcagggctggcggcgggactccaggaccctgggtccagcatggaggtggtggacccgcagcagctgggcatgttcacggagggcgagctgatgtcggtgggtatggacacgttcatccaccgcatcgactccaccgaggtcatctaccagccgcgccgcaagcgggccaagctcatcggcaagtacctgatgggggacctgctgggggaaggctcttacggcaaggtgaaggaggtgctggactcggagacgctgtgcaggagggccgtcaagatcctcaagaagaagaagttgcgaaggatccccaacggggaggccaacgtgaagaagtaagtatggcttgctggggtcggggccgggccgggccagtcacggtgctgatggttctgtcttccttccttctctcctccctccctcccttacttcctcttaacaccctgagctggacccgtctggcgcctgtgtcctccgtgccagggagagcgtggttgggggcctgcgttacggactttcactcaggcaaggccagttgtcgcagcggggcgtgcgtttgcatgggctcttggactccagttaaaatgccctggtagcgaaaccctcctgagaagggagcggccccc

SEQ ID NO: 11237 - DNA, 1516 bp, Homo sapiens
caggagatcgagaccatcctggccaacatggtgaaaccctgtctgtactaaaatacaaaaaaattagccggctgtggtgacacgtgcctgtagtcccagctactcgggaggctgaggcagggaaatcacttgaacctgggaggcagaggttgcagtgagctgagatcgggccaccgtgctccagcctagggacagagcaagactctgtctcagaaaaaaaaaaaagtgtcctaactgtgtcctccaaagccctcgccggccgatgacagactagagggcgctgtgctcccaccccctaccgccctgagcctggacgcgtggcccctgcagggccctttcccacagcactgtgaactcacagcttctctctagggaagggaggaggtacgccacttccacagggagatggggaggccgactccagggatccaggccatcatcctgacgttgggtcggctgatacacccctgtcctctctgtcccagggaaattcaactactgaggaggttacggcacaaaaatgtcatccagctggtggatgtgttatacaacgaagagaagcagaaaatatatcctttccggtgttgggaccgcggggcctccgtgggaggggctggggccctgggtccgcctgcctcgaggcctgctcctcttcccgtctccttgaaggagactggcacacgagggccgtggccttccctggttccccggaagtcagccattgtggcaatggctgcgcagcttgctgaaaggggccctgagccctggcccctgtgtcttgggcccgtggggtgtcaagtcccttttttctcagagtctcctcccaggctaaccaggggtgtagccacggtctgcctgagacaggccacgcgggctgaccgttgtgggccattttggtcgtggctgggcgtgtcctcgtgtcatctgtggacacccccatgggtcttacgggcacagcctccctacggggactttgcttcctaaggccctgtgcccagagcaagagccagaagtggtcctgaggctggggctgtgttccctgagccacgcggtcaggggccctgggaccgtcctgcatgggcccgagcctgcttgggggggcgtccaggaggcaccatcccccgcccatgggcagggtgggggacgtgagccccgcaggaacgctgccccaagagtcagccctgtcctccccttccccgtaggctccttcctcctgggacgctggggcccctgggccttttcagaggggtggctgagggcagggtgggccctggtcccgaggaggggcaaggtgggtgcagagggtccctccagagccccttttctggcccccgtgctccctgggcctgtgagtggggccgccccctgagctgtgtgtccttagcgccccacgtatatggtgatggagtactgcgtgtgtggcatgcaggaaatgctggacagcgtgccggagaagcgtttcccagtgtgccaggcccacgggtgcgtgcgcggggcaggggccagggtggggcgg

SEQ ID NO: 11238 - DNA, 1201 bp, Homo sapiens
ctagcagggactgggggcagctgggggccctggcaggctgagctctgctccccgcgtggttctgtgctggcatttcgcgtgcctggcctgagcctggcccgagcctggccctcctgtgtcctcacagatgagcatgtggcggctcctgggcctctagaaccaaccatgggccagggtgccccaggggagcacgggagggtcctgccttgtcagcttgcctcctactcgtgaggttcctgcagtcagtacctgggtggggtcccacctgcggccatggcaggtgcaacagacgtggtggaggggacactcctgcccaggccatctgcgggaggctcagccccggggggtgcctcccagagctgctggggggcagcatttcaggctggatacacctgggcctgacccgggggcgggcatggcctgggcagcagctgtaagtgcgtccccgtggtgggggccagccaggtccctgtggctctggggttgcgcccctcagctcaggccacacttgccgtctccctcccaggacaggtcccagaagaggaggccagtcacaatggacagcgccggggcctccccaaggccgtgtgtatgaacggcacagaggcggcgcagctgagcaccaaatccagggcggagggccgggcccccaaccctgcccgcaaggcctgctccgccagcagcaagatccgccggctgtcggcctgcaagcagcagtgaggctggccgcctgcaggtggggcgcggcggggcccgggtggggcatgtggggacaacgcctggatgccacagccagccgtgagcatagcccgcgctagtcagtcatggtgaccgtcacgtggctgcgcgtggttgccatgtggcctttgggtggcttggccacgtagcgatccccgtggagggtgccgtctcggggcctggtgtctggccagcgtgctggtcatggaggcctacgtgtggcggggctctgggggggcgtgccgtcctcacagccacctctcagagtgggtgcattccgaggaccctgccctgggcctggcgccccctccccatgcccgcgccgcttccaggaaaggcttatgctgggctcagcccagaggcttttgagcaccagtgggtggtgggtggtggggaggggccgcggcctccatggctctgccggggtgccgcaggctctgagccagctgccaagtatggctga

SEQ ID NO: 11239 - DNA, 1204 bp, Homo sapiens
ggccgcggcgcaggcgacgacaccgagccacctgccgcgcccgcccggccccgcagcccgcgcgcctggccccgccgcccgcgccgcgactacagcatcgacgagaagacggacgcgctgttccacgagttcctgcgccacgacccgcacttcgacgacacgccggctgccgcgcgacaccgcgcccgcgcgcacccgcacgcccgcaaacagtggcagcgtggccggcagcacagcgaccccggcgcccgcgcggccccggccctggccggaaccccggcaccgcctgccggcgcggcccgacccgcgcgtgcgcccttgcggcgcggcgacagcgtggacggcccgcccgacggtcgcaccctgggcggcgccggcgacgaccccgccatccccgtcatcgaggaggagccgggcggcggggggtgccccggctcgggcctgtgcgtcctaccatccgggtcggtgctggacaagctggcggctggcctcgacgagagactctttccgccgcgcctcgccgagcccgtcgtggcgactcccgcgttggtcgccgccgcccccacgtcccccgaccacagcccggcctaagtcccgcgtcctgggcccatctctctggcagcttctccggcgccgcacggggcctcggcggcgggagagacgtgggggcgcgacgccccgacgcgaatgcgcggggaccgcgggcccttcgcgcacgcgccgggcgacggaggcgcgctcgccgcttcagggcgcaggcgcagagccccggccgccctcgcgccgccgaagtgtgcactgctctttccggtgcttgccgggtgctgggcgtcgtgaggcgcgggccgcggagaccccggctgggcgggaaggaaggggcgtgaacggctctcagcttcgggctcctgaggacaacgatcactcgccctcagtcccggacggggcggccgcttagtcgcagggcccgccacccgagggtcgcgcagcccactgggcccgatggagccgccgcgtgccgggcgcgtgcgcgagctcgcccgggcgggggccgcggggcgctaacggtcgcagacgagttcgccgccctgggccgggaggcggctcaacaccgtgactgccgacctccgagaccgtttacctcactgcggcgtgtgctggcggcagcccgcgccgcctccgagcaataaccgcgccgccaccgctg

SEQ ID NO: 11240 - DNA, 1106 bp, Homo sapiens
tgccactgcacttcagcctgagcaacaagagtgagaccctgtgccaaaaaaacccctcaaaaaaccatgttgggagggctgatcagattaggggaggaaggtcatttgtgcaggaaaaaaagcagttctaagcctcactggtttccagtggtggccagatttgaactcagcttgcctttggccctgaccccagctcaacccatgggtggtgggtcagagggagggcctctgtccccaggcagtgcttttgggggttcctccagcttctagtcctttcttgcggcccctgttttgttcttctctagcagttgcccgccatgttgggcccagggccagtcctgtgggtctgtttgcacactcaggacacagacttggatgtttgtggagctcctggttcacagggggctctggacttgaccaggggagtccctgaggctgtgcagccctttggggtctcacgccttccccccgccccattcccccagtgagcagcggttccatcgcagtgaacgccgactcttcggtgcagttgttggccgaagaggccgtgacgctggacatgttggacctgggggtgagtgtcagaggggacctgaggctcagcaggttggagctgtccaggctgcgggggagggagcgctgggggaccaggagccgggctggggtcgctgctggcccctcaccgcccctcaaccccttgcaggcagccaaggcaaacttggagaaggcccaggcggagctggtggggacagctgacgaggccacgcgggcagagatccagatccgaatcgaggccaacgaggccctggtgaaggccctggagtaggcggtgcgtacccggtgtcccgaggcccggccaggggctgggcagggatgccaggtgggcccagccagctcctggggtcccggccacctggggaagccgcgcctgccaaggaggccaccagagggcagtgcaggcttctgcctgggccccaggccctgcctgtgttgaaagctctggggactgggccagggaagctcctcctcagctttgagctgtggctgccacccatggggctctccttccgcctctcaagatccccccagcctgacgggccgcttac

SEQ ID NO: 11241 - DNA, 1117 bp, Homo sapiens
ctccgagcggcggcgacggctgttgctaagggaggggacgcgcgaggaagcgcgacccgggcggcagacggcacccagcgccaccagccgagcggcgccccctccccaggacccttaaccgcgccgcgtcccggtcgcgcccgccgccctttgaaggagaagcaagtgccgtccccacccccggaaggcgcccccaggagccggagcgacctcggagcgccactcggattttggatttcggtctcgcattccgcggccgggactttctcgaggaggacgcgcgctgctccgcgcccccgagtgcccggaggacccggcatccggggagcctctcgcccctgtcccggaggcgcggcgaggattggcggcgcccgccgcccccagccccccagcgcgcgccggggatggagccgcagcccggcggcgcccggagctgccggcgcggggcccccggcggcgcctgcgagctgggcccggcggccgaggcggcgcccatgagcctcgccatccacagcaccacgggcacccgctacgacctggccgtgccgcccgacgagacggtggaggggctgcgcaagcggttgtcccagcgcctcaaagtgcccaaggagcgcctggctcttctccacaaagacacgtaggtaccgcgcgcccccggccggccgccccctcgggccccggcccccgggcgggaacaaagagcgcgccgcgcggggaaggcagggggcggccagacagggggcgggggcgcgccgcgcgctctcgggcgccctctgctcggcctcgcctgcctcggccccctcccccgcccggggtcgccgcacaaaggcggctgcgagggcgtcccgggccgggcttcggcggccccccttgggggcgggcaggaatcccagggcgttgcgggggtcccggctgcgggtgtgggggccgccaccgccccctcccgcctgcgtccgcgccggcttccgcatctgctcggcggcctcctctgcgtctggctgtctccccccacttgcgtctctctccccccctttgttctcgcctccgagcgctccccgcagcctcccctcccccctggtatttaaatcgcctgcaggcccggagccctccccccgcg

SEQ ID NO: 11242 - DNA, 1295 bp, Homo sapiens
actttacagatgaggggaggggccgcagtgcgcagaacccaccccaccccccagtgcagacttcggggtctccaccccaggccagcagcgcccactgggctacagcaagccaacaggtcacagaagccaacgaggggactgtttctcttccactcctatcctcttttcttgatcttttttttgcattttccttcatttctttaacaaggagagcaaagctgttttagcagaggctggggctgaggtccccatggggtttgggtgcaggggcatggcaccctttcctgtcgggaagggagaggggaactacccccccagcctgccctccgccccgccccagccggcggactgtgctgtttcctccgcccccactcccgtgttttctgacctcctgcctgagtttggggtatttatagactattaattttctgactgagccaatagtggttggggaactcttgaaaaaggggagagaatggctgggtgctggggagttcccccctccgagccctccttcccggcccaacctgagggatgtggatttgggactgtctgggggcccctcctgcagcgaggatgggagggggtgctgagctgtgaatcccctgggcagggggcgacaactccgtgtagcattaacccccgtggcggggtccgctgctggtctaatttggaccccctgcctctcagtgcccctgccctaggggtgtctgtctccagaggggagggacaaatcccctactggggccatttcaatggggtagtttttggatttttttccccactcactttttattttttaatgataatggagatgtctggacccttcctcaccccacctgtcggtcttgtcctggctctgcctgtcccccaccgttgttctcgtaggtgaaccccaggtcctcaactccccccctttatgtgttgaaagttaatggtttcagatgtgaacatcacgtgttataactgtagcgctgtaaatttttttgtgggagggtgggcagggaggggtcccagagggtagagctcaaggattttgggttttgttttgttttcatttttccaaaaaaaaaagaaaaaaaaatagaaaaaaaaggagtaaaaggggcgggtttgttttttgaagaactgtcttggatacctatttaaatgtgtgttctgttttgttttttaacgatttttaaataacgtctgtgcctccactggttgagggtggaacctccaggcaggaaccggctcgccaccctctgcccggtaagggctgcccaagaaagcattacccgccctcggggggt

SEQ ID NO: 11243 - DNA, 1127 bp, Homo sapiens
gggagagcgggaacggtgggggaaatgagaagccacagggatggaggagaggggagggagtggccaaggagatctgagagggcttcctggaggcgtcgcacttggtatgtggacccagatctagttaacgcagagagttcccggttagacctgcgctactactcgcctgtagcccacgcgctcagagagtggctggagccccctgttgaaatggtgggacttaggatacactgggttcgaggaactatgtgatgaggacagatctcacccgtttctctctattttatgtatttgaatgtggctggtggggcgcgctttacaactcttggggcccggaggccacctgcaggagccgctgtgcctctcacctctgccggctgccgccccgggacatgagtcgggggttctgggtgctccacgtggagtctcacgctgggccacgcggggctccgggggtggcgtctgacccgagcccggcctccgcagagttctctgtggcccatgaccttcggcctggcctgctgcgccgtggagatgatgcacatggcagcaccccgctacgacatggaccgctttggcgtggtcttccgcgccagcccgcgccagtccgacgtcatgatcgtggccggcacactcaccaacaagatggccccagcgcttcgcaaggtaggcctcgtcccagccgcccagccgcccccagagtgagctgcgcacggaccccgcctctcttccaggtctacgaccagatgccggagccgcgctacgtggtctccatggggaggtgagtgcagggcggggggtctccagggacagacgtagcgtgagtgctggcctggccgtgccctgatggcgcttatcaaaagtgtcatctacattcagtgaaatcccacgtggtcccggcgctgcccttcagccgtctcggtgcctccaccctaggcagatgcgctggtgggcctctccccagaacgattcctcccatccacccccacgcagcagaccccacattccgcccagttctctgctttactcacacataagtgatgacaggtgctgtagatagttttataatctcagccttctcacttgccattagttttttttctttttttttttttttttgagacaga

SEQ ID NO: 11244 - DNA, 1052 bp, Homo sapiens
tcttgagctgctggaggtttccgtagccatcattgtcacctgctggagatgtacagcctgaaatccagcttcctctctgctcatttcgtcgtcgctgctgcctttcccctgccgtcctaaagtccctgccttcacactggagcacttttccacgtggcagtggttgtaattcggaatagctgaggcaaggcacgcactgtgtcgtgggtccgtttagctgaaatgtagctctgcagaaatgctcaatccctgtctccttgggtctctctagaaaagtgagaaagtgtctcagcagagcccagtgtctttggacttagcgggcttgtggagtgttctgctctggctttcagctgactctttaaaccagcgcggattggcctttatgtcctccgcagctcgcgggagggtttggagggttcccgtgtgaactaactatccttcccttcttcaacagcagaaaggacccaggagcgataacagtaaatcaaataagatatttgtcggtggaattcctcacaattgtggtgagacagagctcagggaatacttcaagaagttcggagtggtgagtttctccccaccccggcagcactgtggggacagagccgcttctgctcaggcctgggccttcttggggctggagtggccgagccacaggtgcacgggcctttcaggctgggagctcgctgtctcgtatttccccaacgcctgcgccctccggaaaggtggaaagcccggcctttgccttcatggccatttcgtgtcccagtagggtggttgggcggtgaaccagcctgacagccttcagggcggccgcccgattccattgtgaacaccgtggggtccagtgtcagagaagggcagttacacagaaacggggttcagtgtggcctgggcgagccagccccacagagctgactttccactgggcaggtgggagaatgcccgagctccgttgagcccagtgccagagggagctgggacagccggagggggccggcggggagccctcctagtcacccaaggcaggggcgtgtggtcaccccaaggtc

SEQ ID NO: 11245 - DNA, 1402 bp, Homo sapiens
ttgcctcagcctctcgagtagctgggattagagggcccccccaccacgtccggctaatttttgtatttttagtagagacgagtttcagtgttgcccaggctggtctcaaactcctgacctcaggtgatccacctgcctcggcctcccaaagtgctgggattacaggcgtgaacaccgcgcccgaccttgatttttgattatttgtggaaacagcgtttctctgtgtcgtccaggttggtcttgaactcctgggctcaagcgaccctcccgcctcaacctcccgaagtgctgggatcacaggcgggagccactgcgccctacctgccttcccctgcgtttttagaggcctttggcccgagctgtacgctgcagcaccttgtctgaggctgtggtctccgggccgcttgttctctctgaatctctgcagtcacacggtggctcttgcatgtgaggggtgagtcgcgcatatctggcgggggtgccagagggacttggcgtgttcattgtagtcactacaatggacagtgacaggtccactgcggctctgtccctggagagaaccaagccttagttctctgtccgccggagtgcgtagggtctccccaggccgggccgctcacaaaactgcctggtgcatcctccccagcgagcagctgatgcagctgtacagtgcgcgccagcggcggcggctgaaccggggcctgcggcggaagcagcactccctgctgaagcgcctgcgcaaggccaagaaggaggcgccgcccatggagaagccggaagtggtgaagacgcacctgcgggacatgatcatcctacccgagatggtgggcagcatggtgggcgtctacaacggcaagaccttcaaccaggtggagatcaaggtgtgtgcggccgtccctgccggctggggtgggctggggtcgcctgatgcaggcgggatcagctgacacccagctttgctcttggtctcccgcagcccgagatgatcggccactacctgggcgagttctccatcacctacaagcccgtaaagcatggccggcccggcatcggggccacccactcctcccgcttcatccctctcaagtaatggctcagctaataaaggcgcacatgactccagtcctttgcgcagcttgttcttcctggcgtcccgagctctgggaggggcctgggcctgcttcaggttcgtggtgtgaggaggttcaggttggacgttcgggggtgtgtggtagtgttgtgtggatggtctcttggtgtcgaagactgacagctgtgcgggccctgccccaactcggctgcccctgctcctgtctgcagggacagctgtggagctgggtgcccaagcccaggtgtgtagctccgtcccttttggccccctcagcgttcttgacctcggggc

SEQ ID NO: 11246 - DNA, 1762 bp, Homo sapiens
gcagtacggacgaggtgctgtccctggaggagaaagacctgagggaccgggagaggcgcatggccaataacgcgcgggagcgggtgcgcgtgcgggatattaacgaggccttccgggagctggggcgcatgtgccagatgcacctcaagtcggacaaagcgcagaccaagctgctcatcctgcagcaggccgtgcaggtcatcctggggctggagcagcaggtgcgaggtaggctccccggccagggctgccccagcaccctctcccttccccacacccaggtgcagatgctggggtcctcctgtgcttgccgcccccggactctgtccatgtctgtctttgtggctggactcagacccagtgatgttccccagacaccccctgatacccactctcttctttacaagcctccaccccatccccccagccttctcaaggaaggaggtgagagccggaaatacaggaggccacacgtgatggggctctgcccccacccccccccccgacatcctaccccccactcccacctcacatctttctcctccctgggaccgtctcccacagagctctcccccctccctccagagcggaacctgaatcccaaagcagcctgtttgaaacggcgagaagaggaaaaggtgtcaggtgtggttggagacccccagatggtgctttcagctccccacccaggcctgagcgaagcccacaaccccgccgggcacatgtgaaaggtatgcctccgtgggacgagccacccgctttcagccctgtgctctggccccagaacggccactcgagaccccgggcttcatccacatccacacctcacacacctgttgtcagcatcgagccaacaccaacctgacaaggttcggagtgatgggggcggccaaggtgacactgggtccaggagctccctggggccctggcctaccactcactggcctcgctccccctgtccccgaatctcagccaccgtgtcactctgtgacctgtcccatggatcctgaaactgcatcttggccctgttgcctgggctgacaggagcattttttttttttccagtaaacaaaacctgaaagcaagcaacaaaacatacactttgtcagagaagaaaaaaatgccttaactataaaaagcggagaaatggaaacatatcactcaagggggatgctgtggaaacctggcttattcttctaaagccaccagcaaattgtgcctaagcgaaatattttttttaaggaaaataaaaacattagttacaagattttttttttcttaatgtagatgaaaattagcaaggatgctgcctttggtctctggtttttttaagctttttttgcatatgttttgtaagcaacaaatttttttgtataaaagtcccgtgtctctcgctatttctgctgctgttcctagactgagcattgcatttcttgatcaaccagatgattaaacgttgtattaaaaagaccccgtgtaaacctgagcccccccgtccccccccccccccggaagccactgcacacagacagaacggggacaggcggcgggtcttttgtttttttgatgttgggggttctcttggttttgtcatgtggaaagtgatgcgtgggcgttccctgatgaaggcaccttggggcttccctgccgcatcctctcccctcaggaaggggactgacctgggcttgggggaagggacgtcagcaaggtggctctgaccctcccaggtgactctgccaagcagctgtggcccccagggcta

SEQ ID NO: 11247 - DNA, 1197 bp, Homo sapiens
tgtatttttagtagagatggggtttcaccatgttagccaggatggtcttgatctcctgacctcgtgatccacccacctcggcctcccaaaatgctggcattacaggtgtgagctggtgtgagccactgtgcccatccgaagtgttccatatttttaagttaatgattgaaacagtttactttcaccaaaaaagaagagtgttcttttagcatcttagtagattcctgccattgagttgctgcagaatttctacacactttgttccaaaggtggtaaaactgtttccctttcatcttgtggtccttaatctgtctggcattggtagctacacatggcgtgaggtagggatccagttctggttgttggttttttgtttttatttttggccaagacctggtttttccaggaaagcccaagtccctcaccacaggagcacaaagagatatgtcagttggccctggaggccgacgcaggcccctgaccctaggcctgttgcagggctagggcgagcaggtgccacggcggccgccagcgagatcaagcgggaggagaaggaggacgaggagaacacgtcagcggctgaccactcggaggaggagaagaaggagctgaaggccccccgggcccggaccaggtgccaacccacccctcggcactccccaccctcaccccatcaggacgcacatgtgcacaggccacacgcacaccgcacccacactgggaggccgtcggcgggccccacgctcttcccccaacctcactgtctccctctggccccctcccggcgccctccccatagcccagacgaggacgaggacgaccttctccccccagagcagaaggccgagcgggagaaggagcgccgggtggccaataacgcccgggagcggctgcgggtccgtgacatcaacgaggcctttaaggagctggggcgcatgtgccaactgcacctcaacagcgagaagccccagaccaaactgctcatcctgcaccaggctgtctcggtcatcctgaacttggagcagcaagtgcgaggtcagtgggggcgcgggccaccagcgtccctgcagcgccaccctccctcgtgttcctgccctcgttctccttccccgcccgccttcctggagccagccctccctctgcagcagttgcctccttgcagtgactgtgcccttcacccctctgaccgcattgcca

SEQ ID NO: 11248 - DNA, 1261 bp, Homo sapiens
ggaccaacaccccatacttcccagcagagccaagcacaccgggcactgggccccggctctgcctctgaatgggaggcaggagggctttgcgaaagggggttactgaggtcacaccccactcggcctctcctagaagtcccacagagtctctggtcactgcctctgcctggaggggctctggagactcaaaggggcagggaaggggagggagggaggccggtgcctgggacacatctgaggtgcatcccttgcccgcagtcctacaccacatatggcctggagctgacgcgcgtcacggtggtcgacacggacgtgcacgtggtttatgacaccttcgtgaagcctgacaacgagatcgtggactacaacaccaggtgtggccagtgccctccacgagctgggagccctcccagccgcctctccccagggacccaccctcccccgccccaccagccagtgcttccaggctgagccctggtgcccctcctgcccgttcccccaggttttcgggggtgacggaggctgaccttgccgacacaagtgtcacgctgcgtgacgtccaggccgttctgctgagcatgttcagcgctgacaccatcctcatcggacacagcctggagagcgacctcctggccctgaaggtgccctgccggcccgggtcccgcgcggttctccagcaggacctgcgcaggccccacgtgcgctgatctctgccgctgcccacaggtcatccacagcaccgtggtggacacgtctgtgctcttcccccaccgcctgggcctcccctacaagcggtccctgcggaacctcatggccgactacctcagacagatcatccaggacaatggtgagtgccggtgcctgccctggggccgtccctgcgcaggggccgggtgctcaccgcatctgccccgcagtggatgggcacagctccagcgaggacgccggcgcctgcatgcacctggtgatctggaaggttcgagaagacgccaagaccaagcgatgacgcctgcccgcctcccacccgcctctcctgccgtcccgctggtccttagccccatgcctcttccaaaacagtgcaataaatctccggtaacccgtccacctggccgaggcagcccagagcagcgggatgagctggcggccagagaacgcccagcccagcccacccccgctcacgtcctgccgcacccctccgccggtccccaccctctgccccccagccctctggcgtctctagaaactgctgctgatggagacc

SEQ ID NO: 11249 - DNA, 1261 bp, Homo sapiens; identical to SEQ ID NO: 11248

SEQ ID NO: 11250 - DNA, 1189 bp, Homo sapiens
acggccgtgcagtgcgacgtgggggacctccagccgcccccagccaagcccgcctccccagcccaggtccagtcctcacaggatgggggctgccccaaggagggaaaacccaagaagaaaaaaaccggggccccacctgcccccagctgcaaagacggggcccaggggaaggacaagaccaaggacaagggccgagggcggcctgtggagaagccccgtgcggacaagaagggcccgcaggccagcagcccccggcgcaaggcagagcggccggaagggaccaagaagaagccatcttcggccactcctgtggccacctcagggaaagggaggcctgaccggccagcgcggcggccgagccccacaagcggggactcccgaccggcggccggcagaggcccaccccgccccctccagctgcccgacaggaagagcaccaaggccccgtcggggaagctagtggagcggaaagcccgctcactagacgagggcgcctcccaggacgcccccaagctgaagaagcgggccctgagccacgccgacctctttggggacgagagtgaggacgaggccgcagggccaggggtgccgagcgtgtggccctctgccctccccagcctcagctcggactcagactccgactcagactccagcctgggcttcccggaggcgcaggggccgcccaagcggctcaaggcctccccgcccccctcccccgccccatcctcctcctcctcctcctcctcctccacctccagcgcgggggcggatgtggactactcggccctggagaaggaggtggactttgactccgaccccatggaggagtgcctgcggatcttcaacgagtccaccagcgtcaagacggaggacagaggccggctggcccggcaggtgaggcgcgcgggtgctggggctgggctcgggcagaggcagagccgagggcctggtgagagaccttctatctggagtggtttccagttggctcggaggcacggggtggaggcagctcctcagtgctggtccctgagcccgttgaaatctcaggagctcaggagcacccgggcagccctgttgctcctgttgcccctcacccacccagaggtcactggcccgtggccaccagccaggcttctgtggccacgtgcacacggtctgttcccactgactggcagggggatattggccc

SEQ ID NO: 11251 - DNA, 1210 bp, Homo sapiens
aaacgccagtgaacggcagcgcagggaacggggcggggccgctggcttcgcccaccgccacggtgttgggggctgggggtggccctcgggactggtgtggagcctgagcctgacccactgacttggctgagtggggagactggagggtcgcatccggagctgggcccggggacgcccgctggtgggaagggtgcgcgcgcgtcggaggccgcggctgaccctgctccggcgccgccaggtacggcatcagcccggacagcatcatcctgtacgggcagagcatcggcacggtgcccaccgtggacctggcctcgcgctacgagtgtgccgcggtggtgctgcactcgccgctcacctcgggcatgcgcgtcgccttccccgacaccaagaagacctactgcttcgacgccttccctaagtgagcggcccgggcggggacgggggcggggcggggcccgggccgggcgcgaagtctcaccggctccacgaccctcccgcagcatcgagaaggtgtccaagatcacgtctcccgtgctcatcatccacggcacggaggacgaggtgatcgacttctcgcacgggctggcgctctacgagcgctgccccaaggcggtggagccgctgtgggtggagggcgccgggcacaacgacatcgagctctacagccagtacctggagcgcctgcgtcgcttcatctcccaggagctgcccagccagcgcgcctagcggcggccccaaccggccggacctcagcaataaggcggcccccggacctcaccccgcgccggcccccacccaggggctgcatgtggaccccccgggcggcccaggggaccccgccccgacccaggggctgtggacgatgtacaggcaacagagctacgcactcctttccttttggaagcaagaagaaaatacgtgaaaacggaaattaaagatttaaaattttagggctgctctccttcctttcatggctctgctcactctctcgagcgctcagcgagctcgaaagggggccggggttcccaggtttcgtccctgagtccctaggagagatcggcacggacccccttataggttttactctgcggaagtggggtgggtctctgtctagtccggggagcccttagggagctggttgcctgggcgatgatgggtggggcagcgtttgagcccaggacccctgcctgcttcctagggaggctggtga

SEQ ID NO: 11252 - DNA, 1136 bp, Homo sapiens
tcgcaggccggtgggacccggcgcctgtgcacgctcacgtagcggggcctgttcgggtccctcgtgggtcccttcagttcgagctctgtccttgcctcagcggcccgtcacccatagggtggcagagatgggccgggggagggagtgggcagcagtgcggaccgagtcctggcgcatggggtttccctggtgctggagccgggcgtttcgggggtgtgggcggggctggggtcatatcccctgcatgccccgcatgccatggctgtactcacatggcaagaggtggtgatcgccagctcagggaaggtgggggttccttcatcctgtggagagggggctgaattggggtcccctgagctgtagggtgcagtgcctgacaggccgtggggagggccgaggggatggggactgacaggccccgggcccatgccgccccctggcacgggtggatgccccgcctcccgggggtgcccagctggactgtggcacccccaaaggaccccacatgtcactgttcccccgcagggcttcccacggcacgacatggagacctgtggttgcgaggctccctggggctcggcttggaccgcgatggggctgggccctggcctcctaacggggctgctgtctggggcggtagctgggggggcgctctcccccctgcccgcgactcggagcacccccacccctcccctgccgggccaggccgggcggcgttgttggcgggggccccggtggaggcccggcctgggcggcgcccgccatgaatgggctgtcgctgagtgagctctgctgcctcttctgctgcccgccctgccccggccgcatcgctgccaagctcgccttcctgccgccggaggccacctactccctggtgcctgagcccgagccggggcctggtggggccggggccgcccccttggggaccctgagagcctcctcgggcgcacccgggcgctggaagctgcacctgacggagcgtgccgacttccagtacagccagcgcgagctggacaccatcgaggtcttccccaccaagagcgcccgcggcaaccgcgtctcctgcatgtatgttcgctgcgtgcctggtgccaggtgagcagctgtggccgcgcctgggctgggtcaccctgttc

SEQ ID NO: 11253 - DNA, 1100 bp, Homo sapiens
ccttgggtcgaagggatgaggtggggcctccttcaagagacaaagtctggttctgtccgtgggttctctgtccctacagaaaaggagaacaacttcccgccactgcccaagttcatccctgtgaagccctgcttctaccagaacttctccgacgagatcccagtggagcaccaggtcctggtgaagaggatctaccggctgtggatgtgtgagtgcgcctgggggcaggaggcgggaagcgggaggcagggctccccgagggagggagtggcattcaggcaggggcagcccgtcgggggcccaccgtctactgaagccgtcctgggcctggtggtccctgcggtgaacgaggctggtgtccaggccccagtgtcttggcttgcacagttcatcctcgacatggggtcactgggctggggaggcggacagcgggtgccccattgctgggcccatgctttcccacggccacaccctcccgtgcctgctcatccgtcctccctctctcttcgcagtttactgcgccaccctcggcgtcaacctcattgcctgcctggcctggtggatcggcggaggctcggggaccaacttcggcctggccttcgtgtggctgctcctgttcacgccttgcggctacgtgtgctggttccggcctgtctacaaggccttccggtgagcagagctgccgggggccgtctgcacccagagggaaccagggcccactctgcaccccagtcccagcccagctgtgaggagctgtccctttctctgcccagtgtgaaagacagttcacatctgggggtggcaaactgtggcccacaagccagagccaactactgtctgttttgttttgctttctagtaattttggctgggtgcagtggctcaggcctataatcccagcactttgggaggccgaggcaggcggatcacctgaggtcaggagttcaagaccagcctggccaacatggtgaaacgctgtctctactataggtacaaaaattagccaggcgtggttgcgggcgcctataatcccagctactcaggaggctgaggcaagagaatcgcttgaacccgggaggcagaggttgcagtgagccgaga

SEQ ID NO: 11254 - DNA, 1239 bp, Homo sapiens
tggctaattattttgtttttgtatttttggtagagacaggttttcaccgtgttagccaggatggtctcaatctcctgacctcgtgatcctcccgcctcggcctcccgaagtgctgggatgacaggcgtgagccaccgtgcccggcctattttttatattgtagtagagacagggtttcaccatgttgtttggactggtctcgaactccagagctcagacagtctgtctgcctcggcctcccgaagtgctgggatgacaggcgtgagtccccgtgcccggccgccatgctcattttctgtcttctgcctccctgtcctctgtccttgcaggtgcacaggatctaccgaggggctggcggaagcttccagaaggcacagacggagtggaacacgggcacttggcggaacccaccgtcgagggaggcccagtacaacaacttctcaggcaacagcctgcccgagtaccccactgtgcccagctacccgggcagtggccagtggccttagagggagcctgccctgcccccaccgcccaccacctcctccccttcattcctgctgctacccctggtcccgagggctgggagtacctggggccccatccccccagctgggatggtggaagccggtggtggccacggaccgcccccctcctgccagggccacagaacccgtgttcatctcatccgagagcggagttcctcacaagcactccccagcagcccttggcctctgccgtccacaggacgccctcttgctcccggaaacgtgtggtcacccgccgtccactgcacggctggtacggccttgtcttcaggtctcgaggcctgactccgggggacaggtggcagcaggtcggccgccctcccgtcctcccagagctgctggcgctgaggtcagagcgggtctgatggggagctccgtctcaccggccacccgccgtcaccatggcagatgcccttggccggaactaataagaggcgtcggggccagcttccggtcccctgcagtgatagagggcttggtgcctagctgagtcctcgctgtccccgccatcccctgatctgtgcggctccagcctcgccccctccccacgtgcaccatacctggggagttcctggtccagggtatcctggggccaccctccctgcctccaaaacagggatccctggcaggctgtctttccacgcccctgagttcagagtcggggacccaggccaggtcgggagcacagccgctc

SEQ ID NO: 11255 - DNA, 1130 bp, Homo sapiens
gccatgggcaggggcagctcggtggctcctgtgtccctgcctcgggcctgcctgctgtcatctgcctccctccctctttcccagagcggccctgggcctggatacggggactgttgtgtggcccctctgtgtctgggggtgcgactgctcccctggcttcaggatcctcagggcttctacccgggattggcagtcatgctctcctggcagtacactctcccacctgtgccacccacccacccacccacccatcccgctttacagaaagccccctgagccctaccctgttcgtccccaggcagccacgccgagatctctggcctctgatgtcatgtgatgtgtgcttcccagctgggttccgggcagggacggtgctcatcatgccccggccttcagagctccttccagcccagcagtctcctggctgtgtcctctgtggcctccgccccgtgtcctcagtggccccgcgggggccttgccggtgctcacctgtgcctctgtttctctgcagctgtgagccgtgagctttgaggcggtgggatgtgtcagcagaatgtctcctgcccccgagagcgaccccgaggccactgagaagagcagcgcggcctggccggcccgaacgcctgcgtctcagtagctgggagccacgggcccacgcccgcccaccggccgcagtgatgttctagccacagaggagccaagacctcaggtttccagagacttgggatttgcacggcagcagagtcaccgtggagaggccagggtatcacaaacttatggattttgacaagaaaggagggaaaggggagacggaggagggccggagaatgtccaaggccggcgggggccggagcagccacggcatccggagctcggggaccagctcgggggtcctgatggtgggccccaacttccgcgtcggcaagaagatcggctgcggcaacttcggggagctccgcctaggtgaggccctgctcggtggtaggtggggtcgggaggctgctggcagggccgccccgagtcaccggagcctctggtggggccgcccggggtcactggagcctctggcggggccgccccatgtcactggcaggtgcgttgaatcatcagtccgtcgtggtgcgagtgcc

SEQ ID NO: 11256 - DNA, 1482 bp, Homo sapiens
ttcatgtaagactttggccgaaatttctacacctgtgtctagtcctcccctccaagagcattaactatttaaaacaaggaaaagaggaaaaaaaaaacagaggcccgccctaccccactcctgcccctccgtttctttgctgaagtgagtagtgtgatcctggaggccccccggcctggccccgccccgccagccgcccccgttagcgtcataaagtccagcttgtctccctcgatccaaaggccgttttctcgaggggagggcaggcccggcctggaggggtgctgtggagctgtcttgcccaggccctcctgggagggggacaggcattgttgccaggggtgaggccgtgccccaggcctccccgaaaccaaaggggaaggcaggggtggggccgtggctgaagccggctccccaaccaaaatgctgcaccaaagctcgggcgccgcgggcacggctgctgcagtctcttcccagcctggccctggcaaggggcgggtgggcgctgccaggcgggtgcttctcgacgcacttgctcccggaggctgcgccccggcgcctggaacccgaggtgggaggaccggttggtgtcaccctgctcggccctcagccctgccgcgtggggcgcgtgggcacggagcttcctgcctctctgctccgacacccggcaagcagccggagacaaaacgccttaaagcccccggcccagccctgcaggtatattgcaggggcctgggggcggccctggactggcgggcggttccccagtggggtgccctggaggctgccgggcagagtggagcagcttggggccgtgcccagggcggtggctgtgagtctagtttttgctttaccaagtgtacagaaatggcatttacgtttctctgatgctcccttgaagccatagaatttaggggcttttttaaaaaaataaaagaaaaatgaaaccaaacccaagtgtagagggatttgtctgggctttccacgaagcttgacctggaacgggcgttgcttccatccccatcctgcctgtccgggacgagtccggagcggctggcggcctccggtaacagaaaccgactgatgaggcggaaggtaaggaagatggaagcagagggcagagctgggctctgtctggggagagggcaggagacgagtgttcacgtaccatggaaaggggaagtcacacacatgcgacttggccccgggggtcccgttccccgacactacacaaatatacctgaaagcctcagcgacggggcccaggcaggatggtcctggctgctctgacggcggaaggcctccttgactccctctgttcacgcagcagggcagaaaacatctccacgggggccacgacactgtgaagggaatcagcagtagctcccagaagaacagcggaaactgcaggcaggtgaagaccttggcagcactagccccggctccgccccgtgccttctccccagacaacaccccataccc

SEQ ID NO: 11257 - DNA, 2039 bp, Homo sapiens
tggcaggcagctcacccacccaccccatgggatcccccagcccttcacccgcgcctgccttgtccccatgatagttgacaatcggggcttcctgcaaggcccgtctgtctgtccaggactcctggtggccagattcggcctccgaccttgaccttaaactgcagctgaccccaggggctcgccgctgcccctcccctccacaccaaggcctgagacagcaggagccccgcctggcccgaagccgtttccaccgcagcaggcagaggggctggacaggcactgtcagccaatgtggggggtcctgaagacacccccttggggcacccgagtgccccttctcagggctcagtctgaccgtagccacgtcctgcctcgcgccgcccctcgggcctgacctggaagctccgtcagctccgtccttgtccttagagctgagcccagaccccggggtctggccgaatcctcacccccagggcagtgtttttggtctgccaccttcaggaaaacggctgcggcctcggcctcccttcgggcacccaggaatgcgggggtctgctcagtccccccaccctccatgctccaacccccgggggctgcggagcctgctgccccctccccgcgggtggggacgttctatgcaatacagggttccactttagaagtgcgcgcggctagggtcaccgcccgcccttcccggcgcagcccccgagctccacagctggggcagcccctctggcttctaaatccgcggtcgggattcttcctcctgtttagttttttagtttttccttaaaaaaaaacaacacatcgatggactttgcttccctgttcttgaagaatacttgaatgtcggggggcctgggggtgggggcctcggagaccgtctgcctggccctgctgcccctcctgaatctcgtatgatggtcacagtccggtggccgtgggggtgctctgccttccctggtccccactgcccatatctgtggactgccccttccaaagacccctggggggggtggggcattccgcccacccctttcccccatcacttctcgcctgtcagtgattccatgtttcgtaacgggggattctctgcctttttgtatcaaagaacaagcaaatggacccccgcccgctgcaggcgcccatagccatcgggtctctaaagctgagtggctagcagcgtttgtttgtttgtttttttttttttttctgaaggtgggacagtcacttcctcctccctccccacccctgtcgcatccacgtgcgacctggaggactggtcagaaccgttactgtgaatgagtgaagatcctggaggaccctgggccccaggccagctcccatcgctgggggacggtgaacggccatgtgttaatgttacgatgtttttaaaagacaaaaaaaaaaaaaaaacctcaaaagtttttttaaagtgggggaaaaacatccaagcactttaattccaatgtaccaggtgaactgacggagctcagaagttttcctttacaccaactgtcaatgccggaattttgtattctgttttgtaaagatttaataaaagtcaaaaaacttgctgtgtgcctgagttttagttttctgtcaccgcataaggagccatccacaaccagttggtgcaaaaccacgttgttgctggtgatgctgagtcaggagttttgagggggtgcgctcctgtggggtctgtctctgctccaggatgcctggatgcactgctgggaagacaggcaaaaagctgagctcggctgggagcagtggctcacgcctgtaattacccagcactttgggaggccaaggcaggtggatcactcgaggtctggccaacatgatgaaatcccgcctctaccaaaaatacaaaaattagcccggtgtggtgcaacatgcctgtaatcccagctactctggaggctgagacacaagaattgcttgaacccagaaggcggaggctgcagtgagccgagatgatgccactgcactccagtctgggcgatgagcaagactgtctcaaaaaaaaacaaaac

SEQ ID NO: 11258 - DNA, 1137 bp, Homo sapiens
tgtgtctctgagggctgtcagggtcacaggtggagagcagcctccactggctttttttttttttttttttttttttttttgaggcgaagtctcactctgtcaccaggatgctggagtgcaatggcgcgatctcagctccctgcaacctccacctcccgggttcaagtgattctcctgcctcagcctcacaagtagttgggattacaggcgtgtaccaccacacccagctaatttttatattttcagtagagacagggttttgccatgttggccaggatggtctcaatctcctgacctcatgatccacccgccttggcctcccaaagtgctgggatgacaggcgtgagccctgctttctagagttgcagggcgttaagtgtggtgaattccagccgtggcagtggagtttctggccccttctcgactatgagcgtcccaccaacccaggtgctgtgtcctttcgcctgtttcagatcattgagaagcagccaggccacattcggagcagggttttcagggaggtggagatgctgtaccagtgccagggacacaggtaggtgagccacccttgccaccgcactggcctgagctgtctttcagtggatgaagggcctgagtgccacatcacccccagcaagcgtctgtagggcacccagtttcccaggccctgcattcccctccctgaagcaggctggctgacagccccaggcgggcagtgtgaagctggcctattgccccagtcccagcttccggtggacaggccagcaccaagagggtgggcccctcctaggccgggcagcaggtacccaggggcctcaggaagcctcagctcctctcctgcccccacccccaccccaggaacgtcctagagctgattgagttcttcgaggaggaggaccgcttctacctggtgtttgagaagatgcggggaggtacctgggggctccaggctgtgaggagggagggagctgggaggtattacgggatgggggcctagtgccacctgcaggagggggcttgtggggtgagtgtcctgcccaaatggtggctcaggggtgaggcctttgtgctggaggaagccagtgtgggggcgtccccgccaaagtggaggtgggtgctggccttgaggggactttg

SEQ ID NO: 11259 - DNA, 1214 bp, Homo sapiens
ggtgggagttgatcctggtgtgtgagcggggacggagttgatttttccgtaatgctcagcgcagggcttgtcagtgtggacgctgcgacactggggcaggataggtctccctgctgcgtgggcagggatggggcctgagtgcctctcctctcctctcccctgcaggggcagaaccccttcgagctggccttctccctagaccagcccgaccacggagactctgactttggcctgcagtgctcagcccgccctggtgaggggcccgagggggaggagggcacagggcagctgctgtcgctgccatggcagtggccagcccctgcaggggggtgggggccggccggccagggccatgtcctgagccccctgggcgtgcctcctggaacagacatgcccgccagccagcccattgacatcccggacgccaagaagaggggcaagaagaagaagcgcggccgggccaccgacagcttctcgggcaggtttgaaggtgagcggggatggcgggcattgggggagccgggagcggggaaaagccagggtccctctcacgcccgccccgctgcccggcagacgtctaccagctgcaggaagatgtgctgggggagggcgctcatgcccgagtgcagacctgcatcaacctgatcaccagccaggagtacgccgtcaaggtgggcccgcgccgcgccctggggaacccagcgccttgggatcggtgttgagcgggggtggaaacagtgtgtggcattccggctgtccgtcctacagccgggaagacccgtgtctaaaagtggccaccgggccctgagtccagtcgggaatgacagtgagggtggcccctctggtaccagggtgggggcttcagacagaggcactgtgcccattgggtcccctgggccgtccctgcctctgagctgtccctgagggtacatgacagtttggtttcaaggatcaaaatgcaatgtcatatcccagggcccagaggggctctgcgtttggggaacctcagtgcaggcccgtgagagccccctgtgtcactctagccctgggcggctgctggacccagggtgtggccgaagggctgggagcaggagccctgttgaggctctggttgtgaccctgtgaccttgtgggccggttggatcccgtgttccaagaaatcttccaggcttccctcgtgacctggcatccggctcccgggctgggtggggtcc

SEQ ID NO: 11260 - DNA, 1310 bp, Homo sapiens
gcctcggatggacctggctagagtcccaagggttgtgctgggggctggattctggggccttcttgggttccacggttccagtggccaagtctgccctctgaaacagggatgggaccaagtccaggccaaattagggacaccagtagcctcttgtttctgctcctgtcccctggtgctcccttgggggctgagctcagtttcctaatcagccacagaggacttgggactgaggacagacctggaggccccacccatgctgagcccccgcagcgtctcaggccccactccctctcgcccccgccaggcgtctccaacgaagcccagtatgtgttcaccatccagagcatcgtcatggcgcagaagctcaaggggaccctgtccttcattgccaaggtatgcagggctccacttggcgttgaagagccgactctgcaggcaggggctcctcctgccccatcgcagtgggtgtccaggtgtccctaggggaagtgggccacctgcctggggaaccctgagccctgagctgggcccgactcccctctcaactgcaccaccttcactccaccgcagaatgacgagggtgcgacccacgagaagctggacttcaggctgcacttcagctgcagctcctacttgatcaccactccctgctacaggtggggcccaggcccactcccctatgtccccgaaccccctccgcctcccctctaccttgcagacacctgtgccccggggactgaggcttctgggcaggactttagagacggatttggaggcgctggctcgtgactggtgcaggtcaggctgcctggtgtctgcgccagccggggccgtgtagttgaagccacaggccaggcagcgtcacccatagaggtccaggcccctggaagtcctgaaggctggaggggtgagaccaaggagccagcagggcaggctcctcctgaagcctctcctcggcacggcttggcgtgcggcaccccctcccccctgagtcctcacaggccgtcctctgcgtgcctgcatcctagcctatccccccagtcccttcctacaggacatccgtccttgtcggaggagggcccatcccatggcttcaggcacctctgtgacctctttaaagacaagtcattgtcagtttctgggtgtgacggcttccgcacatgaaaatgagccacaccttccaggacccccaagacctcccggcccagacacacaggagggtgtccaagcgcagcgtgtgtggcaggttttgttggcctctgtgccaggaagcctgaggagcccggccccaccgcagtcagcctccctgt

SEQ ID NO: 11261 - DNA, 2809 bp, Homo sapiens
agccggagcggggcgcgtcctccatgaggtcaggctaggcccgcccggtcttcgcggggacaagcaagagtcccagattttggccgtagtgcagggtggaaaggggaagccgcgacagaactgaaaaggggaagcgctggctgtcttggtggccggggggtgaggctctgccccggcggggctgcgtgaggggaaggggccccccgccctgggaaggttgggctgtcctgggcggcgccgcccgaggagtcggggctcagtgactgctgcccttgtaggtgcttggggcaggcgttggagctgccttcgggaagcctcgggggtgtgggaccgggtgggcccctgcctgggcggggcggggtcttttggccgaggcaggggtggggatgtgctgaaggccgcccggacgccctggaggggtctccgcccggagcctggcgctgcctcgtgacctgcatcatcttcagttccagggtctccctccactgctgtagtaacccgggtccggggcctcggtggtgctcctgatgcccctcacccacccctgaagatcccaggtgggcgagggaatagtcagagggatcacaatctttcagctaacttattctactccgtgagtatggggccgggcctgctggggctgctctggggccacaggtactttcttgtgcaccttgctgcccgtacctgtgattgaatgtaatcgtgggaaccctgagtttcatcagagccggcgcacagtctcctgcagcccaggcgttgcctgagctcaacacggcctaggcccaagctttagcgctgccgggttcttggagtcctgtggggtgagtcagggttctgaattgggctgcaccccctggacaggatgatcggctgaatgtaacagaggaactaacgtccaacgacaagacgaggattctcaacgtccagtccaggctcacagacgccaaacgcattaactggcgaacagtgctgagtggcggcagcctctacatcgagatcccgggcggcgcgctgcccgaggggagcaaggacaggtgaggggcaaggacaggcagggagtgctcacccaggggagcagggaccaggtgaggggcaaggacaggcggggagtgctcacccaggggagcagggaccaggtgcgggttgctgcccaaggggtgcagggacagatgagggagggcactgccttcaggcagcacatatgggggccaccatcgctttgttggtggggacagggtccccccttttttttttttttgagatggagtcttgcttttgttgcccaggctggagtgcagtggcatgatcttggctcactgcaacctctgccttccgggttcaagcgattctcctgcctcagcctcccgagtagctgggcttacaggcgcccgccaccgatgcccagctaatttttgtgtttttagtagagacgaggtttcgctatgttggccaggctggtcttgaactcctgacctcgtgatccgcccacctcggcctcccaaagtgctgggattacaggcgtgagctaccgctcccggcctggggtccctttttaaaaagtgcactccaaattcgtaccctgggattctaccctccaagggatgccaggcagtgtcagagcttttctgtcatggggcatgcacgtgggtgggtgcagcggtgctgctcaacactgtggtgtcaggacggccccacccagaggacgatctgggccccagggggaccctggagtagagcgggcctcagggtagctgctaaggcccaggaggtaggcaggtgggtcgggccagccgagacgctgacactcgctgcagctttgcagttctcctggagttcgctgaggagcagctgcgagccgaccatgtcttcatttgcttccacaagaaccgcgaggacagaggtaggtgacccgtatcgcctgcagtagggtgcgtgggggtgcctgcgccgccccttcattctcagcccgcaggcacggtctccctgcgggggtggggggtgcgggcggggggttctggtcggcaggggttctgacggcttctcccccgcagccgccttgctccgaaccttcagctttttgggctttgagattgtgagaccggggcatccccttgtccccaagagacccgacgcttgcttcatggcctacacgttcgagagagagtcttcgggagaggaggaggagtagggccgcctcggggctgggcatccggcccctggggccaccccttgtcagccgggtgggtaggaaccgtagactcgctcatctcgcctgggtttgtccgcatgttgtaatcgtgcaaataaacgctcactccgaattagcggtgtatttcttgaagtttaatattgtgtttgtgatactgaagtatttgctttaattctaaataaaaatttatattttacttttttattgctggtttaagatgattcagattatccttgtactttgaggagaagtttcttatttggagtcttttggaaacagtcttagtcttttaacttggaaagatgaggtattaatcccctccattgctctccaaaagccaataaagtgattacacccgatgcacctggctctgtggtggtgacgctggggactggtgggaggagtgcctgggaccacagagggccctgggtggaggggtcgcgggggatttggcacccaggcagctgcgggacccctcccacggaggagaccccctgggctgggaggccgggccctcagcttggcgccagccttgccactgctcgcttgaagccccttcctgcctcgcgtccccttccgccccagcctgggcctgcg

SEQ ID NO: 11262 - DNA, 1163 bp, Homo sapiens
ttggaacccagaacagaatgtgtagctcacaggcgggctcatggggacatggaagtggaatggaaggctctagaaatagacactgttgttgctcagcccctccctggtggggaggtgggggcagccatctacctgccggctgcctccaggctggccctgatcatggccgaccttccttccttccttcctgcagggggacccgaggaccacctcaagaggctgctacgtgatgtgaacccacactcctcatccacacacctttctttacccagagccactgaaaactatttttatatcattggctttctttagttcttgatacatttctagagaatttctaagcgaactgccagaacgtgtgggtgggtctcccccagccctccctcctggcgggtctcctccagcctcacttcgctgccacttcgccgctgccccggagacttttcaatcccaccccactcctcatctcaccatttggtcaaattggaagcccagggccaggacccggaggtttagaagatgcttgggcttggagggaggagggccggcgaggctagcgaggggacaggagacggccctgctgcggacggagcgcggaaactgcgtaggaattcagtggtggtgggtttttttaaggctttctacaaaaccaaattcagaatccaggcgtcgacctggtggggcccggggccaagcctgcattctggctgcccagcttcggacagcgggaactcctcaggcagccacgcagcgggtgtgggccagcatggggatggcgtggcccccagggcgggttttcactccgctgcctgggcttccagattcccgttctggcagcgcaccggccgggtttctcggaccgttgactttatttgggggagttttcccgcagttcagttcctgactgtgcaaggccaacagggcaggggaggggaagacctggggaaggaagaatgaggacagtcccgtcgtaagacctgtcacaacaataagcagggaggggagatgtggaggggacacatctggttgccttggaggcagaagctgtgagtttcagaacagctgtctgcagggaacgccaccatgttgaccctctggaggagagcgctgtggagcccctcccgtgttccagctccgtctgccctgtgcctatatatacacat

SEQ ID NO: 11263 - DNA, 1921 bp, Homo sapiens
tgcacataggataggtcaggatccagggtttctcccgggctcactcaaaagctgtttcctaactacttagcacaaaacccttttaattgttttctgcacttttccatttgtctctgttggccagacgaagagacgagcttggtgaaaggaagcagttggagagagggagggtgctttctgatggggttgaaaaccactgggaggagcagacatgatggcccacttggtagtggggctcctcctggcctcagggccgtccccctctcctctcccaggatcaggaggaatcactgcctctcctctcccccgacccccttccagcaccagcagcaggtcttgggagccattgagagggccaagcaggtcaccgctcccgagctgaactctatcatccgagtatgtatggggacctgggcgggtgggcgggggacaggtgggccccaggcagctaatgttcccctcccccgccctgcagcagcagctccaagcccaccagctgtcccagctgcaggccctggccctgcccttgaccccactacccgtggggctgcagccgccttcgctgccggcggtcagcgcaggcaccggcctcctctcgctgtccgcgctgggttcccaggcccacctctccaaggaagacaagaacgggcacgatggtgacacccaccaggaggatgatggcgagaagtcggattagcagggggccgggacagggaggttgggaggggggacagaggggagacagaggcacggagagaaaggaatgtttagcacaagacacagcggagctcgggattggctaaactcccatagtatttatggtggccgccggcgggggccccagcccagcttgcaggccacctctagctttcttcctaccccattcccggcttccctcctcctcccctgcagcctggttaggtggatacctgccctgacatgtgaggcaagctaaggcctggagggtcagatgggagaccaggtcccaagggagcaagacctcgcgaagcgcagcagccccggcccttcccccgttttgaacatgtgtaaccgacagtctgcctgggccacagccctctcaccctggtactgcatgcacgcaatgctagctgcccctttcccgtcctgggcaccccgagtctcccccgaccccgggtcccaggtatgctcccacctccacctgccccactcaccacctctgctagttccagacacctccacgcccacctggtcctctcccatcgcccacaaaagggggggcacgagggacgagcttagctgagctgggaggagcagggtgagggtgggcgacccaggattccccctccccttcccaaataaagatgagggtactaaagttgtcttggtttttattttattattatttttttctttttccagtatactagcttgtcttttaagaaaggggatattaaaaaaaaaaaaagacaaaagtgtttttaaaaaaaagcaacacccacacctgtgtctgtatatagtcagcttatctcgtgttcaatcgtctgatctctacagagagaagtggaaaatgctgtatcaagggtgggcttagctgtgcctttccaataaagatgtgagaagcttcggtgctgtgtccctgcctctgtgttgtggctgcccccgggggaggacggggttccttccaatgtgagacatcctcctagaacatcaggagttcctagctgtggcccggtgcggtgtggctcacgcctgtcatcccaacactttgggaggctgaggcaggcagatcacttgaggccaggagttcgagaccagcctggccaacatggtgaaaccctgtctgtactaaaaatacaaaaaagctgggcgtggtggtgggcaactgtgatcccagctacttaagaggctgaggcagaagaatcacttgaattcaaggagg

SEQ ID NO: 11264 - DNA, 1117 bp, Homo sapiens
gattctgtcttcagaggacgctgggtgatgaccggaggtgttcagggagggccgctccgggcgtggagtggatggaggccagggatactgctcagcaccctgcagtgcccaggacggccccgccccagacagtgatctggccccagggtccacagggctgcgcaggagaacctgcctagagtgaacaagacctggtagaatccagcagacgccctgggtgaagatacttttgcagatgagaaggggtgggtgggttgggggaagccctggttttctgtgagtgcctcatggttcatgccgccctctgagggcctgcctgccctccagggacagtcactgggccccctgctaccccctccagggacagtcactgggccccctgctacccccaccagggacagtcactgggccccctgctaccttgccacccccaccaggccagcagccccctaagtgtgtgtctgctccacagcaattcatggagatcgagccggagatgctggccatggagaccgccgtccccgtgtactttgccgtggaggacgaggccctgctgtctatctacaagcagacccaggctgcctccgcctcccagggctccgcctctgctgctgaaggtgtgctctgggctgcagggacggggcccgtgggcgtgggtgtggggaggcgtccccatcccaagggctgcggtcaccctgggctgtttctgctctcagcgtgtggcatcccttcgccggggttaacagtgggggttcctgggccccgtgtggacctgctacatcaccacctccgggctgggacctgggactctgcatttttgcagccgcctgtcccccctcccagctgctggctctgtgcacacgaaagaccagaaccacggactcaggaggagcctttccgatcctcaggggctcggggtttatgaaacacacgggcatctgttcagttctctacctgccaaggacattctcagcatcacatctcgagtgggcggcgtgggtgcgtcggcggtgtccttacggagaaggggcacacgcctttcctccagccccgtgaacgggggccctggcagcgaactcagagcaggaacccggagctctgtggtgggacctgtggt

SEQ ID NO: 11265 - DNA, 1176 bp, Homo sapiens
gaccccctgcccacctctgcccagcccctcccactctgcgggtctgttcagggcccctccgacctcagccttcggggccgggcagtgggtccgccctctgcgtccctggcgctcctgacctctcgcctctccggcctgcaggatgagttccacccgttcatcgaggccctgctgcctcacgtccgcgccttcgcctacacctggttcaacctgcaggcgcggaagcgcaagtacttcaagaagcacgagaagcggatgtcgaaggacgaggagcgtgcggtcaaggacgagctgctgggcgagaagcccgaggtcaagcagaagtgggcgtcgcggctgctggccaagctgcgcaaggacatccggcccgagtgccgcgaggacttcgtgctgagcatcaccggcaagaaggcgccgggctgcgtgctctccaaccccgaccagaagggcaagatgcggcgcatcgactgtctccggcaggcggacaaggtgtggcggctggacctggtcatggtcatcctgttcaagggcatcccgctggagagcaccgacggcgagcgcctggtcaaggctgcgcagtgcggtcacccggtcctgtgcgtgcagccgcaccacattggcgtggccgtcaaggagctggacctctacctggcctacttcgtgcgtgagcgaggtgaggtgtggtggcctgagcggagcggccagcggggagggtgtctgatggtggtgacacggggccaggagggcctgagggaggaggccagtgcgtgtgggtatgatgtggtggtctgagaggggaagtgggccttggagagtgcccaatgggggcgacacggggcacggagcatctgagggaggaggctggtgggtatagatgtgatgtggtggtctgagaggggaggcgagtctaggagaatatgtaaagtaggtgatatggcacaaggagagtctgagagaggaggccagtgcatatagatgtgatgtggtggtccaggcagggcagcaggcctgggagagcatctgatgggggtgacatggtgcaaggagggtctgagggaggaggctggtgcgtgtagatgtgatgtggtggtccaagcggggaggcgggcctgggagagcgtctgacgccgggtgacacggggcaaggagggtctgagggaagaagccagcatgtgt

SEQ ID NO: 11266 - DNA, 1120 bp, Homo sapiens
gttttagcagatgcagctaagatgaggtcaccccgtgttaggatggccccgaatccagtgcctggcacccttataaggagagggaaacttggacgcagacaggaaggccgggtgaagacagaagcagagaccgggggccaaggagtgcctggggttgcccagagccaccacgggctgcaagaggtgtgggacagactctctcagccacagaagggcccagccccgcacaggcctggatttcagagggcgaacatttctgtggccgaagctcccagtgcgtttgcagtccttggagacggccgcagacacatttgttcttggcctgtctccaggtctgtagaccccacagtgagcggccactggccggaggggaacaggaagagctggaggggacgtcacacacatgagccttttaggaataacgagtgacacgtgcaagaccccaaaccaaacaccatgtaacctgacacccagggagggagggagggaggggctgggaggggctcacctgtagggaggggctcacctgtacagcggtgctgggaagctggcctcgagggtccccgaggggatacagggccgtgcagcctcttgcctgagggtttgcatgtctgcctggatcccccgggctcctgccagaaggcctctgaggccaccgttgacagcataaaggccacccagtgtctcggcaaccacgctgaccactccctcctcccagctgcggggtgaggtggcctcgagggaagggctggagagtcgttctgagtatttaacaactgggggtgacacagtgtgggtgggcaaggccagggccactgccaggtggggtccgtggccctgagcccccagctctatgcaccccccacctggggtctggcttctccatctccacacccccttgaggggcttctgtctccccctgccccttcgatcgcaggaggcagtgcctggccggggtcgcaggcacctgtcaccccagctcctcactcctcacccactcacatccagtccgtttgtaaaatacacccaggatgagacctgcacgcagtggctcacagcagcacgatttgtgacagcccgaggcggagaacaccgaacacccagtgaaggtgaggggatc

SEQ ID NO: 11267 - DNA, 1097 bp, Homo sapiens
gctcctgtctgcctgcgggggggctctgggcaggggtagcctgggcatctcagccctgccctggttgtgggcggccagcgagcccagtgtctgcctctgtcccgagcctctggtcccctgggactaggttagtgccccctcatctgggtgcagagacagtgggtgcatcctggtagcatgcctttatcggggagtgggtgtgagggaaggcggggaccgctggcaggtggaggggcagtatggttccaggacccactcccggtagttctgggtggtgccgggcgggcgctggggtgccgacagggagggcacgtagtctgatgccctccacagtggctccaccccgtaccggttcctgttgagcactgtaggtgggactcgggtcaccatgtgcccccacctcctcgccgttggccagcaaggggctcctggatcgccccgggcagtttcaccctggcctaggtggccttgtccccctggcctcccaaggacccaccctgcacctagcctcaccgtattccttgccccggattggcctgtctttccacagcgcgctcccccaccgggtgctgggggcctggtactgggcagggacgatggggtcatgccaggcggtctcccgcaggtgctgggtgtaggctgcggtggggcgggggctggcggtcattcctgtccccctctggcaggcccgctgcccagggcgggggggggggcactcacccgatggcatgctgcactcacggtgttggtagcagctgtgccagcggttgtaggcctcgcggaaggggctggccggggcccgtggcaggttgtaccaggcttcccaggcgtccgagttggtcaggcctgtgtaccacagctggccggctgcgtcccgtcccatgggcgtgtacttccagcgtgtggcctgcctgatggctggtggccagcgggaaccctccagggacaggtagtcatcgctgagggtgggcagggggcagagactgagcccatgtctacagcgagtgctttgacccctttgcgatgtctgccagggtggatgatgtagaggcctggcccacggcgtggggtctccctccctcgccacttggagtctg

SEQ ID NO: 11268 - DNA, 9156 bp, Homo sapiens
caacgtggagggggctttaggagaggattcatcccttacgtgtttggccccaaatgagactttagtatttgtacctggtatcaaggaaatctgttgacactcagttttattcctgagcacttttatttctgggttgtcaatcatgaatgacacctattaacggtggttccttggagattgcggggtggctcttaaggggtgttaggctggcaagattcggtgggcttggggcaccccagcaccaaccccctcctggccttgggcatgctggttcgtttggactgaacgctccgtgccatgctgtgttcctggaaatcacgagctggtctgagcctccttgtcttgcccaggtgaacttcacggtagaccagatccgcgccatcatggacaagaaggccaacatccgcaacatgtctgtcatcgcccacgtggaccatggcaagtccacgctgacagactccctggtgtgcaaggcgggcatcatcgcctcggcccgggccggggagacacgcttcactgatacccggaaggacgagcaggagcgttgcatcaccatcaagtcaacgtgagctccctgtgccctctgtacccaggcagggaggtgctggcctggcagctggaggccactgggccagggtgcgcggggagagacttggcaacgtctctttcccctggtttcttaattcatgggagaatgagtgaggttcagtccagcgagacaggatggagaggcacagggattcggggtactgcgagctggaaggttttcttgaggagggggcttaactccgtggttctccctccctgggggacttgcccccactcctacaatatctggagaggtttggctgtcacacctgggaggggagggtgttctagtgcttgggacgctgggaagctcctgtgttgcactggatgatgttcattccatgtcagtttctggccccgatatgagtagggggagcgcagagtacggtgaccccaactgctttttgtcctgggttggtacattggtgagggactctggctaaggctcttcatttcccctggagcaggggcagaagtgaggaggggagggtcggagtctctggaggcttttgccgtcctgctgggtcttttagttgctactttgagtcaggtgtgatgaatcttgggaccaagtcggtggggcaggatgtctggtcaggagggctctgaggatctggctatggggctggtaccaggagttccctgtcatgggggtggcatgtctcggacagaggcaaaggacaagggtgggttggctcttgtgggagcctctccagggatgagtcatggagggaggagcagcctggcttctgacagcatcccagactccctgggccaggtgtgtggctcctgtccccctgacgagtccctccctccatcagtgccatctccctcttctacgagctctcggagaatgacttgaacttcatcaagcagagcaaggacggtgccggcttcctcatcaacctcattgactcccccgggcatgtcgacttctcctcggaggtgactgctgccctccgagtcaccgatggcgcattggtggtggtggactgcgtgtcaggtaagcagtgggtccccctgaggcacggcctggaaccgggggccatccttgcttgaggatgacagcgccgccctgtcccccgtgtccccaggcgtgtgcgtgcagacggagacagtgctgcggcaggccattgccgagcgcatcaagcctgtgctgatgatgaacaagatggaccgcgccctgctggagctgcagctggagcccgaggagctctaccagactttccagcgcatcgtggagaacgtgaacgtcatcatctccacctacggcgagggcgagagcggccccatgggcaacatcatggtacggccctccctagctgggtggtgggcttgccgcagcgggatctgcaggagccggtggggagtggagttgagctgagggggactggaagtgtgtttttgccaggaatgttgggtgacagagaagggggctggaatgttttcatccgacttgacccagcccttgatctttgggcagctggaagagacgagctcagggaacgctgccctgggtggtggaggggctggcccccctattcgtgatgactgatcatttcttcactttgaccagatgtctactgaagaaagcctgcgtctgaggcccatgcccaaggcgcccagcccgtagcttcaggctctgcgcaggggccctcacggctgcttctcgtttctcacacttccagatcgatcctgtcctcggtaccgtgggctttgggtctggcctccacgggtgggccttcaccctgaagcagtttgccgagatgtatgtggccaagttcgccgccaagggggagggccagttggggcctgccgagcgggccaagaaagtagaggacatgatgaagaagctgtggggtgacaggtgagccccgcgggatatggtgggggattcctgacacctgggggtagtggcagcgacgtaggggcgtggtgtgctattcacagcgtggctcaagcccaccaggtcttgcccaagcatgtccccttggcgaccaccctccccaagtcatcccctggagaccctaacttgatttggcttggcctctccttgccaggtactttgacccagccaacggcaagttcagcaagtcagccaccagccccgaagggaagaagctgccacgcaccttctgccagctgatcctggaccccatcttcaaggtgagtgagggctgcgccaggcaccccgccgatgcgactattggccctcggccctgtgggctccggccggtagcctgtcggctgactgggcccgtctccttgtggggcagatgcgagatgggaggaggcacagctcctaactgaggtggagtcagggctcctctcttaagatctggactgcatagccagagccttgggacctctcctgcattgagggggttgaataacttgtggctttggcggttcagtgcttgtaagtcagaacttgggtccttgtctgagtcagagtgggctttttcctctgctccaccacgaggtttcctccagctcccgatccgctcagctggctgggcccgtggtaggcaggccaggcctgctcctgctcccgtgctgcgtccccctgcgctgacctgagtcttccaagcaggaagcagtgccaggcttcctcctgctgttcccaaatgggctttcttgtttcttggtggggaatgtaggtgtttgatgcgatcatgaatttcaagaaagaggagacagcaaaactgatagagaaactggacatcaaactggacagcgaggacaaggacaaagaaggcaaacccctgctgaaggtgcggcctgggcccagccctcggggtggagggaacacaggctgctgtttccggatgctctgacagcccaggcctgggggctgaagtcctcagctgggcagggacagctgctgcccctttcgctttagactctgggtgctgctggagacacatcccagcagccagccccatccgggacaggtgtgggtgagggccttggcaggagtgtgcatggcctttgccgccttccagaagggactgtgctttggagaacgttagtcctgactttggcttccttggcttcaagagaggaagcgtgtacggggtggggccatcctgggctccccaggtgtctcatgcaccgctctctgcccccgcaggctgtgatgcgccgctggctgcctgccggagacgccttgttgcagatgatcaccatccacctgccctcccctgtgacggcccagaagtaccgctgcgagctcctgtacgaggggcccccggacgacgaggctgccatgggtacgtggtcccggtggccgggccctgagatgcagccggatgacttcctgttgcccaaggttgtgggttgcagggttccagaaggctgagctgcactggaataaagcttgcgggttttctctgtccctcaggcattaaaagctgtgaccccaaaggccctcttatgatgtatatttccaaaatggtgccaacctccgacaaaggtcggttctacgcctttggacgagtcttctcggggctggtctccactggcctgaaggtcaggatcatggggcccaactatacccctgggaagaaggaggacctctacctgaagccaatccagaggtgagcagctgggtgatgtgcaggccccttggcactgttgcgggccctgccctgctccaagtcttgggctcctcagtcgggagctagaagtaaggagcatagaaggaatatagggtgatacttgtgccagccacaacttttgttcttagcccagtgagggcatttctggagaagctccaagccccagggcacagcacacccctgctcatctgtgtccctgggcacaggtgggtggcggccgtcgacccatacccagggaggagggcagtgattctgaagaggatgtttcctgacagccccgacgcagcagtcagggccttgtggaagccaccagtctgccctgggacctggcaggagggccaccaactccgggagggacctgccctggccctccagggtccagcacaaccatccctgcggcctgctgccgccttctgcttcttccagaacaatcttgatgatgggccgctacgtggagcccatcgaggatgtgccttgtgggaacattgtgggcctcgtgggcgtggaccagttcctggtgaagacgggcaccatcaccaccttcgagcacgcgcacaacatgcgggtgatgaagttcagcgtcagccctgttgtcagagtggccgtggaggccaagaacccggctgacctgcccaagctggtggaggggctgaagcggctggccaagtccgaccccatggtgcaggtgggcacggagtgcacctgctgggagcagacaccctgaggggggacggcttgtgtcctgagttgtggctgtgtgggttgctgtggttggtggattggggtgactggtcatgaaaggaggggttcttggctgtggctgtaaatggagactcctgcccaggcagccaccaccctctcctaggctgctctgcgcgtgttcactgtagcttgtgggacttaacatttcttcaggagtttgtgctggtcccagtttcccagcaccttccctgaaatcttgttctggcggggtccctagctaaagggaagctgggagcctggtcccgcctgttccgagccgcctacccctttggtgctgacccgcatccctttcagtgcatcatcgaggagtcgggagagcatatcatcgcgggcgccggcgagctgcacctggagatctgcctgaaggacctggaggaggaccacgcctgcatccccatcaaggtgaggcgccagtgaccagccttccccacgccccaccccggacacctgccctctgctttaaagctgagctgagctaggctctgcagacgcctagacttgatctcggtcttggtctcagcttcttaagttcctcaagtttcttctttgcagtcttccacaggcatgtggggctgtttttgttgttgttgttgttttttttgagatagtctcgctgtgtcatccaggctggagtgcagtggcgtgatcttggctcgctagaacctccacctcccgggttcaagcgattctcttgcctcactcagcttcctgagtaactgggactacaggcgcgtgctaccacgcccggctaatttttttttgtatttttagtagaggcggggtttcactgtgttagtaagtcaagatggtctcgatctcctgacctcgtgatccccctgcctcggcctcccaaagtgctgggattacaggtgtgagccaccatgcctggcccagggctattttttttttttttttttttttttttttgagacaagagtcttgctctgttgcttaggctggagtgcaatggcgtgatcttggctcactgcaagctctgcttcccaggttcacgccattctcctgcctcagcctcctgtagctgggacttcaggcgcctgccatcatgcccggctaattttttgcatttttagtagagacggggtttcaccgtgttagccaggatggtctggatctcctgacctcgtgatccacccgcctcggcctcccaaagtgctgggattacaggcgtgagccaccacgcccggcctccggggcagtttttgagttacatcctgctgtcttctgtccacaaacaacacaaatgctctggaggggttgggacaggcctgctccagacctcgtttcttccctgttaatgcttaaaattccacaagcccgtggtttctgcgccggagagctcagtggagcccctgctccttgtccttgtctggagtgagatgcgcttggcactgcaacactgactccgcttcgttctgattgacgtggctctaccaggctgtatgaggtccgccttgctaggaaaagcttttaaggatgcgtctgtgtgtaaggtcacctctttctccaggcaagagtgggacttaacctctttttgcagaaatctgacccggtcgtctcgtaccgcgagacggtcagtgaagagtcgaacgtgctctgcctctccaagtcccccaacaagcacaaccggctgtacatgaaggcgcggcccttccccgacggcctggccgaggacatcgataaaggcgaggtgtccgcccgtcaggagctcaagcagcgggcgcgctacctggccgagaagtacgagtgggacgtggctgaggcccgcaagatctggtgctttgggcccgacggcaccggccccaacatcctcaccgacatcaccaagggtgtgcagtacctcaacgagatcaaggacagtgtggtggccggcttccagtgggccaccaaggaggtgaggcacggctcagcatgtgcagaccacacccgtttccaggctctagagggacctcatggtcctgcctcccgagacagagaccctaatggggccaaggcgggcaaggccccaggtccccctggtggagacctgcaggacttggcaggtggagggcaagcagccgaggtgtgtccggcccttgacggtggctctccccctcccccagggcgcactgtgtgaggagaacatgcggggtgtgcgcttcgacgtccacgacgtcaccctgcacgccgacgccatccaccgcggagggggccagatcatccccacagcacggcgctgcctctatgccagtgtgctgaccgcccagccacgcctcatggagcccatctaccttgtggagatccaggtgaggtctacccgcccaccgctgaccctgccaccgtcctgcccagcggccactgacaggttttctttcccttctggcagtgtccagagcaggtggtcggtggcatctacggggttttgaacaggaagcggggccacgtgttcgaggagtcccaggtggccggcacccccatgtttgtggtcaaggcctatctgcccgtcaacgagtcctttggtgagtgcctgcccggtgtggcctgcagagcctggcaggctggtttgggggacagaagcccagttaagcttagcaaggtgttaaaggaggcgtcctgatgggagcaggtgatggatggagcaggtggtccagtttctgacagcttgtggaccccctaaatcactgaattcccaggggaggggctctcctatccccagtgtgagaagggctctgggcctggagctctgaaggcctacgccctgggccggtagagcagccgagctgtagcacagggttgtcccaaacgagcagcggcatgaggcccatgagtggcctgctaggcccttcgtgaagtgctgggcaccaggccgagtgtctggtctgcagggtgactcaggctgaggaactagcctgagctcctgacaggactttccttctgccctgccaccttctcgatggcccagtgagcctctcgcttccctctgcaggcttcaccgctgacctgaggtccaacacgggcggccaggcgttcccccagtgtgtgtttgaccactggcagatcctgcccggagaccccttcgacaacagcagccgccccagccaggtggtggcggagacccgcaagcgcaagggcctgaaagaaggcatccctgccctggacaacttcctggacaaattgtaggcggcccttcctgcagcgcctgccgccccggggactcgcagcacccacagcaccacgtcctcgaattctcagacgacacctggagactgtcccgacacagcgacgctcccctgagaggtttctggggcccgctgcgtgccatcactcaaccataacacttgatgccgtttctttcaatatttatttccagagtccggaggcagcagacacgccctcttagtagggacttaatgggccggtcggggagggggaggcgggatgggacacccaacactttttccatttcttcagagggaaactcagatgtccaaactaattttaacaaacgcattaagaggtttatttgggtacatggcccgcagtggcttttgccccagaaaggggaaaggaacacgcgggtagatgatttctagcaggcaggaagtcctgtgcggtgtcaccatgagcacctccagctgtactagtgccattggaataataaatttgataaggtggtgactctgttctgcatttttcacggtgtcttcgcaggggagcggggctgcccagtactgggctccctggagcctagaaggggacccgggccctagttaggtgcagcctggggctgcctcagtgttaggtggaacgttctggaatggtgggaatgccctacccctgtgtcattcagagaagcagctgccagctgcgcgggtctgctgagcatttgaagtaggatcagtgcggcaaggaattacgagatgtcactttgaacgcatttggatggccctgtggagcgaggggctctggattgaacttcgcaggtttcagcaactttccgaattgctgacgagctcacaagttctatctgccatcaggattttctgtggtcaccccagtcctgactagtttattagaaacccattttttttttttttttttttgagatggagtctcaccgtttgctaggctggagtggaatggcaccatctctgctcactgcaacctccacctcccgggttcaagcaat

SEQ ID NO: 11269 - DNA, 9156 bp, Homo sapiens; identical to SEQ ID NO: 11268

SEQ ID NO: 11270 - DNA, 1254 bp, Homo sapiens
tttggtccactgctatatctacaaaacccctaacaatgcctggtgtatagatgctcagtatgcatttgtgggatcagtgattccgatgcctgcttcttataaagtttttatttagaaataattacaggtaaggagttgcaaaaacagtatagtggtcgcgagtgtcctttttccctcggcttctcccaggggtatcgtcttacgtaacaatgtccaaacagggaaattgacttgggtataatccacagactctattcaccttgtaaattggttttaatagaagtactggacaacttgtaagctaatatcgttgctatggttctcgttctcagctaaaacggcgctctttactttgtgcacctgaacactgcacaccgagggcgaccaccgcccccgagatgcccagcttctattctagagcgccgcgccggcgccgaatgggttaacgggcggggggacacgcctccgtgcgcttgcgcggcgtcccttcgccccgccttcgcagcgcagtcacatgacccgcccaaccggcgtccgcctataaaaagctgagtgttgacgtcagcgttctcttccgccgtcgtcgccgccatcctcggcgcgactcgcttctttcggttctacctgggagaatccaccgccatccgccaccatggtgagtaaccctgcctcgctggtgccccggagcggcggcggggcctccgcggggcctacgctgcctagcctgggacgctggggccccccgtgccaggaggagacgtagcggcggcggggccggaggacccggggctggggaagcggccgccgccatgtctgtgcgccgcgctgttcaccgagccctttctccgtttccgagggcgccataaccttgcccagacctggttggagctgggttgttagcggggatgggggtggggaatgatgatgtggcaggcgtagtaatggcgggcaccgcggtggaagcggggagacagggaggcgccttatgtaacccgcgggccgcgagtttgagatcgattttctgccgggggactaggggcggcagggaatggcagaacgagcaaagcgacacctgaaaggctccccttttccttccaaataccttctcctgatgctgttaatcgtcgaccttaggcacttgtccttcctatgactcccagatgtacaaagactcttattgagacacgaggtgtaggcttgtggcagttagggccgttccggctccccgttatttcctggggtgggtggccttgt

SEQ ID NO: 11271 - DNA, 1220 bp, Homo sapiens
tttttgtattttttagtagagacggggtttcactgtgttagccaggatggtctccatcccctgacctcatgatctgcctgtctcggcctcccaaagtgctgggattacaggcgtgagccaccgcgccaggccgaggccaggggtttgagaccagcctggccaacatggtgatagcctgtctctgtattaaagacacacaaaaaagaaaagaggctggaggcagggcatgtatcgctttggtgcacagctggggaagctggggctggaaaggcgcgacatctgaccgccttcacgtgcaggtgggaatgtgaggctgggggagcagggtggaacgctgcttctcaagggcctcgggcccttgtcagtgggcacaggaacccccgcacccccactcacgagcgccctctccttccccactgctgcaggtctcggcgcggaagatggccggcggcgtggacggccccatcgggatcccgttccccgaccacagcagcgacatcctgagtgggctgaacgagcagcggacgcagggcctgctgtgcgacgtggtgatcctggtggagggccgcgagttccccacgcaccgctcggtgctggccgcctgcagccagtacttcaagaagctgttcacgtcgggcgccgtggtggaccagcagaacgtgtacgagatcgacttcgtcagcgccgaggcgctcaccgcgctcatggacttcgcctacacggccacgctcaccgtcagcacagccaacgtgggtgacatcctcagcgccgcccgcctgctggagatccccgccgtgagccacgtgtgcgccgacctcctggaccggcagatcctggcggccgacgcgggcgccgacgccgggcagctggaccttgtagatcaaattgatcagcgcaacctcctccgcgccaaggagtacctcgagttcttccagagcaaccccatgaacagcctgccccccgcggccgccgccgccgctgccagcttcccgtggtccgcctttggggcgtccgatgatgacctggatgccaccaaggaggccgtggccgccgctgtggccgccgtggccgcgggcgactgcaacggcttagacttctatgggccgggccccccggccgagcggcccccgacgggggacggggacgagggcgacagcaacccgggtctgtggccagagcgggatgaggacgcccccaccgggggtctctttccgccgccg

SEQ ID NO: 11272 - DNA, 1105 bp, Homo sapiens
ggccgtgggctgctgggtagaaatgcctggtgcttgccaggagtggtggctcacgcctgtaatcccagcactttgggaggctgaggcaggcggatcacgaggtcaggagatcaagaccatcctgaccaacatggtgaaaccccatctctactaaagatacaaaaattagccaggtgtggtggcgcacgcctgtaatcccagctactcaggaggctgaggcaggagaatcgcttgaagctgggaggcggaggttgcagtgagccgagatcgcgccactgcactctagcctgggtgacagggcgagactctgtctcaaaaaaaaaaaaagaaatgcctgctgcacagagctgtgctcccgggaggggctgcgggaggggcgcattgctggggcgaggggttcagagccggggctagggccgctgcacttgggtgagccaggcctcttctcttggtggccagattcgccgttacaaagcgaacaaggacgtaatggagaaggcagcagaagtctatacccggctcaagtcgcgggtcctcggcccaaagatcgaggcggtgcagaaagtgaacaaggctgggatggagaaggagaaggccgaggagaagctggccggggaggagctggccggggaggagctggccggggaggaggccccccaggagaaggcggaggacaagcccagcaccggtgaggggcgggtggggtgggccctgtacctcagtctcctcagctgaagaaacagatgctttgcagaacattccagaaggggagtacagctctactctctgccccaaacctgccagagtgtcatgtcctgttggggtctccgtgcagacccggctttaatccctggggcagccagtgaggggcattcaggtcctaccgtgtgccaggcagccagcatgcaggtaacttggggctcacgccagaggggtgacggggacagtgcatgacagcacacgcctccaccgtctcccaccctgggacgcccagagaggggggtggctctgtgcagcgggggcaaagagtgggggcattgttcagagaggcagtcggtggaggctcgggggcggaggcctcaggtgcccttgcttgcctggtggg

SEQ ID NO: 11273 - DNA, 1215 bp, Homo sapiens
tccatgctaggagcttctcccagtggcgacaaccacaaatgtcccagacgtggcccagcgtcccccggggtctgaatcatgtttggttgagaagcagtgacagaggtgacacatgttcactgtcacaaaagctgccgtaagcacgaagtattaggaaaaactcccaagacccccatgtgtgcgtggtgccccgtgatgatgttttgtgcttctgggtgcttcctgcatgcagtgccaaaagccctcgctagaggggcctgagaccctgagggaagggactggggtgccgcttgtgagcgggacagccccctggcatggcccaggtatcatggctctttactctgatgcagattgccccccccccacaagggctgggacacagtgtttggttcatcactggtgcccacagatgcccacttggcatttggtggctaaacagcgtctgcctctggtgtccctgcagatggaggacggccataccctcttcgactacgaggtccgcctgaatgacaccatccagctcctggtccgccagagcctcgtgctcccccacagcaccaaggagcgggactccgagctctccgacaccgactccggctgctgcctgggccagagtgagtcagacaagtcctccacccacggtgaggcggccgccgagactgacagcaggccagccgatgaggacatgtgggatgagacggaattggggctgtacaaggtgagcctcccctccgcagctgctctggggttggacgttctccctgccattctggtctttgcatacccagggctcacaggaggggcttcccacgcgcctctctagctctggctgggcagaaatggccaaggggtggtttcctgcacgttccttgaggggaacatggtaccctgggattcctttgtggacctctagagcagagtcctgttcggggcctgcaggtgtcttctccgtgaagcttgcagtggctgtgacgtttctgaacttgctgctaccatgtaagatcaggaaatgtcacagaaagatctgggtttccagcttttttatttttttattttttttttggcagggtctcactttgttgcccagcctggggtgcagccgtgtgatcacagctcactgtagcctcgaactcctgggctcaagtgatcctcccacctcagcctcctgagtagctgatgttataggcatgtgccaccacgcccagctaattttat

SEQ ID NO: 11274 - DNA, 1147 bp, Homo sapiens
taatttttgtattttcagtggaggcgggggttcaccatgttggccaggctggtctcgaactcctgacctcggcctcccagtgttggtattacaggcgtgagccactgcgccctgttccgtttcatgttgcttctgtgagtgcagctttgattgctagggggcgtagctgagctgttgccccaggcatcccgagaacccgtggtgttcaagtgctgtgagtagatttaggggcctcggcaggccagaatgttccagcgtcctcgttccttgcagggatgattctctgaacgactgtcggatcatcttcgtggacgaagtcttcaagattgagcggccgggtgaagggagccccatggttgacaaccccatgagacgtgagttctgagccagcctttccccatcttccgcggtgggcacggggcgggggctcttgtcccgtctctggcttggccgggccccgccggagctgaccctgccgccccgtgcccagggaagagcgggccgtcctgcaagcactgcaaggacgacgtgaacagactctgccgggtctgcgcctgccacctgtgcgggggccggcaggaccccgacaagcagctcatgtgcgatgagtgcgacatggccttccacatctactgcctggacccgcccctcagcagtgttcccagcgaggacgagtggtgagtgcggccctgcccgccgcggggagaccagagcgccccctacaaatccccagaggggcactgaggagatacaggagaggggcaggcgcgggggctcacgcctgcaatcccagtgctttgggaggccgaggcgggaggatcacttgagctcaggagttcaagagcagcctgggcaacacaagaccagcctgggggacgtagagactctgtttctttttttgtttgtttttttgagacggagtcttttttcttttctttttcttttcttttttttttgcggcggagtctcgctgtctcccaggctggagtgcagtggcgcgatctcagctcactgcaagctccgcctctcgggttcacgccattctcctgcctcagcctcccgagtagctgggactacaggcgcccgcctccacgcctggctaattttttgtatttttagtagagatggggtttcaccttgttagcca

SEQ ID NO: 11275 - DNA, 1560 bp, Homo sapiens
ccacagtcctgggagaggtggccaggagcaaacctgatggtgtggatggcacttctcacgcgcctgctgtgtcttacaggactgcctggacagatcctttcgggcacaggtgttcagctgccctgcctgccgctacgacctgggccgcagctatgccatgcaggtgaaccagcctctgcagaccgtcctcaaccagctcttccccggctacggcaatggccggtgatctccaagcacttctcgacaggcgttttgctgaaaacgtgtcggagggctcgttcatcggcactgattttgttcttagtgggcttaacttaaacaggtagtgtttcctccgttccctaaaaaggtttgtcttcctttttttttttatttttatttttcaaatctatacattttcaggaatttatgtattctggctaaaagttggacttctcagtattgtgtttagttctttgaaaacataaaagcctgcaatttctcgacaaaacaacacaagattttttaaagatggaatcagaaactacgtggtgtggaggctgttgatgtttctggtgtcaagttctcagaagttgctgccaccaactctttaagaaggcgacaggatcagtccttctctcgggttctggcccccaaggtcagagcaagcatcttcctgacagcattttgtcatctaaagtccagtgacatggttccccgtggtggcccgtggcagcccgtggcatggcgtggctcagctgtctgttgaagttgttgcaaggaaaagaggaaacatctcgggcctagttcaaacctttgcctcaaagccatcccccaccagactgcttagcgtctgagatccgcgtgaaaagtcctctgcccacgagagcagggagttggggccacgcagaaatggcctcaaggggactctgctccacgtggggccaggcgtgtgactgacgctgtccgacgaaggcggccacggacggacgccagcacacgaagtcacgtgcaagtgcctttgattcgttccttctttctaaagacgacagtctttgttgttagcactgaattattgaaaatgtcaaccagattctagaaactgcggtcatccagttcttcctgacaccggatgggtgcttgggaaccgtttgagccttatagatcatttacattcaatttttttaactcagcaagtgagaacttacaagagggtttttttaaaatttttttttctcttaatgaacacattttctaaatgaattttttttgtagttactgtatatgtaccaagaaagatataacgttagggtttggttgtttttgtttttgtattttttttcttttgaaagggtttgttaatttttctaattttaccaaagtttgcagcctatacctcaataaaacagggatattttaaatcacatacctgcagacaaactggagcaatgttatttttaaagggtttttttcacctccttattcttagattattaatgtattagggaagaatgagacaattttgtgtaggctttttctaaagtccagtactttgtccagattttagattctcagaataaa

SEQ ID NO: 11276 - DNA, 1281 bp, Homo sapiens
gggacccggggggctcctccccgctctgcagcctggggacactgggctgggaccagaatccagctttcttttaaaactctcagtgtaactgtatcccgtgacatttcattttttttaaatagtgtatttttttttccatttttttttttaagagaaacaaacaaaagactcgccagtcaatgactttcaaagagaactaactttggcttattcatattctgttcaaagacagtctattttttcactgtagaaagcgtccttgtgtgatagttacgttcgcaaacgcgcacgccaggcccatggctgtaccttggcttttttttttttttttttttttttaatttttcctaccatcagaaagtgtgctttgctcacagaagaatgggatgtccttttttctttcttggctttttttttccccctttttgtttcatttttataaattaaattttcagacatatcaaatacagttctgagggtaaggtcatgggggagctcggacccagtggcgttgggtgcggttgagggggacgctgctgtaagaggagagagatgacagtggtcctcctctgagagcctgagctgtctccccgtctcccgcccccaaggagacagagaggatcctacttcttcggggacagtggctgtatggctgtgctgccccacatcagggaccctttccccctgggactgtggggcagtttgggagcaaaaccagaaggacaggcccccctctacccgcctaccctgagcaagcgagttgttcctctttgtacaagggcaggtctgcggttactttcaacactgtttattccagcggaagcagccgggtggttttcccacccccgtgtatgtagatatatcgactttgtattaaaggaagatcgtctgaccccggcccattgtggagtctttgttgcgcccctgcctgtccagtttcatccctggggtggaggtcggtggggtcctggagagctgatctcgtttccttgtgtgaacagtcagaggaggagttggcccagagaggtggtggtgcttgtccaagaccacacaccgctgaggcgggtggatcacaaggtcaggagtttgagaccagcctggccaacatggtgaaacccagcctggccaacatggtgaaactcaactctactaaaaatacaaaaattagccaggcgcagtggcgggcgcctgtaatcccagttactcaggaggctgaggcaggagaatcgcttgaacccaggagttagaggttgcagtgagctgagatcatgccattgcact

SEQ ID NO: 11277 - DNA, 1189 bp, Homo sapiens
gtgattccatctgttctatcagtggttctcaattggggtaattctgacaccctgaggatatttcttattttcatgagtactactggtactgcctgggtggggaccaggcatgctgctcagcatcctacagtacacagaacagcttgtctcagagaacaatccagcgccaaatgtcaatagcactgagattgagaaatcctggcaaaggaggggagggtgttcctggcagagggtgccacatgtgcaaaggcccggggctgagagcttggcccacgcaagcaactgaaagtagggcagtggcccttgaaggagatggagggaagaaatcaggagaggttagtggatagtcccgcagctttgtcaagggatttgaatttgtcatgagactggtggtttccccacatgcaaaatgggatcaccaggaggggaagtggtgcacccagcagccattcctggcaggcagtggggtggtaggtgtagctgtcactggcttggtcctgaccctcccgggcagcatcaggtgagtaccacgccgggtctccctgccggccctgggctcatacccccaacgcctgcaggcagcagaaggcctacatcgcgacacaggggccgctggcggagaccacggaagacttctggcgcatgctgtgggagaacaattcgacgatcgtggtgatgctgaccaagctgcgggagatgggccgggtgagctaggggccacagcagggaagggcgagggccagactgtggctcagacagcgctgaccacggccgccatctcctccacaggagaagtgtcaccagtactggccggccgagcgctctgcccgctaccagtactttgtggtagatccgatggcagaatacaacatgcctcagtatatcctgcgagagttcaaggtcacagatgcccgggtgagtgaagagacagactggcgggaggggctggagccttagtgatctggaaagggctgccctggttggtgatggatacaaaggccaagggttaggcataagcattgggaatcaggagaagtgtcagctgaccagttggccacttgcttctactgccacataggtggaagagagggtcttatctctgtgctgaccctgcagtgtctccactcactagggaacatggccccaggggatgatattcaaggaagtgaatggggctttcctctggaag

SEQ ID NO: 11278 - DNA, 1230 bp, Homo sapiens
cacttctggtttttcggcaagattgagaggtgttatacaaaataatgaaaagcttccagggtggggtctggccacagtcggtacacaaccagtgactgtagaaagcccagcaggcagactttggaatctggtttccccaccgttgacgcggggtggcgggtggggagtgacagttctgaccacctgaggggttgtgagaattaaatgagataatgcatgcattaaatgagatgatacatgcgttaaatgagataatacatgaaacatgggctgagggtgctgcacctgcagtaggcgtgcagaaaatgaagtttattatcactaatgccctcagcacagcgtctggccatagtaggcacgcaacacatagagacttactgattcataagcctttaacacacagacagttccctttaatatgcgggaactctcagtgttattcagcaaagaccttaacatactgcctggcacacagtaggtgccccattaatacagccactgttttaaatctacatatggattggcacagtgctgggcacctagttggcactcagtaaatggaagctattagcagtttataacaagcttagcctagtgccaggcgcacagtaggtactcaaaacatgggtggcaacaattattgttctgcaaacctcttggcacaatggctgacatacagtaagtgctcaataagtggcacttgctataaagaggtggcctaagtgtgaggcacgtagtagatgctcagatgggcaccattatcagtttgaaagggtgtgggatagggctggttacacagtttttactgaaaacattcacttattatctgcaaagcccttggcacagtgtgtgcaaatagtaggtgctcaataagaactattactatttttatataaggtattgagtgcaatgcctggcacacggtgccaggtgctgttacagttatccaataaagcccttagcacgatgcttggcacacagtaggtgcttaagaaatgaaaactattggccgggcgcggcggctcatgcctgtaatcccagcactttgggaggccgaggtgggcggatcacgaggtcaggagatcgagaccatcctggccaacatggtgaaaatccgtctcccctaaaaatacaaaaaattagccgagcgtggtggcgggcgcctgtagtcccagctactcgggaggctgagacaggagaatggcgtgaacccgagcagcagagcttgca

SEQ ID NO: 11279 - DNA, 1185 bp, Homo sapiens
ttttttagattctctctttctttttttaaattgcttttgctttgttatttcatttgttcttcctggttttgttttggacgtcgataccgtttttctgtccttgaataattagctccccccacgctcatttccccattgtgttctgtttccatgacaactcagccttggcatcttacctgtgcctcgctgtgggtgccggcggctggcctggaccgcgtccgctggctggccggaccccattctccccccacacccccaccctccacccagccctaccagaaagccacccgccccccccatctcacggcacctcgcccctcacctccactctgtgtgcatggcccttctgtctccccatgccccgactcctcccctggagcagtaccctccactccctccatcctgtctccagtgcgacttctggacttttcgtggggcttctttttccgaagggctgccagcttccggaccccactcccacgcctgccgacgtccccccttctctttgcctcccgcccggattcaggaaggcaggggttgggatttccagctaggaaccgaggctggaagggagggagttggggccacctccctttatccccttgaacctcctcctcagcatcgtagaccagaccccctgagaccaccccctgaggctgcacctcccaatcccgtatgaaaatcagaggcaggtgttgatggggatcctaactgagcctccagtccgtcatctgtgcagttgaaacaagactccttcacccatccaaagctggggacgcacccatgtgtcttctttaggacctgagactgtcacccagggacaaccccttttcctgctagaaggatttattaggttcacccgagtccttcccacagcagttaaacagcccccgtgggccagcagtgctctttgcaagttcaggtgcccactggcctcctccccttccccctgtcctggaacccatctgacttccgaaaacggagcccccgaaatgcatcctgctgccttcatggtctttgagagaaggttgcatccacttccccgctaagaaacgcacagaacatgtccctgttctctcaacgttcaagttcattcccttgtttattattattaattattattattattattattattaatatactatttattattctgccagggctgtgatgtgacaatgtggc

SEQ ID NO: 11280 - DNA, 1108 bp, Homo sapiens
agccacagtggacttcgtggacacgttccccaggtggagcatcatctgtggccaagcaagcatggctgcgcagcctccagccagggccctgcccgccttacttgctctaccagctccatgctgtgtggcctcaagcaaagccctgccctctctgagtcttcttcacagtgcagtgtacacagcaccactgcacacagaaggaactttacaactctcaatacacgcccatgatcacacgtgcacattgacacattccgcatgtcttcacatgcctttgcatgcctgtcacatgggcttgcagacatttgtcaccctcacacatgcacacaacaccctgttcttatatgtacccaaatctggtccctgtctgcggcgcatttatactggacaccgacacacgtgcacattcagcctgcagcaattctcccagtcacccccaggatcatggggctgactgccattcccctacagcccagcctagcccagcctagacaggaaccttcctgggaccccagcctcactctgttcttttttcccctgcccatggcagacgattgagtttgatgagagtgcaggggcagtgctgaggatccagccgctgaggacaccgcgggatgaaaacgtgtacgagtgtgtggcccagaactcggttggggagatcacagtccatgccaagcttactgtcctccgaggtattgggctcctcagggcgggcggaggataaactgggccctgggctttggggacaagcacaaaaggaatacatgaaagttaccccaaaccctcctgctttgtgttttttgggaggaccttgatctcccttatccaaccagtaacagtctcagggcccagcgcctactggtggggatttattgtgcctttgcaagaaagaaaggaattgagagactagaatcatcctaatttataatcttcatcatgtgcttctgatgacaaaaggctgatccaactcagatgggttcaagcgagaaaggtaattgatgtgcagaattaaaattccatggagtggctggcttcaggttcagctggatccaggggctcattgaattttctcagagctcactctctgtctcttggctttgtttccttc

SEQ ID NO: 11281 - DNA, 1135 bp, Homo sapiens
ggccttgtaaactgttctaggatctattatgctttggtacgaaatccttctgatgacagttcattatggtcatctgtgtattgcagcagtacatggccagggctgctggcagggcaggaggtcagctttggggcgagagagatggcaggtgcacttgacagagcccctcggggtggaggctcacgtggtcttcctgagcggaggtggctgtgtagggctccagaagccatctgcaggcagcccataggactgactgcttaactaatggctccctctttggaaaaccgaggccgcttttcatcaggggaggtgggtgcatgggacaaaacaaaacaactgtgcagtcactggggtcaaatcagaccttgcctcctataggagagaacactcttggtgaaagtcatcctggttctgtgaagtgctaggggccagctcccacaaaggtgatagatacatttggggtgggggatccctctatctctgtctcatgtcccctcacaggcgagatgatgcctattggccggaagccaagcgggccgccctggatgagcgctaccattctgactttaaccgccaggaccgcttccacgactttgaccacagggaccgcggccgctaccccgaccactcggtggacaggtcagttgggcccctgctgggcgtgcgggttttctttttcctggctcattctgactgagaacaaggactcctgggctctctgaacccactccgttcatcagatgtatgctgagtcagacccgcaggtctcctgccttcagttagggaaattatgcttttcattgggggcctgatggtcctctctttgtgaacaagcctcttcttccccttacggtttgatttaaattgccttttcaggagagaaggttcaaggtcaatgatgggagaacgagaaggacaggtaagtctgaagctacagtggtagccacagaatttcccatagaatgggttcttttcccttcagcgtgccttcttcctgccctttctttgagcaagaggcaaaatgaggaaagagaaaagtaaagcactagaaaagtctaggtttgtggaatggaaatttgggattatttggggttagtcttggctgtcagtccaaacagttactctgaagctgttt

SEQ ID NO: 11282 - DNA, 1226 bp, Homo sapiens
cccagtggggtgcccggccaagcaagggcttagcagcagtggggtctgaacagcctccctcctctgtctcgcaggcctgaccgccgctgcctacagagtcacactcaatcctccgggcaccttccttgaaggagtggctaaggttggacaatacacgttcactgcaggtgagcacgctgggctgggcatggctgggccctctcctggcacagccccagctctcagagcacatttgacggctgcctcttctctctgactccccagcccgtgtccacagtgctggccatccggagaaagtggggtgttcctttatcaggaatacatgtagggtggggaggcccaggagaacagctccaggactggggccaggaggctgccatgcacagcgagcagccgactcgtggcatctctctccatccagacactggcagtgagcgcccaagaggctcctgctgtgcccgtctcgaggcccttgctcttcccgtctaccccgcagctgctgtcggggccgtgtttggcctcaccacctgcatcagcgcccatgtccgcgagaagcccgacgaccccctgaactacttcctcggtggctgcgccggaggcctgactctgggagcacgcagtgagtggccccctccccacccccaccctcctcccagcctggcagaatgacccctgacctctgctcatcctccaccctctctgttccatcccggacaagaagtaaagcagccttcttgaacaccagccatttcagtcatagcgacagctgctgctgctgcttaagcacctactgtggccctccctgacctgccctgtcccctccccaccctcccctcctcactctgctccagccacacgggcctcctcactgctcctcccacatgccaggtacagtcctgccccagggcctttgcatgggcagtgcactgcgtggaatgctgttcccctcactgtcctgaccaccctgtgtacaagccagcatccccgccgccctcgctctgtgccgccttccttctgtgtgccttgtcagaggacacaggtcaccaaggtcaccccctgtctctgccactggcctgtgagtcagagaggaggatggatggagtctcgccctgccatctctctccctgcacctggagccctgcaggggagctgcccccgcaaccttcactttacagaaaagggtattagggctcagggagggaattaagtggcccgaggtcacctgg

SEQ ID NO: 11283 - DNA, 1675 bp, Homo sapiens
ctcagcaccaggcccagactaggcagcccctggtctcctgcgcccacgcccagcaggagagtgggacaggcaggccagagggacccccgggccccgtctctgtcccatgcgggtgggaggaccccagaggccccagccctgtggggagcaggccccaggcccgtcggcgctgggaaagggaggcacagggcagaggctctttcgcctggcccgagctgggggcacctctgggtaacggcaggtggggaggacaggtcagcctggagcagaggccgaggtggggtccacaggctgccatgtatcctcggtgccctgcctggcgtgccggagcagttctcggaacgtgcacttccttctctccctctcgtgccctcctgatgatggacactgaccctacccctccctccgcagatgacatgggcgatgagcagcgtggcagcgaggcgggcccagacgcccgcagcctgggtgagcccctggtaaagcgggagcgcagtgaccccaaccactccctgcagggcatctagcagccccggccggcgcctcctcgaggttccaaaagatgccgcctggtcactctgggaacctggatttcaccggctccaccaaattagtgcctcttagatgatgtgatgtttactttgactcaagcgggggctcccggggtcagtgttcaagaaggaaagcagttgttgaagctacagaagcccaggccagggctcccactggctgtagctgtgctctgggtccccaggtccctgcgcagccaccagggccccaccagaccatgggttccttattctggacaaaccctcctctgctggaaccctggactttggccccagtccctttaagagctgaaagggctgtgctgagagcactggcctctgcactcaactggaaccaattttcaccatgattttaaaaattaaaaaaacctggcagagcccgactagaaagggacggcctctcccctcctacctgccaccgctggggaggcacagagctcgccagcgtccctggagtcccctcaggaatggaaagtggagtgcccttgtctggtagcaccatgtgggagggacccagctgggcgcagcgccctgtggccttttagatccagacctccctgccggatgccccgaggcgggaggccggctgtgctgcaggaacccatctccagatgccaaaggacttgaggggcagctgacaatcgctgtgtcccggcagatccgcagctcgaaaaagaacaagccacagaaacgggctcgctcgtgccaggacacagcagtgtctttcaaaaaatcaaaaccagaagttttatcagcagcaggaaggatgtgggactctgtccaagttcaccgtcaccatcaagccactggctgtggaaggagtttgtccaacagggtcagtgtcacagccacaacttcagaaagcagccatcccgcgtgtcgtccaaacagcagtgcctgcgtcccgctccacggagtcttccagaacacctccctctgaactaatcccggagcaccccacccccagcgagtcccacctggacctcttcaaagtcaaaactcttctctcgggacaaacaaatattcgggactttcgaagccctgaacttgagacaccaagtttgtctccatggaaacacgtagccgctgcagttggacagctgcgt

SEQ ID NO: 11284 - DNA, 1818 bp, Homo sapiens
gcccctcgcccagccttgggaccagcccccactgctcggcgggctgtgcggcgtcgctgccccagcctttctgagcagcggatcgacggctggggggcatctccagcctcccgaatggttcagaacacaccctccgcccaccctggacctcagaaggccctgcctgtgtgtctgcgtcgtcctccgtgtagacctagcgccggctcctccccggctcgcgctgcgctggggtctgtgctgtatagttctctctattatatatgtgtgtgcactgtctggtcaagagcagtgtccatgtgcgtttctgtggcagcagtgcacgtggggtgggtggggggtgcgtacggtggggcttgtaggttaagatgtctctgcggtggtgtggggctggaggccgagccaggcacggcagctggccctctccaggcgcatggaggaattctccctttgccgttccaaggatgccgccgcctcctaccggggctcccgggggggtcagccaacactacaaagggcagcgagtcctcagggcgcccgggagccaccagtctgctctcgggctctactcagactagcgccaacagtctccgcggacagactcgcatcagccgccctggggctcggcctcctcccataggctcctcttcctctctttcattcaagtcttcaaactttgaaaaaaatatgagcttttgccaaataagacgggatagtttatggagttttctgaggcgcattgaactctggtcagcccctcgagcgtgggctcggccatcagcaggcccggtgggttggccgggctggccctcccaggctgcctttctctctggtcgcggcctggcccgccccggcctccaccgccgcaattcatgctggtgccgcgcccgcagccccactcctggtatgcctgagattctccaggggccaagccggtcctccttcccggcccactcttccagggccaggacgctcccgcggagccagcccatcgtggctgggggtcccaggggctggaggcctgcctggttagcctctgtttcccagacattgactcgaggcgcctccagtcctctcaaccccctgactttcaagtcctttcaagtccttgtgccctgaccaagttatgaggaaaagagggctgagggcctggaggtgggctcgcaccccctcgaacccacctagatgtctcctcctccccagcctatgagttcagacttggggggctccatctgtccctccctgaggtccctcatcttgtccctgctctgattctgtcagcagatcctgaacactccttggtggggacccatgcctccaaggctgcccccaatgccagctgtcctggggaaactccccagaactctcggggaaaggcccgagaaccttcggaggaagcctccgggactcctcgccacctgctctgtttctctcccggccccactgccttcaggtatcaggaagagggcaggcccctgtgccccctctccccttcccagggcggccaacaatactccaccatggggcgcttcctttcttctctggaaactaagacattggactgaaggaactggcctgaggggggctgaccgggggcccgtgctgctgggagctctacgcacaagaggccgccggggtcacggacaggaacctcagcccagggtgctggcctttctccttcgcaggagtcccccaaaatccacacagcgactcgagcagccttccactcagccagaggagggtcgggctcccccgcctgctctcggtggtggcgtctggcccttcctgccgtttccaaggcctccggaagcaccaacccag

SEQ ID NO: 11285 - DNA, 1882 bp, Homo sapiens
gtgggtagcgccggaaaccccttcccctgcggggtgtgcccttgatgcctgcagcgggggccgtgtggccggaggtctccgggagtccccacgcaccgccagggaagcattcgctgggtccagaggttaaacgaagaggcctccctgcgccggctgcttgttcctgtgtgccgctgtcgtgatgctggggagcgctgagactcgcaggcgggacttctgaactgctggggagtcggggggcaggcagacagcgcggacggtgggcaccggcccggccgccaccacctcgctcacaatctggccacttgggaagaaaacgtctattttttccccttctctgcatcacttttttggtttttgttctttttattcttttattttttaaacccatgatcttttttcctgtgtccaagtgactgtgttgcaggcggcctggctctggcagggactggtggggacgcggggagcggcccaggcccctgccccgccgggctcagcctcccatgcgctcgcgcttgcctgtgtcccgggcttgtctgtgaagtgggcgtgaagatcgttgccaccttccaacctacctcacaggggtgttgtggggacaccatgatctctggattgttcatgtcgtcgtgctgcgccgggagccaccgccctccggagacagggcagctcccctacgaccctagcgcctccgccctccgcggcccctctcctctcttcctgctctgtccctccttctccatcagggagcagcgtgacttcagcgagtcccgcgagcacctggctagacagttaacaagcacgtccttccagcctgagccagcgcaggtttgggagggggcttcctggccccccccacggtgttccagcccctcctctcttccgccccctagtctcccacccttccctccccgtagtgaccaattcctatctcttccctctccgcaggctcaatgaatcgaatgaatgtgaacttcttcatctgtgaaaaatcttttttttttccattttgttctgtttgggggcttctgttttgtttggcgagagagcgatggctgccgtggggagtactggggagccctcgcggcaagcagggtgggggggacttgggggcatgccgggccctcactctctcgcctgttctgtgtctcacatgctttttctttcaaaattgggatccttccatgttgagccagccagagaagatagcgagatctaaatctctgccaaaaaaaaaaaaaaacttaaaaattaaaaacacaaagagcaaagcagaacttataaaattatatatatatatattaaaaagtctctattcttcaccccccagccttcctgaacctgcctctctgaggataaagcaattcattttctcccaccctcggccctcttgtttttaaaataaacttttaaaaaggaaaaaaaaaagtcactcttgctatttcttttttttagttagaggtggaacattccttggaccaggtgttgtattgcaggaccccttcccccagcagccaagccccctcttctctccctcccgccctggctcagctcccgcggccccgcccgtcccccctcccaggactggtctgttgtcttttcatctgttcaagaggagattgaaactgaaaacaaaatgagaacaacaaaaaaaattgtatggcagtttttactttttatcgctcgtttttaacttcacaaataaatgataacaaaacctccccgtctgcgggtgctgtctgtctccccccctttccttccctccctgtagttttgaagcggatgtttgttctttatagatgttgtttaaaaagcctgataatggtgattgaaatttacaaactttgtgtttttttttttttaagaaaaatataaaatagtt

SEQ ID NO: 11286 - DNA, 1237 bp, Homo sapiens
cactcagtcaaggccaagacccaaccagccgtcaagaacatgtaccgctcggtgaggctgagctggacaggccactcttgctggggtgacgagggggaggggacagaggacactttgacctcccaaggatggagtattttgaccctggcagacactttaaacacaaatgatttaatcagaactgaaccagcagttaaaccattaacaactcttcccccttttattttttatttattatactcattttttgttggaatcctacccgcccccctccgccccgcccacggcccctttaaaattgacagccaagatttgctggcaaacattctttttgtccttggatgctacaattccaggttctgccttttatctcccaagctcagaagtttcctggggccaatttttgcagctcaaaattgtccgtgcgattttgttcttcaccgctttgaaacaggaacaccttgccctgttgctttgccactccccattttctttggggatgactgcctccaggaatactcattttatattagtcaaaggggtgaaagtttgcattgacttcttaggtggtgtatggggggtggtgaacgtatttgagacatgcagatggcaaaaaaaaaagctatcttaggggacagaaggctgagctctcaaatgcccaggatcccaccacccttgggtaattctctgtccactcctttataggccaagagtggcttgaagggggtgcagagccttctaatgtataaggtaagatcaactggccgggtgcagtggctcacccctgtaatcccagcactttgggaggccgaggcaggaggattgcttgagcccaggagtttgagaccagcttgggcaatatagtggggccttgtctctacaaaaaaatagttaaaaattatctgaatatggattgcttgagtctagaaggcggaggttgcagtaagctgagatagcgccactgtacaccagcctgggtgacagagagaccctgtctcaaaaaaaagaagactgtggctgggcacggtggctcacgcctgtaaccccagcactttgggaggccgaggagggtggatcacttgaggtcaggagttctagaccagcccgaccaacatggtgaaaccccatctctactaaaaatacagaattagctgggtatggtggcgcacgcctgtaatcccagctacttgggaagctgaggcatgagaatcgcttgaacctgggagtcagaggttgc

SEQ ID NO: 11287 - DNA, 2914 bp, Homo sapiens
tgactgcttccttttcttcttctcttaagagttgtgggcttaagaatgggatagagtcataatggcaacctccaagccctctcaattcttgattaagaacacaggtagacatgaatcccaattgtctattgctatcttatttatatgattcgggaaaatacagcatgtaaaaatattgctgaggagcctcagtgattgggtacaagaagcaagagtacagaaattatttttgccaaatttattttgtaaatatgagggtctgtacctaaatttaaaaaaaaaacacgtagaactaggtattttgttctcttcttagtaaatttgtagtggttgtatactacactagctgcaattttcacatttttctaattcagaaaggtttttcttatattaggggaaaaagtatttattttaatatataaaatcactctgaaaatcactctcataaaaaatggagcgcatgtaaatttttatcaaagaaaaataaacaggtgaatgggggatagtgattttcttttttcagcacagtctacctcagtgtattgttaagatgtgattcaatcatggacatctttgagatttcagaattctacctggaaccggtctgaatcagggaacgtgtgtatcagctgattcgaatgccagggaccagtaagaattttgagggagggagttgggatggagaaggtatggcctttatgcgagcatagatccttttcttcctggctggtaatattcttctctgaatttaatcttcctttaaaaaaaaatcctccatctattgtcactatgttccccaaacataaactaagttccaggctgtcatgatgtatctgatatatggggtaacccagcaaggtgtaccttcctttggtgagagatggctgccggggcaaagacgggctttgattcagagcaagcattcccacctgttccatggaatccccctgaagtgagcacaaaggtgccctgggctccctgatggtttatgcccactcctttcaggctggtgatgcaccttacacacaaacacctaatgcaatgtctttttaaattctccaagtgggatgggagcatgtgagggaaattccaatccaaaacccattaatgtgctgaacgctttttttttttttttttttttttttgcaacaacaccttggacctctgtgttggggtttgactgacctcaagctgatattattggaccttgtgcagctttgataacccatgtgagagtctaggcaggaccagtggggcccaaatcttgctgctcttgtacttttaggcactgcccttgcagactcacctttctccacctgccctggagaaaggtagggtgtgctgggcctgccccttgcaaatgggattcaccagtttcatttatttgactctactgccacagtgaaaagagcaaacagctattgggttgcaaacctcctttgacattaggaaatgttgactttgtaacaataaaactttggtcctagaaagacacggttgtcctgggagtttgtagtgttaagttgcaacaacaacaacaaaaagcaacaaaaccagcttaggataacactttttgttgcttgttcttaaagatgtctcactatgattaaaacccttttcattaatgtagtgaaagccacacaggagttccttcttccaggaggagaataccaagcacatcactttctctctgcatcagtgatgtcaaatacgcatcagaaaatgttcaggttttaggagctgtcctaggtgctgtttcatcattggaagcagtgagaaagagaagcactgctgcttgtctggatataggctgaggatgattgagagaagctgtgggaactgacacaagggtctgcataggtcatcctgtgaccctggggactatgttaccaactgacagacagatctttcactgtatcctagcagggcaggtagtccaccaagaaatgtgcttattggattgggaggtgtttatttgtagtctgctgtaacacgtgtgaaagagcaggagcgtcatcagcatatgacttgcgctggtcatccggtaaatggatgtgctgtagtcccagtgctaatcatttctctccttcacagtgggtggaagtttagggttaaatgtcctttgaatgtcacctggtgagtccttgacaccttaggctcttcagaaacaatggttttgttgaggatggggaacagggaatgccgattttatatacatggtacacagagaggggtgtcacttcagaaaatcttccagcatgttcttcagaatattaatttatatgcgaggtgaggttgggaatgaaaagaacaggtcagcacttttttttttcctagaacatacaaaagaacatggtggactttcagggagtgcaatggaaggtgaatatttccttaagggtccccgagaaatgggagtgaggggaggggacacaatggctttttgagcttacttttaccttctgatactagtcaaggtccagaaccagccaccagccaaatttctatctgggtgcgggccactgaaaatccttgttaaaaaccagatcacaaatctggggctcttggtcccattggagaaggaaggaagagcctcaaaataagtgtgcacccatgcacatattcaggaacagcttgtttagtctttacactttgcctgaaagttgcttctcctcgtccctttgtgtgcctgggtggcctcggccctgtgcgttggcaacgcaggatcaaatgtgctgcagcttttgcagaaaacaactcagaaacacaaaaccccccaacagctcaattattattttttcaatgttttcctacaagagccaagtagcaccatgtacagaagacgcctttttttttggaatattgaaatcgttctgcatgtaaaatatgggataatgacctgtttatattaaaa

SEQ ID NO: 11288 - DNA, 1172 bp, Homo sapiens
tcccggcgtgtgctcacgtgtgtatgcacgtgtgtgtgtccattagacacggctgatgtgtgtgcaaagtatccatgcggagttgatgctttgggaattggctcatgaaggttcttctcaagggtgcgagctcatccccctctctccttccttcttattgactgggagactgtgctctcgacagattcttcttgtgtcagaagtctagcctcaggtttctaccctcccttcacattggtggccaagggaggagcatttcatttggagtgattatgaatcttttcaagaccaaaccaagctaggacattaaaaaaaaaaaaagaaaaagaaagaaaaaacaaaatggaaaaaggaaaaaaaaaaagaactgagatgacagagttttgagaatatatttgtaccatatttaatttttaaagtctctggtattagcctcataagttattgactattccccggggttggcggggagtggggacatgagttggtctgcctgttgtggggccgggaaggggagggagtcaggcacaagtggcctctttgtttggtcttaaaggcatccatttctgggaatgaagccatgttcgctgctaacacttttggatgttgtgaggccacgtggagtgtgtgagagactaggttttatggatggtctggttcaggtaccaggtctgctggaaggttcctgttcggataagctggtagctacctagctctgagcctgccttcaagaacacctgtgttcatcctctgattctctgtgtgtacctcttgtggcgtttcctctcccgggtgtgaacatcctaaccgttattgtgcaaacccaagaacgtcagatcccaaagcacaacaacctggatggactttgggaacatctaagcaatgtaagagagaggtgcactgagagtacgtcttggtcccctccaccctgagagcatctgacggtcctcagtactgaactcccggaagctgctctgagcccggtgacctcatctgggccaggtgtggtgcctgagctgaatgctcaggtgcttacagtgttgcaatccctaagagagtagagtctggaggagaaaccgtgaaaaagaccttacacaccaccaagaacttccgaatgggcgtgaatccaccgtttcttctctttgcaaaaagaaccaccacagctgctcaaa

SEQ ID NO: 11289 - DNA, 1102 bp, Homo sapiens
tgtgtgatttgtgtggtgtgtgtgcggtgtgtggtgtggtgtgtgaggtgtgcatgtagtgtgtgtgtggtgcgtgtatggtgtgtgtgtggtgcgtgtgtgtggtgtgtggtgtgtgtggtgtgtgtgtggttgtgtgtttgtggtgtgtgtatgtgtggtgtgttgtgtggtgtgtgtggtgtgtggtgtgtgtgtgtggttgtgtgtttgtggtgtgtgtatgtgtggtgtgttgtgtgatgtgtgtggtgtgtgtgtgtgggggggtgtgtggtgtgtgtgtgtgtggtgtgtgtgtgtggtgtgtgtgtgtgtggggtgtgtgtgtgtgtgtatgtgtgttcagccgcagagacttgagccccccttttctgtttctttctccagggctgaagctgccctcgaggacctggtctccaccattcgagtctgaagattctcagaagcacaaccagagtgagtatgaggattcggccggcgaatgctgctcctgtccaaagacagactctcagatcctgaaggagctggaggagtcctcgtttaggaagacgtttgaggattacctgcacaacgtggttttcgtccccaggtcaggacttggcgctgggctctcttagtgggtgccaattggcttggtgttggtggaaggtcattacttagggaccgagaggtagtgggacccagagacggcagaagggtgggtggagtctgaatggagccctttcctgggtggaggaagagatcttgcagtttcgaaatttcgaggggaattttatcaggaagagcaaataatcgcacaaaaggggaaaaatggacaaaactcagcatttgcctttcttacctctcctgagctggtctccacgtgagttccaaaacaaactccgttagacgattaacatttttttttttctctctctctcttttttttttttttttgacagagtctcactctatcgtccaggctggagtgcggtggtgcgatttcagctcaccctttccgggttcgagtgattcttgtgcctcagcctcccaagtagctgggactacaggtgcgcagcaccacgcccagctaatttttatatttttagtagagacgggg

SEQ ID NO: 11290 - DNA, 1205 bp, Homo sapiens
ctcaacctcctgaatagctgggattacaagcatctgccaccatgcccagataatttttgtatttttagtagagacggggtttcaccatgttggccaggctggtctcgaactcctgacttctggtgatccgccattctcggcctcccaaagtgctgggattacaggcgtgagccactgcacttggccaagtctcaagtgttttgaataagggatgcccaagctgtgttttttcattgagatgtcagggttgacagttcctttctctttggctgttcccgagttattttttcttgtggcattagattgttgggtgagtaacatgtgaccctatgggatgtaacttcccaggcctcatctgcacggcactcagtgtgacggtcttgtaagggtaactgccttctgctgttttgtcttgaaagcccttatcagaatgtgacggagttcgacgggcaggatgcgtgtggttccaacagttggacggtggtagacattgacccacccctgaggtccaacgaccccaaatcacagaaccacccagggtggctgatgcggggtctcaagccctggacccagtatgccatctttgtgaagaccctggtcaccttttcggatgaacgccggacctatggggccaagagtgacatcatttatgtccagacagatgccaccagtgagtgtgtcttgggaatgtgaattcgtatgtgaatcagacctcttgcttttaataggctgatgcagtgaggttgtataaaatgctccttgatatggttattggctttttttttttttttagacagggtcttactttgtcacccaggctagagtgcaatgcagtggggtgatcatggctcactgcagcctcaaactcctgggctcaagcaatccttctgcctcagcctcctaagtagaaggaactaccagagtataccaccatgtgtggcttttttttttttttttctttgagatgaagtctcactctgtcacccggactggagtgcaatggcatgatctcggctcactgcaacctccgcctcccaggttcaagtaattctcccacctcagcctcctgagtagctgggactacaggcatgcaccactatacccagctaatttttgtatttcttgtagagacagaacgttgctgtgttacccaggctggtcttgaacccctggcctcaagtgatcctcctgcctcggcctcccaa

SEQ ID NO: 11291 - DNA, 1114 bp, Homo sapiens
acatgttcttggtcttggtctggcatgcaatatactagagggtctggtccattgcaactacagctatttcctgtcacctattggccaaaacaggctactttgctcttccctgaactcagcttaggtgcctctgtgttatcagtatttcccctatttgcagaaattggtttctgcaaaacctattcctcagtccatcacagactcaccacccctcttcaagactgagctgagcctccttcctggccatgaaaacttcctcaacttcctctgttatccacattcaacaaatatgtgttgagtatgtgccaagcaagtggagaggattaggcacgtagcactgaacaagatcaactccgagcatggccacaccatcttggagttgtagaagaccagccgttgaatgactagatgtgtgtgttttttccataggaactactccttctatgccttggacaaccagaacctaaggcagctctgggactggagcaaacacaacctcaccatcactcaggggaaactcttcttccactataaccccaaactctgcttgtcagaaatccacaagatggaagaagtttcaggaaccaaggggcgccaggagagaaacgacattgccctgaagaccaatggggaccaggcatcctgtaagtcactggtccccaacctttttggcatgagggaccggtgtagtggaagatggtttttccatggactggtggtgggtggggatggtttcagcatgattcaagtgcattacatttactatgcactttattcctattatgattacattgtaatatataatgaaagaattgtacaactcaccatcatgtagaatcaatgggaaccctgagcttgtgttcctgcaactagatggtcccagctgggggtgatgggagacagtgacagatcatcaggcattagattttcataaggagtgtgcagtctaggtacctcatgtacacagttcacaatagggttcacacccctgtgagaatctaatgccgccgctaatctgacaggaggcagaactcaggtggtcatgcaagcgatggggagtgactgtaaatacagatgaagcttcacttgctcacctatcactcacctcctgctg

SEQ ID NO: 11292 - DNA, 1205 bp, Homo sapiens
caggtcaggagagcagtccgggaaggaaagtcagccagcgaggtgggaggattgacaaaacaaatacatttagctttccttgccccatttctgaccgcgggcacctttatccccgtaaattatctcctgaagatcttctatgttgacgcactggagacagttcccctttctccttctgcacctgccgcgttactcaatcccctgtaatcccattgtcccgactgcatcatttcagaggtggtgattttaaggattttaacagggcttgccaaaagaattattttcttggcgttttgaaagtaattacttaggcatgggtactttacagagaaagctactcatcccggctggctgcagagtttacagggcccgggatgaaaacacagggcccaggtttcctgtccatgaagccggctctgcccctgatccttctgatgcatccaccgtgcgtctgctcacctgtcttgctttctgttcattttctcttgtagtgtgtcccggcatggatatccggaacaacctcactaggttgcatgagctggagaattgctctgtcatcgaaggacacttgcagatactcttgatgttcaaaacgaggcccgaagatttccgagacctcagtttccccaaactcatcatgatcactgattacttgctgctcttccgggtctatgggctcgagagcctgaaggacctgttccccaacctcacggtcatccggggatcacgactgttctttaactacgcgctggtcatcttcgagatggttcacctcaaggaactcggcctctacaacctgatgaacatcacccggggttctgtccgcatcgagaagaacaatgagctctgttacttggccactatcgactggtcccgtatcctggattccgtggaggataattacatcgtgttgaacaaagatgacaacgaggagtgtggagacatctgtccgggtaccgcgaagggcaagaccaactgccccgccaccgtcatcaacgggcagtttgtcgaacgatgttggactcatagtcactgccagaaaggtacgccggggatacagggttctaagcagtgtctcgtgccttgttctagaaagcttaaaatgttttatggcttaaaaatgttaaatggtcattaggtaggggccggggaatagtgggtggtggcattcactagcccagggagtggcagacattttctgtaaa

SEQ ID NO: 11293 - DNA, 1148 bp, Homo sapiens
ggactgggtcctggctgatcgtccttgttcccagtggggtacatgtgagcccctgccagggccaagtccttctcccgaacccagggtcctgggaactgcagatcccggggggattcagcccttctcccactgtgctggcagaggcactcctgtgacgctgaatacagtgaacagggacattcccgccactcggggacagatgggcacaagggaggggaaactccatcaggaagtgctcccctgggcagaggcgcccactgggtgctgtgggctcaggagggggcggggcaggagctggtgccaaccgggaaccagagccccacagccatacagcccattggtgacaaggtcctgagaacacagtggccaggtgtccccaggctcctggcccctccgacgacctcaactctgcccagcccggtccctggccatcagcgacgctgtccgccccccgtcagatcccatgtgtgccatgtttatcatcagtgttttgtatttttgtactgagtatcggagcactttacagaagctgactgtacattcctgttctgttgtgaagagaacattcccagaccctggcaccctcctgagccggcgtgtgccggtccagccctccgagatgccacaattccttggatgggggagaagttcaaggaatttctgctcggccacgcggtgggaaccccgcgtccccgccatgtggcagaggggtctcagtcgtgctaggcatcgggcggcagcgccgacagcccttccctcgccagtgcccctcggccactcctgggttggagcccgattttatttgtaaagttgacagtcgagcaaatgttcctattttcgtgggatctgcacacgtctttgtcagttgtggtcatgatcttagtcacctgctaattatttttacaatgattacaacatttcctcactgcgggatatttctgacccgctttagaacttaagacctgattctagcaataaacgtgtccgagatgagcggtgactggcgtgcacgttcttggaggttttatttgaggattttcttctgcccaaacgttgctgcaggagtagcaggttctgttgggggctccccatggctcctgcccctcagctcgctcacctgccctccgtgtcctgcttaacgctctgaa

SEQ ID NO: 11294 - DNA, 1213 bp, Homo sapiens
ccagtcctggctcctcccaagttccctctatcagtcttggctcctttcaagctttgtcgattaagcctagctcctcccatcaggcttggctcctcccccaggttcctcccaccaggcctggctcctcccctcaagcgctattaagcctagttcctcccacgaggtctggctcctcccctcaagcgctatccattaagcctagctcctatcagtcttggctccttcccttaagctatgtccatcaaacctagctcctcctatcatcagtcttggctctgtcccttaagctctgtccatcaaacctagctcctcccaccagtccaggctcctcccctcaagctctgttcattaagcctagctcttccccccagccctggctcctcccctcaagctcttcccatcaagcctggcccctcccatcaaacccagctccccaaaaaggcgctactctggcccttgaggatttgtgtacacagcccaccctatcctaacgcctagcatctgacctcaaagtcccacccatcgtgcgtggcttttccgggaccccatttcttgttccttcccttaaggccccacccatgaaccactggccccgccccctcaagccccaccccccccgtcaagtccctcccatctgcaggttcttccttttcccaggcccttgggggccgaggtgcgcctcctgcagctctcaggtctcaccctctagcgcttgcccccacagggagcccacctagctgtcattgatgccctcatggctgcctttgccttcgagtggacaaagaccctgccaggtcccttggccctgaccagcttggagcacaagctgcttttctgggtggacacggtaggtggggttgggcctggggtgggttcggggaccagcatcgtccagtggccagaccactgaccccctccctgccctccagaccgtccggcggctgcaggagaagaccgagcaggaagcggcccagcgagcctctccagcagcccctgcagacggggcggccccggcgcagccctcggtgaggccagggcatagaaccgtcagaaggatgggggaccggagatctgggagggcagggctgtgcttcctggacactcctgaagtggggagggggctagaggtgacacactctctctttcttcccccctctctcaatctctctgtgccctgcccgtcccctgtgccggtacccgctgccctcctctc

SEQ ID NO: 11295 - DNA, 1172 bp, Homo sapiens
gccgcgaacgggactgggaaaatggcagcaatgcctcctccccagcgtcagtgcccgagtacacaggtaagcaggggctctgggtgatgtgaggagcaacaggcaccctcctccacagcccctgctcattcctgctgccccccaccccctcccactgcctcaccctctaggtccacggctgtacaaagaacccagcgccaagtccaacaagttcatcatccacaatgccctatcacactgctgcctggcgggcaaggtgaacgaaccgcagaagaatcgcattctggaggtgagcccgcccacacgtgggagttgggggctggtgggtgggtgggtggcctgacttggccagctgaccatttccagcactcctgcccaggaaattgagaaaagcaaggccaaccacttcctgatcctctttcgcgactcgagctgccagttccgggcgctctacacgctgtcgggggagacagaggagctgtcgcggctggcagggtatgggccccggaccgtcacgcccgccatggtggaaggcatctacaagtacaactcggaccgcaagcgcttcacccagatccccgccaagaccatgtccatgagcgtcgatgccttcaccatccagggacacctctggcagggcaagaaacccaccactcccaagaagggcggcggcacccccaaatagccccacccgggcggtccacgggccgggccctgtgtgctgcggccgccatcccctggaggacagtcagtcggtattcctgggtcctgtctgtccccaaccgtgtctgggtggggctggagtctccaccctctgactttgagtccagtcctgctgtgggggctgagctgggaggttcagggactcagggctcagctcagtccccttgtctgtcctcccccacttcttgaataaaataatttaaagagaagttgaaccttgtccccccctccgaggctggccggggtcccacactccctggctgtgtttttagtctcctgttctttctcaaaccaactcctgtcttcaacccccataatcccctaatgcagcttcagccagggcactcccagcccccagccagggctgtttcgaagctgcctctgaactgatctctcaggctcgaggtgtcccactggcccttcctgtggccttggccacccccgcttgc

SEQ ID NO: 11296 - DNA, 1099 bp, Homo sapiens
tggagccttggagaggtgggacctgggtgaggggtggagcctcggagaggtgggacctgggtgaggtgtggaacctcggagaggtgggacctgggtgaggggtggaacctcggagaggtgggacctgggtgaggggtggagcctcggagagctgggacctgggtgaggggtggagccttggagagctgggacctgggtgaggggtggagccttggagaggtagtctcaggatagtggtgtgacctgtgtgtaggtgggtggggcactggaaaggtgggacctgggtgaggagcagggcctgtggagagactgtccctggacaggggtgggaccttgagagacctggtgctgagatgaggtaggacccaaatgtcctcttgccgaggatcctggggatgtccttggcccgcctctcccatccccttccctgacacatagcggccggtggacggctgaccccatgcccgcaggacctggccatgggctccgacgcagagggggagaagatcaaggactccatgaagctgatcgttccggtgctgctggacgcggcggtgcccgcctacgacaagatccgggtcctgctgctctacatcctccttcggaatggtgggtgggggctgcagggagttggaacgtccccatttgccagcgtctcccacgatcctgggaactgctgaaccccacagctctccttgggtcatttgcactcaccgggctcaccaacccccacagctacccctctggacccgggaaccctcctccattggcttggggattcctccactgaggtgagggctccctgctaacgtagaaaccctcacatctgtgattcctatagatgtggggctccctcagctcatctggaggagcccctgatctaccccctccaggtttcccactcttgctcacactagcacagggtactgaggccctccccactgcaaggttctctcatcagagtcctgggagctcctcagcccaccccaaactcccctaaacctgggagctcacctggccgccgcctccaccctgcccattcccgtcccccaggtgtgagtgaggagaacctggccaagctgatccagcatgccaatgt

SEQ ID NO: 11297 - DNA, 1178 bp, Homo sapiens
cagggcagcaccatccaatggcaatgggcctggggcggcttcctggcttcctccttgtccctctaagagccccggcccctctttctgcgtgggggccagagacctgggcctcctcatccccatggaccttgaatacctggacttctggggctctgaggggctgagagcccagacactgggttccccaaagggctgggggtattgactgatggtccccaagggcctggaggcccagactactgggttgccgaggaactgtgggtttagacttctgggtacccaaggagttatggaattagattcgtgggtccccagtgagttatggatctagatttctaggtccccaatggactagaggcctagactcctgggtcccccagaggcaggaggtggagatgctggttcctgtctgccaggatcttggcccctgaataccccgtggggggcactcctgaccccggaccccatgcctggggttcctcccctaacctgcctctcggccgccaggacgccgtggaggaccggctggacaggaacctgtggcccttcgtatccgaccccgcccccacggccagctcccaggccgctgtcaggtgaggccccggggccgcccccgcccacgcctgggtctgtgttaggtgggcggcctggcggcggtgagggcctcctgcctggactttctgcccctgccctgcacagtgcccgcttcggtcactggcacaagaacaaggctggcatagaagcccgggcgggcccccggctcatcgtgtatgtcatgggcggtgtggccatgtcagagatgagggccgcctacgaggtgaccagggccaccgagggcaagtgggaggtgctcattggtaagtcaccaggactgggaccctggggtctggggcttgggttcccggggcctgggcttgtaccttctaggtgtctggactccagagtccttggagtcagggacctggtttgctgagggacagggacagccccacaccagccgggaccgggagcctgtcaaagacgaaggcagcgccccccaacatcttccccaaacctctgcccctgcacaggctcctcacacatcctcaccccgacccgcttcctggatgacctgaaggcactggacaagaagctggaggacattgccctgccctgacccctggccccgccccctaccc

SEQ ID NO: 11298 - DNA, 1266 bp, Homo sapiens
tcgggcactggggagctgggctggggctgctgctctggggtctccgggggccacagcttggggtgagttgaagacctcaggggatgtggaggggtctgcggggccctggccgcacaggatggccttcagggaaggtggtcttggggcatggtgcagagcaggtgaccggagggaatcggtgacggagcggggccaagggaggggtccggagggagtcagggatggagggcagagggagtggatgtgggggtttgaggacgtgtgacaagctccagcaggggtgggggccgggctgagggtgggggtgcgaggtggtcactcccatcgtgcccctggccgtccctccactcacccacacctggcccagtccacgttgaggtccaggactgggaaggaccgggtgagtgcaccggggacccaggccaggtgccccccggagcctgctggggtggccagagcaggagggggtgtgtttcctttttgtgggtgttgcatgcaaatcaagtggacaagaaaaaataacaaaacaaaaaacaagaaaaaaaaaacacaaaaccccgtaaaatcacaaagaaaatccaacaccaaaggcgcagaagccggctggccgtggtgggggcagcgtaggcgtagcatccctctcctctcacttagcctgttgactcttgttattatcatgatattcacaaaacgccgcatgtttaaaaagtcatagatgtcatcttctctctgcccccagggaggaaagccaccttctcttgccccttggcccctttgtcaggggccaggggtctgccgggtgggggtgccaacaggcctggccctttcctcccctgcatccagccatgggggcctctgcgattgccggaaggttgcatggctggtcccagggccagcacaggcccgaggccgggctgcctggttttatttttatttaactttattttctgttttatgagtgtgtgtccgcccacccccacccccttcagtgttaagtggggagccctgggggagtctctcctgcctcccagcctctcccaagacctcccccctcgtcaccagccatccctctggaccaggcagagggcggaccgggtgggcaggggcctgagggtggctcgggccagcccaccagccaatggacccctcctcaggccgccagtgtcgccctgcccctttttaaaacaaaatgccctcgtttgtaaacccttagacgcttgagaataaaccccttccttttcttccaccgagtctgtggtgtgtcat

SEQ ID NO: 11299 - DNA, 1212 bp, Homo sapiens
ccggtgctgggcctggtgctggagccttctcctagcagggcctaggcgcaggggtttcacctccaggggagcagccgggctgtcctctgaggcacatcccccctctcggcccctctgcagctggccatgggcaagatgatggagcaggggccggtgctgatcatcaccttccaggcacagctggtgatggtggtcaggaaccccaaaggcgaggtggtggagggtgacccggtgagtgagggagtgggatggggcaggcacatgacaccgcctgtccccaagatctgtgtgtggccacctggcagagaccccagctcagagccctgaagctctgggactgggtggggatgtggagaaacctctgggccagagtttggggttgagggaggtcggagaccagcagacctgtctgtttttaccaaggctgagtggttcctgagtctaggcaattgtgctggcctctgctcccagcccctggggaagttgccggtggctcctgccccacagagcctggcccccccccagagctgcctgggtcacctcaaccctctcaacagtgcccttcccaccccaccctgcaggacaaggtgctgcggatgctgtacgtgtgggcgctctgccgagaccaggacgagctcaacccctacgcggcctggcggctcctggacatctcggcctccagcaccgagcagattctctgagtgtggtgccggagccaggtagccccggcctgggtcatcaggcacagaggcaccgcaacaccacctgcggcaactccagacctctgggaacaagactgcgggctctgcccccagctctgccaggacggctgcaagaccagctggcccgggaggggacaacgggctgttgcgggtgcgcggcagctggagacactcccccgcagggccaacccctgccctgttgctctgccctgcaggggtcccggcgcctggtcacctggggtgcacacaggtcacacagtgccaagaggccccagggcccagggactccccccacagcagggtgggacccgggacccgcggctcagtggcccgctagccacgtcagccaagccactttaggtccattttttaattttaacagtgctcttccatcttgtgcataagcctgagatttggaaagaataaaacaccgaattgcagaagagcagctacggagtctgaagtgtcttctctggcgcgggagtggccg

SEQ ID NO: 11300 - DNA, 1910 bp, Homo sapiens
tcgatcacatgagcgggctctctggcgtcaacgtgccaggaaacgcctcctccggctggtgcattttcatctacaacctggggcaggatgccgacgaggggatcctctggcagatgtttgggccgtttggtgccgtcaccaatgtgaaagtgatccgcgacttcaacaccaacaagtgcaaagggtttggctttgtgaccatgacaaactatgaagaagccgcgatggccatagccagcctgaacggctaccgcctgggggacaaaatcttacaggtttccttcaaaaccaacaagtcccacaaataactcgctcatgcttttttttgtacggaatagataattaagagtgaaggagttgaaacttttcttgttagtgtacaactcattttgcgccaattttcacaagtgtttgtctttgtctgaatgagaagtgagaaggtttttatactctgggatgcaaccgacatgttcaaatgtttgaaatcccacaatgttagaccaatcttaagtttcgtaagttatttcctttaagatatatattaaacagaaatctaagtagaactgcattgactaaccagtccctctggatggtggtgaacctgaagcatgctttaacctctaagactgtctaacacgcgtttcattcaatgtctccacagactgggtagcaaaaaaatcaccttttagttttagtttttaatctaaagatgttagacagatgctgagtgtgcgttttctcaaccgcttcaacattgtaagcgatgtatgctttggttgacaggaagttccttttccaggcaggtcccgttgccacctcctgctcactcagtcccgggctctgccgagtggtcctgggaatggcggcgggcccgtccagcgtgggccaccactggggccgggggccacgggctgcatgctgggcgggccctccagagaaggacacaaacgtgtttcgtaagcccaggcaccaatgggaatggaccaaagagtttcagggaaactccagtatattccagagtcagatctaagctccaggcacgcctgaagatgtgttgctactctgacatcccgagtttctgtccacacattgcatgcacagcgccccacacattggatactgttgttcacgataatttctcccgttttccagagcatttaacatagcttggaggcgtaaaatggctctgtattttaataacacagaaacatttgagcattgtatttctcgcatcccttctcgtgagcgcttagacctttttctattttagtcggattttgttttggaattttgcttttgtatgaacactcagcagaaaagtacttacttcttgccagttatctattaaccaaaacctttgatttgtagttttaaagattaaccctcaaagttctcttcataactgccttgacattttgggttgttctgttctgttaattttcttttgcttttttgtgttttttgtttgtttttacttttgcatttaagaccattaaatttgattttgttttgctcgaattttgttttgttttttattttaccttttctttctttttggctagggaaggtgcaggtggcccagcattcagggaggagtcgtaagatcttaagaaaccaatccttgcctcaagcaaaagcatttctgaatctgtgacgcaagaatgtgcagttacaggctggtggcttttaaaccaggagcccggaggaagggtgaaagagaaagcctgtgaaataggcagggccagatcacccaaaactcctcaggactgggatctggcgtttataaataactagtttacagagagaatcacaaacaggataacttagtaccagcagtttttaaccttgacgtgagactaaaacgtgaccgtaggctgttttttagttattgctctcatgagatgatggct

SEQ ID NO: 11301 - DNA, 1182 bp, Homo sapiens
tatgcccctgtgcagctgaaccacatgaatggagtctgttcattcattcacccattggaggagatcctggttgcttccaggttttggcaattatgagtgaagccgctgtaaacatccatgtgcagatttttgtgtggctgtaagttaacatgcagcatagaaaagaatctctaagtgcagggccaggtgctgtggctcatgcctctaatcccagcactttgggaggccgaggcaggtggatcacctgagttcaggagtttgagaccagcctggccaacacgacgaaaccccgtctctactaaaaatacaaaaattagctgggcatggtggcagacgcctgtaatcccagctactcaggaggctgaggtaggagaatcacttgaacctgggacgcagaggttgcagtaagccgagattgtgccactgcactccagcctgggtgacagagtgagactctgtctcaaaaacaaaacaaaaaaaaaaaaaaagaaagaaagaaaatctctaagtgcaaatgcagttactagttttgccttcatatactgcaatatgaacattttgaatttacttgctctttttctcttggcagatttttgaaaaatacaatgtctaatggttatgaagaccacatggccgaagactgcaggggtgacatcgggagaacgaatttgatcgtcaactacctccctcagaacatgacccaggatgagttacgaagcctgttcagcagcattggtgaagttgaatctgcaaaacttattcgggataaagtagcaggtaaagaaatggaggcgttttagtaaaccgggtattggtggccatcctttgggcactgtctcctttgcctgtgactctgtggcattcctcagtgcaggataactacagccttgaaacgatggctgtgaagtttcatttttatttcaaactctgtccattgctcttgtataagatcggacataagttcccaaaagaggaaaaattcattgtaagacagagagcatgtacaaaataagacagtgggaggagaggaaggaaccagagacagggcattctgagagctggaaggggctggagaaccacagcctgacctggcttggcctgggcagattgattgggtcccacgtgtggaagggaccctggcgagtgtactgtccagggcaggtgcaggtaggcctgcccctg

SEQ ID NO: 11302 - DNA, 1123 bp, Homo sapiens
gatggtggtgaatgttcactcaacaggtatttggatttactatgcaccaaaagttggggttctgcagtgaatgagccccccagtcgagagtgagaagcaggaaaaagcagggctgggtgaaggtagcatctatgtgactgtggaaggagaaccaaagagaccgcagacccagggtgggaggttggattctcacctctgcacagcctgacacccatttccctgcaggagtcatggctgtgggcaccagtaatgtgctgggacaggtacccaaaccaggtgagtggcagagtgtgtgtgaatgcttggagggtgagggcgatgatcacagttgctgcagccatgggcatgggacccgaaccctgacactacactgtcattccccactgagtcccacgctctttgattcctctggggaatagagaggggccagaaaaccaagcaggagcttccaccaaaccactgcccttgattacctccagggatggggagctcactcattgggattcaagtatcctggttttgagcaaacggagtgggcccggagccatacccctgcccgattggagccttcgctccccacagctaaccttgtcctgtcctgctgcagactctgaagccatccctgtactggtggtacctcttggagctgggtttctacctctcactgctaatcaggctgccctttgatgtcaagcgcaaggtgaggccaaataagagtctggaagacccagtctctggccgggatgctggggtgctggggggtagggcagccttacaaccgcaccttgagagctccctggtgcctcctgcaggagatatagaggccatgggcccagaggccacaccaaccccctgaaaggacccacttcttggcccatagggtgggggaccttccagcatcaagcctcgtccccactatgacccaccgtctactgcaggatttcaaggagcaggtgatacaccacttcgtggcggtcatcctgatgaccttctcctacagtgccaacctgctgcgcattggctctctggtgctgctgttacacgattcctctgactacctgctggaggtgggcccgacccctgcctgacccttcccagctgctgtacccagccctcccaggtg

SEQ ID NO: 11303 - DNA, 1103 bp, Homo sapiens
gcgcatgctctatagcttcatgaagaagggccaggtatggctggacctccccgggggccccagccctaagctcctccttcctccctgctctgagctccatccctctctctgttccccagatggagaaggacattcgtagtgatgtagaagaatcagactccagtgaggaggcggcggcggcccaggaacctctgcagctaaagaacggggcagctggagggcccaggccagcccccactgatggccctcggagccgggtggccgggcgtctgaccaacaggcacacaacagccacatagccgggcggggctggctgtaaggggttgcccccccgccagtgccttggatatttctggggtgactggactggcgcccctgggccacctttctggagacagggagggccccacccggggtgggtgggaaggctgatgatctgtctccagccccttccttctgcccacccacccttcttccctctgggcaactggacagatctgggagccagcagctggatgctgtggctggccagagacacctccaggctgtggcctgggggctggggggagccccaggctgaaaagggtccaattaaaacaaatggagccaaattttctgcctgagaacttgggtccctatcaaagttccttcttcatccccagagacccccgagggagccaggcctctgcttacataccccacctacgggatactcactgccacccaaggatgcagggccccaggggccccagacagcaacagagctcagagaccacccgctccccacgctgttcccagatgagcccctgactcgccagccagtgactcaaacaagcccctccctccacccttagggtacccttgggtcagcctctcaaagacccccttgcagactagctctgaaaggtcaagtcctttgcccaagctcacaggtaggtcacagaccaggcctgtctctgcagtcctttcttaagtccggtagattgcccacctttgtggtccctggatccttccttgggacagtggagggagtgggctgaaatcccacagacttcccaagggttagcctggggaggtcactgtctcttcaagagctccaaaaa

SEQ ID NO: 11304 - DNA, 1395 bp, Homo sapiens
cccaagggctcccctgggcatctggccccctcacgccttcagtgctctctcctcaactactgaacgcctgggcttattgcaggaaccaatgagatcctcccggaaggggatgccacaaccatggggccccctgtgaccctggagagtgtcacctctctcaggaatgccacaaccatggggccccctgtgaccctggagagtgtcccctctgtcgggaatgccacatcctcctctgccggagaccagtctggaagcccaactgcctatggggttattgcagctgctggtaagagggacttaccctcccatgctgggggcttagagctccggggattcaggggaggtgggtggggagggatgagctgcagaactcccatccccatgtgtatggagcttggtgggtgtgggggctcttgccttccccctccttactcctctgtccatctgttccccacagcggtgctcagtgcaagcctggtcaccgccaccctcctccttttgtcctggctccgagcccaggagcgcctccgcccactggggttactggtggccatgaaggagtccctgctgctgtcagaacagaagacctcgctgccctgaggacaagcacttgccaccaccgtcactcagccctgggcgtagccggacaggaggagagcagtgatgcggatgggtacccgggcacaccagccctcagagacctgagctcttctggccacgtggaacctcgaacccgagctcctgcagaagtggccctggagattgagggtccctggacactccctatggagatccggggagctaggatggggaacctgccacagccagaactgaggggctggccccaggcagctcccagggggtagaacggccctgtgcttaagacactcctgctgccccgtctgagggtggcaattaaagttgcttcacatcctccgcctgcctctgggtctctgtctcccttggcctgggcagcctggggtcgctgctgcagcccctcctccatgagagcccagcccatagaaggtgggacatggacacccagccctgtgtgcagctactgtgctgcttgctttttgggagcaggggcagcagggctggggtggggagtctgcgttaacatcaggattcttggaagaagagcagagcttgggcagtgccttcccattcccaggtctggggacccccacccactgtggcttcctcctcagtgcagtggaagccaggtttcctgggatggtctcagactcaccctgttttaattattttttaattatgtttttagagactgcgttttggccgggcacagtggctcacacctgtaatcccagcactttgggaggccgagaggtgggcggatcacctgaggtcaggagttcgagaccagcctggcca

SEQ ID NO: 11305 - DNA, 1112 bp, Homo sapiens
ctggatgtggcggcaggcccctgtaatcccagctagtcaggaggctaaggcaggagaatcacttgaccctgggaggcagaggtttcagtgagtcgagattgcgccactgcactgcagcctgggcagcaaagggagaccccgtctcaaaagaaaaaataaagaaagaaacaaacaaacaaatagaataaagtgggcttgtaggaaggtagagctagtggggtctcaggggaagagcttgcagggaggcctgtccttagaaagtggagttaacagttgcagggggcggagccttaggaagggagcatttttttgggctcagctgttcttagagggtggggcttgcaggggatggggtttcagggagtacctgggccttcttgggtgggcatttgggacctgaccaaccctgtgccccagggattgagccatgtacccagaaagggcaatgcccaccgccccctggcctcccctgcccctgcaccggcgtcagtgactgctctgggggaactgacaagaaactgcgcaactgcagccgcctggcctgcctagcaggcgagctccgttgcacgctgagcgatgactgcattccactcacgtggcgctgcgacggccacccagactgtcccgactccagcgacgagctcggctgtggtatgcacctgcggggctggggtggactcgtgggtagatggggacacccactgcctgctggggcgtggccaggctgggggcgtggacacatgcctttgcccgtgcctgcatccctgtgggggaatcaagacatcattaggggccgggcccggtggctcacgcctgtaatcccagcactttgggaggctgaggtgggcggatcatctgaggtcaggatttcgagacctgcctggcaaacactgcgaaaccccgtctctactaaaagtacaaaaaaatttgctgggcatggtggcacacacctgtaatccgagctactcaggaggctgagtcaggagaaccgcttgaacctgggaggcagaggttgcagtgagctgagattgggccactgcacaccagtctgggtgacagcaaaactctgtctcaaaaaaatttaaaaaaggccgggcacggtggctaacgcc

SEQ ID NO: 11306 - DNA, 1104 bp, Homo sapiens
aatagctggaggccattgtcacctgatcgcttggcccttttgccagcatcctgttttgaggggcagcaggaatgggggtgggggccttgtgtacgctggagaccaaaagtgggaagggaggagcccagctctccacagtgggttctgggcctgggggccacagcagggggttcatacagggctcaggggagagaggaggcttgctagctcccacctggcgttggctgatcctctgaggggctgcgttggaggggttggcattctggaacaccctgctgtctgtcctgcaggtccagaaagtccctgtgggtgtgtttgtcccggggcaggtgtgggctccctcagatctttccacactgttctttggaaaccctcactgaagtctttccctcctccagctctgctgtagctgccactgagaagaaggcggtgactccagctcctcccataaagaggtgggagctgtcctcggaccagccttacctgtgacactgcaccctcacggccacccgactactttgcctccttggatttcctccagggagaatgtgacctaatttatgacaaatacgtagagctcaggtatcacttctagttttactttaaaaaataaaaaaatagagacagagtctcaccatgtttcccaggctgatcttgaactcctggcctcaagcgatcctcctgccttgacctcccaaagtgctgggattacaggcatgagccaccacacctggcctgattttatttttattttttagaccttcccactgaggcctctgcttgaccttggtcaccctgtagctcaacggggaaggcaaaggacagtgagggctgcttacagggaaggcagacctagggcagatcaggaaaggcctccctgagccagaaaccattatgctggggctgtgggatgagaatgagttagctccagaaggaaggcagctggttcctggggaggagatagaaatctggctgcaggagccagagttttcgcgcttgtcacccaggctggaacgcaacggcacgatctcaggtcactgcaacctctgcctcctgggctcaagcaattctgcctcagcctcccgagtagctgggactacgggt

SEQ ID NO: 11307 - DNA, 1202 bp, Homo sapiens
ggggctggctgtgaccagatgtgggtcctggctgggtgcgcagcccctgtccttgttacccctgatgtgatgggggcgctgtgggggtctggagagggcctctggagtcctgcagggaggggttcccctcggcaggcagggcacgtgctggctcaccccacgtccccctgtaccccctttgcagagatctaccgcatcgtgtcacagaaacagatcgcagaccgcgctgcccacgacgagtccccggggaacaacgtggtggacatcagcgtgccgcccaccacggacggacagaagcccaacaagctgcagtgctgccagaacctgtgacccctgcgcctccacccagcgtgcgtgcacgtcctccgcccgcccccgccacggtatcctctggcccctccctgctgtccctctgtggccggctcgttccagccctcccagtgagctctgcacggccgggccggggcccaggaaggacaggagccagtgctaccccgtcctgcccggggaaaagctagaagccccggtttgctgcacccatgaaactcgggtccccacagcgtcttggcggggtggggagggcggcaggatggacggggctggccagaggcgaggaggacgggcggacggcgccgccttctccccttttccttggccgactctagggagcgattgcctccctccctccgtgaccgggtggcccagccagcccgtcgtccccacccagaaccgtgctctgggccaaagcccgaagaaccaggcagcgggggccggggcaggcggaccccccgggctctcagcgcccacccgctcctccgcacacagcagctcgcacaggcctcccacctctgcctgttgattgatgcagggagaagcccgtccccccctctcccctctcccctcccctctcctgcacgcaacgcgccctctcggccctccctgtccccctcctctgtctcgtctccccatctggtctggaacctgtttgcaagtgaagcaatatctccgtgttttgtatatacaaccgctcttgtagcctttggtttttgttaatgtagagaaacacagattctttatacactttgtaagatttacgccaaaccccagctctcgatctcttcttctccctgtggcccctgcgctgttgccccgtccccgtcaccccgcccgttactgaaatgtataatctgacttcctgtaca

SEQ ID NO: 11308 - DNA, 1239 bp, Homo sapiens
ctcccttgcgggtggaggcctccgctcactgcagggctgccccacaggtctccttccgctaccactgccagctgtactccgagtggagaaagaccaaccagaaagttcgcctgaagatccgggaggcggacagccccgagggcccccagcattctccactggcagctggactcctgaagaaggtggcagaggagacaccagtatgaatgctgggctctccggaccctgcagcagagaggccagaggtagctggtgataccctgtcctgtggaaggacttccacttcaacacttccacttcaacagttcccgcacggcctgaacgcttcttaggccaagagacaccatgcagagcctagtctgtgatcctgtgtgaagatattttcagggtttttttttttttttttttgcatatggaggacaggtggacatggtcctgagctctggacggagcaggcaccctgatctcattctgaggtccacatggcaccttctgggccagcagctgtggccggtgtatcaagggcgcccttaaagctggaacattccagcaagcttcttgcgcttctctgcacccggcaggcccactttcctggcaccctcgactttatataaaagttgcactgcgtttcaaaaacccacccctgaatgaataaaaggagccctggctggacaaaatggacttgtcagttatgtttctcaaaggaggcctcccagggagggaccacatggaggtaaaaaaataacactggcggccagccaggtgtagtgactcactcctgtaatcccagcactttgggaggctgaggtgggtggatcacaaggtcaagagatcgagaccatcctggctaacatggtgaaaccctgtctctactaaaaatataaaaattacttgggcatggtggtgcgcgccggtaatcccaggtgctacacaggaagctgatgcaggagaatcgcttgcacctgggaggtggaggttgcagtgagctgagatggcgtcactgcactccaacctggcgacagagagagactccatctccaaaacaaaacaaaacaaaacaacaacaaaaaacactggttggccaggcacagtggctcatgcatggaattccagcactttgggaggctgaggtgggcggatcacaaggtcaggagttcgagaccagcctagccaatatggttaaatctcgtctctactaaaaatacaacatgagccaggcgtggtggcagatacctgtag

SEQ ID NO: 11309 - DNA, 1158 bp, Homo sapiens
acgctgaaggaaagtcaagggtaagtgtctgagagaatttcttctgtggatttactacatgaaaaatgtaactgtatggtggcgtggaatcgaatgaaatcaggaaggcagtgagtgctcatgttacagtagctatgtttgattttgccaaacatttgagtggggtgggaggggatttgcaaatgggagtcccgcttttccaaatggctggccaaagagctttttggtattctgtttggatgcccaatttggataactggggaccaatagcagcattgtctctttgttaacagaggaattggctgtgtgtgaattatgcatggaattttagcggtggtataattaatgtaaaacgtgtgttcttgtctagaaaatgttactcttggttgtttgctgaatttgaaagttgtgtgaaccaaagattccgaaaagttgcctttgtgccagtaaattgtaaaccaaatattaaaaacctgaatgttcaaaattggcctagtttaaagagaacataaactattttctgtcgtgcaatagaatggcttagaataatcaaaaggatgagcttaacttacggaagggatggatttaggaggaatatggtaaggactcgattgagtacagagggaagcagatctaaagttggtgtgatttcttggagaccctgaatttaggtctgcttattaaatgtcagcagctctagtgcaatgctggtaacgcgtaggagaaggagatattaaggagcccagcttttaacaaggaaggcgaggcgaggcacttctgtcagcttccccttagaagggttcattttaaaagactaactttgtgacataaatcatatttttagtttgtttataactgtcattgatatttactatttttttcttttctttttccccttccttgctcttctgactggtctctggcttcctccaaagggatgtgcgtaagtatcgtctagttacttattggtatttgagccttctaacttgtaggactggtttcactcgactcgtttccttttgactctatagtgttgttgaattcaagatggaagagagcatgaaaaaagctgcggaagtcctaaacaagcatagtctgagcggaagaccactgaaagtcaaagaagtaagctcttgcttaacactgcggatactgtgt

SEQ ID NO: 11310 - DNA, 1091 bp, Homo sapiens
gggagcgctgaggaaatgcagccagagtggcccccagcagagcatcctagagggacaggctgggaggggaaggtgggagtgactccgacttgtctccacataactcctgttcattaccctgggtggccccccgagtggggggtgtccatgcctccccctggagcatttctcagtgtctgctgatggagaaacctcagatgtctcaggaattgacgtccatggttcacaaagcttgtcacagacactagcacctcacagacacacatacaggggtgttctttagaagttgtgttatggaaatctcagctgtggcatagagcagagagaatgctgggaggcccccatgtgcccaccacacagctgtagctgttgtcaacatttgaggggtgtcttaatggtaaattatggtgggcctttacccctgatccatgcccatgagctgaagtggtctggcgtgttgtgcacacgcacactcaagttcttgacacccacctgtgttttgtgtccctgtttcaggtggaggtggaggaagcgtccctgggatcgagaggatgggtcctggcattgaccgcctcgggggtgccggcatggagcgcatgggcgcgggcctgggccacggcatggatcgcgtgggctccgagatcgagcgcatgggcctggtcatggaccgcatgggctccgtggagcgcatgggctccggcattgagcgcatgggcccgctgggcctcgaccacatggcctccagcattgagcgcatgggccagaccatggagcgcattggctctggcgtggagcgcatgggtgccggcatgggcttcggccttgagcgcatggccgctcccatcgaccgtgtgggccagaccattgagcgcatgggctctggcgtggagcgcatgggccctgccatcgagcgcatgggcctgagcatggagcgcatggtgcccgcaggtatgggagctggcctggagcgcatgggccccgtgatggatcgcatggccaccggcctggagcgcatgggcgccaacaatctggagcggatgggcctggagcgcatgggcgccaacagcctcgagcgcatgggcctggagcgc

SEQ ID NO: 11311 - DNA, 1366 bp, Homo sapiens
tactcctggagtagagcctttgccctctagggctctgtccacggcgttgacacatatctggatgcttaacgggtgctcaaatgaataagtgaaacctgctggctttcatttggacagtacagacgtgtccattggattgcggatggctttgtaaccaggggcggtggcatatcaaaaatgaagactttgtaaaatgtatgggaactttctgcctataaagctggctttacactgcgccttcttttttgaacttcctgaagcgtaaaggcgtgcattgaatccgccaggaaggcttttcatggggcaggggcaggctctgttagcagaagaatggcagtgtggctgagggggccgtagtcattggttctcgccattgtattctgagcctttgtgctctaggcttcagggcctctcctttttgactctgtccaccaaaatctaacaaaatcgggactgagtgtcgtctcttcttccctccctgtcctaggccacgtgctgtacgccgacatcaagatggagaatgggaagtccaaggggtgtggcgtggttaagttcgagtcgccagaggtggccgagagagcctgccggatgatgaatggcatgaagctgagtggccgagagattgacgttcgaattgatagaaacgcttaagcagttgccttttttaaacatcgatacgagacctctgaatttgtattttttcttgttaaccattttaatttgttggctggatgtataaagatgtttaaaaaattcagttgctttttggggtaatttgaattacttttttaatgactggggttccatttgactgtttgcattgagattgcaatgtgcgcaattttttttgtagttgtggcatcttgttgacatcgaatatgactttgataataaataccggttcctgaaaacggcctgcttgtgtgtgctgtgtgggcaaccacgcgaggtgtggggagctggggtcactcgagcttccagtccaagcagcagggatctcatcccctctcttgcttgtctgaggccccaggggtgggtgcctgcccacagatggggggagactcttccctggaaactgccttcctgtgggctgtaatcccccggcttacaatggagcgtttggctgtttagagccttctgaggccaggcgcggtggttcatggctgtagtcccagctactcaggaggctgaggcaggagaatcactcgaacccaggaggcggaggttgcagtgagtgagatcgcgccactgcactccagcctgggcaacagagcaagactccgtctcaaaaaaaaaaaaaaaaaagccccccgaaagccatcctgtctccctgttgtgaagttaacgccctggggcacaggccctg

SEQ ID NO: 11312 - DNA, 2250 bp, Homo sapiens
tccagttcctgtaaaaactgggaagacgaggcgttctcatcccataggaggtttgtgagaactcacgccgggggtgaaaatgtacgtctgtagcatggagaagccttcagggtacattcagctcttaacaaacacaggaggacttaatggcagcttggcatttaatgtcaaaatccaagccgtggcatttaatgtcaaaatgacttcagaccacttctagccttctgggcccatgagtaataatgagcacactagggagcatctctgtaaacacagtggctggggaaacccttcctagtctcacttgattcctcatgacggaaatcacactaaagagagaaatcagtgaagtaaggaacgtggaaggtcatgaatgggccgcaaaccacggccagctgcttgtctttgtatggcttgccagctaacaatagtggttccatctttaaggaagaagaatgtttgatggagaaaatttgtggccaatgaagtctgaaatacttcctgtcatctgcccctttccagaaaaacttggccgacccttggtctacagcacgggttctcagtcgggcgacgatttggctgtctaggcgtcatttggcaatgtctagagacatttttggtagttagaatggggggaagatactcctgacttgtaataagaagacatcagagatgctgctaagtcggctccagcacacaggagccccccacaacgaagagttagtgcccccaaacgtcactgttgctgaggttgaaaataatcatgcagtcattcctcaattactgcctgcagcaattcctccatttttatgaatcttgtgagcacttacgctaggagaaatttcttttacaaaacttttaaaatacaattagtgctgataattcctatgtggaaatgattccagccatggtcccctcacttgagcatgtgaatattctcacggagagaagccccagcgagattttccggtgaatacgggattgcacttactctttcatcacggaaacagaccccccgagagaagccccaacgagattttccggtgaatacgggactgcacgtactctctcatcatgaaaacagagccccgttcataaatttttcatctttatttttaaggttatactcctctaaataacccttaagcctcatcaagaaaggtttgtttatagtatttttactatagcttcatccttgataacgtcctaatttccttctggacaacctccttgaccaatggcatattgagatctatgtgacatgaggatatttctcagtaccactttgttactggtacctgatgcacacggattgcgaccagagcatgatgcctccatcaagtggtaatatgtttgcagcctgctgtccagccaagagtgacagatacttctagtgacttccccggtatccactctcatcttcttccaatatcaagagaatccaggttctgtcagattagtaaggtgtgctaatctaaattttaaaaaatctcttacaggttttcttgcagctggtaccatccatgtctcacagccctggccactgacagatcagcagatgtcaccacatgggcttctgagaaagctcttgaatggggatcgttcttaaacatgaattcctccctgtatgttttgttctttgctttacttttcaccttgcaaagagatccagtacctagtattggaagatccaccttaacgaccgtgcatatgaaaaccacagtctaaggaagtgactgcagaaagctcacagcgaccctggcctcccctgtggcctctttgagtgtctgcagcagccctggacttccagacttctatcacatgagaaaaaataaaactgattattggtttaagctgctatggatatttcattgtttttcttttaaatttatttattttaagatgggggtctccctatgttgcctaggctagattcgaactcctgggctcaaacaatcttcctgcctcagtctcccaagtagctgagaatacaggcatgtgccaccacacccagcttgtttttctatttcatttgtttattggtgggagggggtttctacacccagctggatgctgcctggagcccatacacctggtcattggtcagttgtgtggtttttttttgtttttttttttttgtttgtttgttttttgagacagagtcttgctctgtcacccaggctggagtgcaatggcgcgatctcggctcactgcaagctctgcctcccaagttcatgccattctcctgcc

SEQ ID NO: 11313 - DNA, 1123 bp, Homo sapiens
gctatgtatgtcctgggcaagttggccggcaggtgtgtcatggcatcatttaggtcagaaggagcaagggtagaagtgtcagggtgacattaagaaaccccctactgagtgtgtcagggtgaccttcacgttggagagaagaactggtgtccctggagagtggctgccaggccttagggtacacggggcgggtgcagttcacccagagggctgccctggcttgctggggctgtcgcaccactggcctagggaggacactggaagggacgcccgtttgtgtcagagcaagaggattggggtagggcaggctttggcccatgggcaccttcctgggggtggcctggagtcaggaaggcggtagccattcctcctgacctggcacgtgcacaagactgcatacacacacttgctcacacacagtcacaccacacacaccacgtgcacacacacgcagccctccccacttggcttccgaaacgtgagtcactcagatgctactctgctgccgtcttgccccctctgctggcagccctgttcctcctaactccaccagccctggcctcctccgcctcctggagagtcagagccgatgggctagtttgggccacacagggtggggccaccctgagttctgccagcatgcagactgtaggtggggagccgggagaagagctatgttgcctgcctctgggaccctggggctacagcccacgagtgtcccttgcagagcccaccagggtgccttggaggcccatcccagtgccaggctgttcttcccagatgggacagctggggccacaggctgccgtggcagtgctgggctttctctggacagctctcccacctctgcccagggggcccggggggccagccccctgcctgggtcagcctctccctgcctgctgctctcctctggcccatccagcttgtatgtagattttccctcacgtgtgtgtgtgtgtgtgcatgtgtgtgtgctggtgagagtgacagcgggagcagggatgtgagacctgcagggtggcagggctcatggatgactggcggggtgcattaagtgctcatgctcgtgaaaggcacctcttcttgggtgtgggtgaggacaggtgtgactgcgcatgca

SEQ ID NO: 11314 - DNA, 1372 bp, Homo sapiens
ccctcccggactggagggggctcctgcagggagggggatgggagcagacatggcttttagtgcctgaaggtggagcagagggaatcctggggtgggtggcggggagatggggtcccccgccagtgtgggggctgtggatgtggcatgcctgacccccatcccctgttcagtcggggggctgtgggtctgatggagaagtggttattcctgcatgccctgttccccctccacttgatggggaccagcccagattgcgggggtgcctggctggcagagcttagggacctgagcaactaaagcccggccccaggggacctcccctcccccaagcgctgagtttctaataaaggccaagcctcataaacaatcacctgtgcccgctcccatctggctggcttcgggagcaatcgctcattcgcctgctgcctgcctgccggagcatttgtcattaggaaggtttaatgggtttcctctcagctccagagggctggggagagccggctgcatggatacaccgccaggcagaatgttctcccatcgcctggtggaggggggttgggagtgaggcagccatgccaccattcacaccaacagttggatgtggggttggggaagtgactgcacccctcctggaacagtagaggccctgggtctggaaggatcggaaattagtggctggggcccagagggtttgctgagttccactccagggtgaagaatgggctttgtgtcctgaccatcagcagcagggcccagggaaggctgtgcatcgttctgtgtgggagccgctgcccccacccgtgtgtatgtgtgtctgcgtttgcccaagaatgtgtggggccatgtgactggtcgtctctctgtcctgtgcattttgggagtcctccggttctgagagtcctccggttctgagtgtgaccacctgcccctccaggtacccccttcccttgtctgtctgtgcagtggccaaaacccaaatgagaatgtcgctgttaggtaaacatgcctccagagcccacttcggggccggtgattcattattaagcagctgcgcattccctcacctcccacccaccccctcaccccctcctgtctagaaccagggcataaatcccaggcctttaggatggtgacagtgtagtcttccctagtgccacttacaggcacctcccaggccagacccgccccagggggtcagtctctacgtgcccctggcttctgtggccgctgggcagagctggagcaggtcaccttggggtaaacggtattactgccccaggacaggagttggcttcgctgtgcccacgtccatgatgagaggggaagtcagtgagttagcagtggatagccgaagacgcacacagattgatcc

SEQ ID NO: 11315 - DNA, 1146 bp, Homo sapiens
ggcagatggtcagagggaggagatccaaaatggctgtagtcaaaaggaagaggttgtgggtgatggtggtcaaaggaggaggttagagagagggaggaggtgggggaagaaaacacactggaagcccctcctctccacgtgggtttcccctggcaagggggctccaggcctgggatatagccctagggagcctgcgcgggagagcagggagagggggaccgttccactctggggcttaggccaggaagttttgattcatcccagaactaggtcaactttttttctcaccaaaaaccaaggggaaaaaaaaaaacagagtcaacaagctgctgaggtcggaacatctgtggggtggtgaggaggcggggggtgctgggggcccaggccggctccttcttcctgagccacaaacatggtgggagggagggagaggctgagccccctaaaaaaaccctgagcctctatcctggagtcctgggcttattctagctgttccccacctctgcctgacacccccggcttctctctgctgcagatcctgtggatgtcctgaaggccctgggtgtgcagggaggccaggctggggtccccgaggggcctggcttctgtccccagaggactccagagggtgaccgggcattcagaattggccaggccagcacgctcggcatccccacgtgggaactctttccaggtgagttggagtaggaggcctgggtacctccccggagggaggcactgctgggccctctgagctgccttgttccctctgcccacccagaaggccactttcctgagaacttctccttgctgatcaccttgcggggacagccagccaatcagtctgtcctgctgtccatttatgatgaaaggggtgcccggcagttgggcctggcactggggccagcgctgggtctcctaggtgaccccttccgccccctcccccagcaggtcaacctcacagatggcaggtgagcatggggagagtgggcgggggtccgtggataaggggtggggtgagaagcacccgcactgaggccgtccccttgcaggtggcaccgtgtggccgtcagcatagatggtgagatggtgaccctggtagctgactgtgaagctcagccccctgttttgggccatggcccccgc

SEQ ID NO: 11316 - DNA, 1241 bp, Homo sapiens
tcagtgcacgggttctgtccccactgctgccttcgtgctgtcatctcccgcacgacagtgcagcgggtttgatggtgccagactctcctcggggcgtctgtgccttcctaattggctgtacctcctatggttgggagacgggcgtctcccatatatgtgcgacttggcagctgtgactttgctggtggccctgtgactgtcctgatgagctgctgtctgtcggccccagggtgctgaccaccccacatcgtgtgtgcgcactgtgtgtatagtgtctccgttgcatgcctgtggctgtaccgtccgaattctttggtgggatttgctggtggcgagtgtgagagtgcagacgtgcacttgtcgcctgccacgcgagggggacctgggcgctgttcctgttgtgtgtcccatgtctgccgttgctgtgcatgtgaggctgctgcccctgttgtcctcccgccctctctggggtggggtcggggctcctcctcctcctcctccaccagtgtcgctggctgggagctcaaatggtgtcagcttctcaggtgtcaccttggtgtcctcgtggccaactggctgcctgtggtttggcacacagtgcctgcgctggctcaacactgaagcccgagcttcctggggcggctctgtccccacgcctgcgccacagtgaggttgaacttgactgtcttttggtccccagagctagagccggtgcaggccacgcagaacaagacagggaagtatgtgccgccgagcctgcgcgacggggccagccgccgcggggagtccatgcagcccaaccgcagaggtgaggggcaccccgacgccaggctggtgggtgggcacctcccggcacctcgtaattatccccgaagcgtgcacacgagggctgggcagcacacgagggctgggcagtgtcctccccctcacagccacctcccctctcccacacagccgacgacaacgccaccatccgtgtcaccaacttgtcagaggacacgcgtgagaccgacctgcaggagctcttccggcctttcggctccatctcccgcatctacctggctaaggacaagaccactggccaatccaaggtgggcaggcaggcaggcacggtggggctgtgtgagggtcacttgtcctagggtcgcctgtcctagctcgtgcccgaccccatcccgcccctccacagggctttgccttcatcagcttccaccgccgcgaggatgctgcgcgtgccattg

SEQ ID NO: 11317 - DNA, 1203 bp, Homo sapiens
ccctaactggggaggtctttaccctgcggttccataactggggggtctttaccctgcggttcccaactgggtcgggggtcattacctggcggttccctaattgtgggggaatctaccttgcagttccctaatgtgaggaggggatatctttaccctgtgattcccttactgggaggggtctttaccctgcgattccctaacttgggggatctttaccctgtggttccctaactagggggggtctttaccctgcagttccctaaatgggggggagtctaccttgcagttccccagtgtggggaggagatatctttaccctgcagttccctaactgagggggtctttaccctgcggttctcgaactagggggtctttaccctgcagttccctgagcaccccaggaacatggtactgtttaattcagcataagctcaccacaaaggagagctcctaacgaggcctctcccgctcgcaggcctgagaacacccacaagtccactccagcgagctaccacgcagacatcaacctgctctactggagcgacgaggaggccgtggtggacttcaaggctgtgcagggccgctgcaccgtggagtatggggaggacctgcccgagtgcgtccaggtgtactccatgggcggccccaaccgcttctacttcctcgaggtggtgcccctgcttgctagagggaaggcttcggggtcaaagttggccagaaggagtctgatgtcgggttatacacaaggcggcttggctgcagggtttcagcttttgtaagaagtgggtggttggctgacgtgaagctgttctgcaggagctttacgggggtctgagcagggttctccagagcacaagttgtatgagattcaagtggtcccggagtttaacactcctggtttttaaaaagtacgtcattagagaacctaacgttttagtgtcttggtgcaactgaacgttgaggaccatgaggcagcttccaccagcctgactggtgtcttagtatgagttggagaaggtgcccctgctcctgggtcccttgggccaggcgcctacgtccaggcccagcccacatgcctgtgcgggtggccctcgttatggagagggcccacgagtcagctgatcaagctcatgacttgtaaattgttggggcttggcctttccgtgttgttaccttaaaacgatacatccacgttctcccagg

SEQ ID NO: 11318 - DNA, 1174 bp, Homo sapiens
ccctccgaaaactgggccatggaggtgagtgcctggtgtccctcgtgagcccctgccttatcgtggagggtcactgctgacgtgcgttctgttttgttttgatttgtatttttttttaatttggttttttttttgtttttttttttgttttgagactgagtttcgctcttgttgcccaggctggagtgcaatggcatgatctcagctcactgcaacctccacctcctgggttcaagtgattctcctgcctcagcctcccgagtagttgggattacaggcacccaccatcacgtccagctaattttttgtatttttagtagagacggggtttcaccatgttggccaggctggtctcgaactcctgaccttaggtgatccacccgcctcggcctcccatagtgctgggaatacaggcatgagccactgcgcctggcctgacacgcattcttatctcccaagggaggcatggatcccgagtccctgctggagggggacgacgggaagacctacttctaccagctgtggtatgatcaagactacgcgagattcgagtcccctccaaaaacccagccaacagaggacaacaagttcaagtgagcactggggctggactcggggtcagcaggcactttcagcccacatcactcccttttcccgtgtgcttccgtctggttggcttccgccaacggccccccagtttgtgtctcttgctcgtcaaaggccagcctgactatgaatgatgctcaagtgtgtagatggcctggagttgctttaagtgtgtggatgacctggcgttgtctttgtaagagggttccctacccaggaacagggttcgtcttgccatttcaagacttcccgtgtgttcttcagtgtgtgcccagctcttgcatgtttttggctgtttcttagatattttctcctgtaaatgagacctcttatttgattcttttctttcctttttttttttctttttttttttttgagacggagtctcgctctgttgcccaggctggagtgcagtggtgcgatcttggcttactgcaaactcagcttcctgggttcatgccattctcctgcctcagcctcctgagttgctgggactacaggcgcctgccaccacacccggctagttttttgtatttttagtagagacgaggtttcactgtgttagcca

SEQ ID NO: 11319 - DNA, 1119 bp, Homo sapiens
gaggtaagagatcgagggtcctcagcatccgggattcccactggaaacttgccttcagaaccagcagacactgttcttcagttggatttaggccagtttggcttaagcatgagagaaacctgttctctttcaagaccacggttcctccttctggcctcaacttgaaccgcttcacagaggactccctcctgcgacacgcgcagtttgtggtggagcaggtggagagttatgacgaggccggggacagtgatgagcagcccatcttcctgacaccctgcatgcgggacctgatcaagctggctggggtcacgctgggacagaggtaaggatgcggcagggaccagagtgaagactggagaccggggagggtagagcatggcccacatcctctgtcccagtcctctgagatgctggaacctctcccgtaggcgagcccaggcgaggcggcagaccatcaggcattctaccagggagaaggacaggggacccacgaaagccaccaccaccaagctggtctaccagatcttcgatactttcttcgcagagcaaattgaaaaggatgacagagaagacaaggagaacgcctttaagcgccggcgatgtggcgtctgtgaggtaacctcacctgtgggtgctcccgctcccctaaggtggcccagcctctggcctgatctgaggactgctccatctttctctctgtggcttgagactctggctgctcaaatgtgacccctgagacagaaattagttagtggtctgggaggaccctgcatacttcattgaacgtcaataggacagatgtccacagaggcatgcttgggtgctttgctgataatgccactgtccttaattgaagagcctggcttctgggtggctctgctgtgcctgcatctcacagtctgaaggcccctgttggactgctaaaggggtattcacatctaagtgggcactttgtccagcttagatttgaggccctcaggaggcgtccctttctgtgagtttttaaaatatatgtttacttcactcaggaggaactaacttcctagtcctatgacccaaagaccaggactattttgatacctattacctgactttcttttggataaagactggcttcag

SEQ ID NO: 11320 - DNA, 1121 bp, Homo sapiens
tgctgttgcagacacacatacacttgatgcttaggtgggagaataaggtagaaactctgggtgatagaacgctgtcttaatccagtgttcccgcaaccaaaaaatgagtgtcggggccaggcatggtggttcagcctgtaatcccagcactttgggaggctgaggtgggtagatcactggagataaagagtttgagaccagcctgctacacatagtgaaaccccgtccctactaaaaatacaacaattagccgggcatggtggttcaggcctgtaatcccagctactcgggaggctgaggcaggagaattacttgaacccgggaggtggaggctgcagtgagccaagattatgccatcgcgctccagcctgagggatagagcaagactctgtctcaaaaacaaacaaaaaaagagtgtcagacttgtacattctctcattgcctcgtgcctgatctgaagtctgcacgaagacccgccttcacggcttagctggtaagcatgtgctttgtttcctgtctagtgtgtactgtaagcacggtcacctgtgtcccatcgacaccggcctcatcgagaagaatatcgaactcttcttttctggttcagcaaaaccaatctatgatgatgacccatctcttgaaggtaaggaatagtccgggattatgtttggggcacactttaaaaacagccaggcagggtggctcacatctgtaatcctagcactttgggggtctgaggccagaggatcacttgagcccgggagtttgagacgagcctggacaacatagcaagagcctgcctctattaaaaaaaaatatatagcatatatatatagtatacatatatacttatatatatgtataaataaaaaacatacttatgaagcaatagtcagctggagttgctgctgcctcttaaagttagggtgtgagactttgtgccaggagcagctgtaggccaagtcattgtgatgactgaggagcacccgacctggctgatgggatgtctgctgagtgggcgcttagagcgcctcctgggtttgggatgtgagtcagagcctttagtccatttcctttttctgctctaggtggtgttaatggcaaaaatcttggccccataaatg

SEQ ID NO: 11321 - DNA, 1126 bp, Homo sapiens
atcgtgctaggcgtctttatcgtctgctggctgcccgccttcagcatcctccttctggactatgcctgtcccgtccactcctgcccgatcctctacaaagcccactactttttcgccgtctccaccctgaattccctgctcaaccccgtcatctacacgtggcgcagccgggacctgcggcgggaggtgcttcggccgctgcagtgctggaggccgggggtgggggtgcaaggacggaggcggggcgggaccccgggccaccacctcctgccactccgcagctccagctccctggagaggggcatgcacatgcccacgtcacccacgtttctggagggcaacacggtggtctgagggtgggggtggaccaacaaccaggccagggcagaggggttcatggagaggccactgggtgaccccagatagagacttggggctactgagccagatgcccccgccccacagacctgggtgatgttgcaaatatttcacacctggaaaggccagataaggcactgactagtcacatagcagtgttgcagtgcggtcctgagggccagtccagtggctagtgtgacccctttagaactggatcctggggaggccagggcaggggacctgtgaagagccagggtgagggcaggcagcatttaaggggagctcagggcaggagcactttaccacctggtacaaaggatttttttttttttttgagacggaatcttgcactgctgcccaggctggagtgcagtggcgtgatctcggctcaccgcaagctccgcctcctgggttcatgtcgttctcctgcctcagcctcccaagtagctgggactataggcgcctgccaccacacctggctaattttttgtacctttagtagagatggggtttcaccgtgttagccaggatggtcttgatctcctgacctcgtgatccgcccgcctcggcctcccaaagtgctgggattacaggcgtgagccaccgtgcccggctttttttttttttttttttttttttttttttttttttgagatgaagtctcgctctgttgcccaggctggagagtgcagtggtacggtctcagctcactgcaacctccacctcccaggttcaagcgattctccag

SEQ ID NO: 11322 - DNA, 1189 bp, Homo sapiens
tgagccggcgggcagagctgggtgggggcaggggccatggacctaatgcaatcctcaccgcctgttgtatcctccccacagccccccggtatgagattgtcatcatcactgtggtagcagccgcagtcataatgggcactgcaggcctcagcacgtacctctataaccgccagcggaagatcaagaaatacagactacaacaggcccaaaaagggacccccatgaaaccgaacacacaagccacgcctccctgaacctatcccgggacagggcctcttcctcggccttcccatattggtggcagtggtgccacactgaacagagtggaagacatatgccatgcagctacacctaccggccctgggacgccggaggacagggcattgtcctcagtcagatacaacagcatttggggccatggtacctgcacacctaaaacactaggccacgcatctgatctgtagtcacatgactaagccaagaggaaggagcaagactcaagacatgattgatggatgttaaagtctagcctgatgagaggggaagtggtgggggagacatagccccaccatgaggacatacaactgggaaatactgaaacttgctgcctattgggtatgctgaggccccacagacttacagaagaagtggccctccatagacatgtgtagcatcaaaacacaaaggcccacacttcctgacggatgccagcttgggcactgctgtctactgaccccaacccttgatgatatgtatttattcatttgttattttaccagctatttattgagtgtcttttatgtaggctaaatgaacataggtctctggcctcacggagctcccagtcctaatcacattcaaggtcaccaggtacagttgtacaggttgtacactgcaggagagtgcctggcaaaaagatcaaatggggctgggacttctcattggccaacctgcctttccccagaaggagtgatttttctatcggcacaaaagcactatatggactggtaatggttacaggttcagagattacccagtgaggccttattcctcccttccccccaaaactgacacctttgttagccacctccccacccacatacatttctgccagtgttcacaatgacactcagcggtcatgtctggacatgagtgcccagggaatatgcccaagctatgccttgtcctc

SEQ ID NO: 11323 - DNA, 2022 bp, Homo sapiens
tgcttcctctggcccccagggagtgacctgttccacctctccatttctcccaggcaatcggctcttccccgctggggtccggagaagggctcctgggcctcagccccgggcctaatggtcacagccacctgctgaaggtacgggcagggggtggggacatgcagggctgggaagccccggccccccagcggcccctgacccgccccgccctgccctctgtctccagaccccactgggcggccagaaacgcagctttgcccacctgctgccctcgcccgagcccagcccagaaggcagctatgtgggccagcactcccagggcctcggcggccactacgcggactcctacctgaagcggaagaggattttctaagtggctggcaccagagataactcaagggcctgcaccaaatcgcttttgggttttctgatgttttgttttgtgttttttttaaaccattttctctctttcggtaatagaaaaatctctgaaagactttactgaccaatcagccggagccccaggagcccaaggggtgtgggggagtctggaggcctcattatgtctctggcttgctccccacgctgaaaccctgcagccttaagagagaggggccccggcctgctctccctccctccccccatctcctcctccgctgtgcccgtctctccggagccctcctgcctcattgctcctgtaattttggcctttcgagtgccttggaggtttccctgacctcccgtgaagatacagagactgtctcctttttttttaactttgacaactgacttctgtttccttttctaagttttatttttcaaaccaccccggacagcccccagctctgattccttcaaggcccggcctgtccgggccaccattccacaccttgcggtttgaaacagctgtttttcccacatttgctgcaggcatggctgtctcctgcccctgcctgcccatctggcctataccccagccgtggggcccggggtccctgccgcagccccctccccttctgatgccttaaaagctgggccccaggccctgctggccagagccacagatgccaagctctgggagcttgactatggaccaaacagctctggcctagggattgggccaccctacccaggatctccaccctggggacagtagaaggggaaagccttcatcttggcgaaccggccccaccaccccctcctacccgggcctccgtgcagagatgggctttctctgccagtcccctgctgtctgtctgtgggagtcggacattgtgcccatctcccggagcctctgctgtcactcgcttgttgaagatgaattcttgaattctgcctgcccacccccggccagatccctggagctggcctccttccagcccagtgccagaaaccagcactccatgaagataaactctgggcccgcccaccagcaggacctgtcgacctgaggtgaccctgggccttgcccccagccaactgggccaccagcttccctcccttgactctgggggtccacatccactccaaggggactattcccccgaccccaccccagtctccccacacggacctttgctgaattaaagtttgtaagtaaatggttttaaagaaatcagagttggctggttcttgggacaaacagtgggcttgagtgggaggtctgggatggccccgcgggtttacctgagatggattccgccctgctcttcccacctggtcaccgcaggccctaagcaaacatctgcgcttatgttccattgattatgggctttccctcgcctccctggcgcggcgcatgctcagtcggtgagtcacgtgatgcatgtcatggccgcctccatggcccggggaggcgtgagtgccagggttctactgcaggctgccaggggcacctggtggaacagacctgggggcacttccgggtcgggggagggggtggcgctggggacaaccagaaagtttcaagcgacaggtacctggggcgcccggggcgggcagcgttaatccgtcagatgccgg

SEQ ID NO: 11324 - DNA, 2022 bp, Homo sapiens; identical to SEQ ID NO: 11323

SEQ ID NO: 11325 - DNA, 1186 bp, Homo sapiens
ccgcggcaggcgagaagtcgctgcagctggtcatggagtacgtgcccctgggcagcctccgagactacctgccccggcacagcatcgggctggcccagctgctgctcttcgcccagcagatctgcgaggttggtcggccccgcccctgcttctggagcttgccccttcctcttcagcttgggctggcctgagcgatccggtgcagtctgctctcacgctccgcccctgctcgtttgcccaggctgtcttgtccttgcactgacctccgaactgtttggcttgcttggccacaccccctcctcccaagggaccacgcacagccggctcggcccctcccaactcgccctcctgcccagctttgctcgtctagccccgtccctgctttctggctcagcctccttttgcttggtgccacgtgccatccggccctctccagcggccgggtagccaccggcctgacctgactgtcccccagccctcctggctgctcaggtcctgccgccgcccccggccgaaccccgccccactgaaactcacgagccctgccccgtccccagggcatggcctatctgcacgcgcagcactacatccaccgagacctagccgcgcgcaacgtgctgctggacaacgacaggctggtcaagatcggggactttggcctagccaaggccgtgcccgaaggccacgagtactaccgcgtgcgcgaggatggggacagccccgtgttctggtgaccaggcggggtgcagtctgagggggtgctggggtcacttggaacaggcagggtggagtagacggatgctgggtatcatgatagggcatgatcccagtgaagcgcggcggggcctagcggtgcgggggtggggcctatggaggcaaggggcggtgtatagagtgcggcttggcctggtgggcggggttaacccggcctagccaatgagcggcctagccaatgagcatatcaccccgctcaggctgcgctcttaagggtgggtcccaactgagcccagagggtccttcagtctcaggtgagggcttcagcctggtctgatccccaagccctcagtgcagccccccgtggcctgagtgcccccctccccctaggtatgccccagagtgcctgaaggagtataagttctactatgcgtcagatgtctggtccttcggggtgaccctgtatgagctg

SEQ ID NO: 11326 - DNA, 1369 bp, Homo sapiens
ttagccaggcatggtgacaggcgtcggtaaccccagctacttgggaggctgaggcaggagaatcacttgaacctgggaggtggaggttgcagtgaaccgagattgcaccactgcactccagcctgggtgacagagtgagactccgtctcaaataggtaaaatatcaataggcaggaagccagcttggggatgtgcaagggacaacggggacaacggggaccaccggctggcggccccacctcatctgcctgccttctcctcacaggacgcaaagtaccacatgcagcgctgcattgactctggcctctgggtccccaactctaaggccagcgaggccaaggagggagaggaggcaggtcctggggacccattactggaagctgttcccaagacgggcgatgagaaggatgtcagtgtgtgacctgccccagctaccaccgccacctgcttccaggcccctatgtgccccttttcagaaaacagatagatgccatctcgcccgctcctgacttcctctacttgcgctgctcggcccagcctggggggcccgcccagccctccctggcctctccactgtctccactctccagcgcccattcaagtctctgctttgagtcaaggggcttcactgcctgcagccccccatcagcattatgccaaaggcccgggggtccggggaagggcagaggtcaccaggctggtctaccaggtagttggggagggtccccagccaaggggccggctctcgtcactgggctctgttttcactgttcgtctgctgtctgtgtcttctatttggcaaacagcaatgatcttccaataaaagatttcagatgctctctgggctgctgggagggccgttcaggcagcccatctcttgtaggtgggagggaaacttggtgggatattgggggctgagctgtgcttctctggtcctttgcccaccagccatcgtgggtcctcgcctcacacatgctgttccacaacttggaacagtcttcttccagaggcctcaaaagcccccaaccttcagtctcacccacccactcccttgtccctacttggacctccagaatgcagggtggcccaagctgatcaccaccagagggcagtagtgatctgcaaaccaagtcacattccctagggttttgtggatctggcgcacctgcccgcaccccacacctttccagcttcctacaaccttttggagcagcatcctggatggactatatctccccaccctatggccagcgctgcccccaaacagatttttttttttttttttttttgagagtccagctatcacccaggctggagtgcggtggtggaatctcggatcactacaacctccacctcccaggttcaagtg

SEQ ID NO: 11327 - DNA, 1253 bp, Homo sapiens
ggactctacccttatgggggcgagagatggccaccagccattctgggcacccaccctgtggtcactggaagggaaacgcaggttttgcagcaaaaatcccaggactgtcagtctttggctgagctgggtcacatgctcatggctgagccaatcactgtggccaggggatggaaggtgctgattggctgctctctcctggagaggtggtcctgagaagcacctactaaataaacctgggctaaggaatatggcttggcactgtttgtggctgaccctgtctccctcttcccgccaggtcctcagctcctcctcagccacagagcggtaccccatgttcaccctggccgagggccatgctcaggaccacagcctggacgacctctgctcccagctcgcccagcccacactccggctccctcgcacagggcggctcctcagggccaaacgccccagctctgaggactttgtgtttttataaagggaggggatgaggggaaagatacaacactatttatttttttatttatgtcatgtcgggtgtgggatcttgagctctggcagtgatgatggtacttcctgttgtcagcccctcaagcccagctgcaaccagtctggggccattcagccagggacagagcccacagagcccatacacctgtctcccaccagcggggccctcctggcagggtagggaaggaggaccccgggcacccccctcagggcctgactcacgtactgtagtttgcactggacgcccgggccctccctgtcccaaagcccccttgggggaactgtggctgctgggggccaataaagctgtgtaacttgatcgtgggtgtggctgggcgcagcgttctgaggggatgtggggtctgggaggtgtctcgaggtgagagctccaagtcacgggaagtttaagtcagcctcagtttccacatccataaaatgggacgacttccttacccacagctacacgtgttttttaatttttttttttttttcaagagacagggtcttgctttgttgcccaggctggagtgcagtggtgcaatcatagctctctgtagcctcaaactcatggccttaagtgatcttccttccccagcctcctgagtagctgggactacaggcatgtgtcaccacattttgtagagatggagtctcgctaagttgcccacgctggtctccaattcctgggctcaagtgatcctttcacctcggcctcccaaagtgctgggattacaggcgtgcct

SEQ ID NO: 11328 - DNA, 1165 bp, Homo sapiens
gacctggagaggaatgacggctcggccgagaggccttacttcatgtcttccaccctcaagaaactcttgaacaagaccaacaagaaggcagcggagtcctgaaggccccgtgctccccacctctcaaggagtctcatgccgcagggtgctcagtagctgggtctgttcccccagccccttgggctcacctgaagtcctatcactgccgctctgcccctccccatgagccagatcccaccagtttctggacgtggagagtctggggcatctccttcttatgccaaggggcgcttggagttttcatggctgcccctccagactgcgagaaacaagtaaaaacccattggggcctcttgatgtctgggatggcacgtggcccgacctccacaagctccctcatgcttcctgtcccccgcttacacgacaacgggccagaccacaggaaggacggtgtttgtgtctgagggagctgctggccacagtgaacacccacgtttattcctgcctgctccggccaggactgaaccccttctccacacctgaacagttggctcaagggccaccagaagcatttctttattattattattttttaacctggacatgcattaaagggtctattagctttctttccgtctgtctcaacagctgagatggggccgccaaggagtgccttccttttgctccctcctagctgggagtgacgggtgggagtgtgtgtgcccaggtgggggtgtctcctggctgggaaggagggaaagggagggagagttttgcgggggttggcagtggagagcaggctggagaggagatggctaatagctgtttaatggaaacctgctgggctggagggagttaggctgaatttcccgacttcctctgccagttattgacacagctctctttgtaagagaggaaagaaactaaacccacccaagggatgatgtcagggggagaggtggagggcagatgtcctgggcaaaccgggcccctctgcccacacacctcacttgatccttttgccaaacttgtcaaactcaggggaactggcttcccagttgcccctttgccatattccaagtccccctcagacttcatgtctctgctcatcagcactgtcccaggatcctggagagggagaactcctggccccaggggaaagagg

SEQ ID NO: 11329 - DNA, 1269 bp, Homo sapiens
gtcattcttgctactgtgtacctagctgctgaaatgaatcctataaattatatgaaactaaaaagattttctgatcttatagagttgaagtattgataacaccaaggaactctatcacaatttgaaaagataagcaaaagtttgatttccagacactacagaagaagtaaaaatggtaagtttgtttttgatcacagatactgtttcttcactcatgtacagagatgtttgtagccttttccaaagcatttgcttccattaccatttttattagcccttttggattataaagcaatattatctattctgtattccattctgatagtgtaggaacgaagtcagtgccccattactcccactgcccagagacaacagcttttcagtttgcttgtccctccttggttcttcagttgtgctcctgcaggctttgcttttacacacgagcgatatagcatcattctgaattgtgcagcttaaaagatgaacgttgggctgcttgctctctttacatcatttttaacttaattctcacatccctagcgtccaatgcgaatttttgtgaatgatgaccgccatgtgatggcaaagcattcttccgtttatccaacacaagaggagctggaggcagtccagaacatggtgtcccacacggagcgggcgctcaaagctgtgtccgactggatagacgagcaggaaaagggtagcagcgagcaggcagagtccgataacatggatgtgcccccagaggacgacagtaaagaaggggctgggtaagtgaggttttccgttgtccttttcttttttgtagggtagccagggtagaggttggcacctgttttctaagaaactccagcctctctggggacctctgggttgtggtcagactgaattcctcactgagctgggtgttggtctgtccctcagggaacagaagacggagcacatgaccagaaccctgcggggagtgatgcgggtgggcctggtggcaaagggcctcctactcaagggggacttggatctggagctggtgctgctgtgtaaggagaagcccacaaccgccctcctggacaaggtggccgacaacctggccatccagcttgctgtaagtgtggccaccactgccgggtaggtgggtgggggggtggtaggcatgctgattgaggatgtggggcccaggaagaagtgtcctgctaggctgtgctccaagaagcacatgccacacttgccctggcacttgctgtgcgtgtgccttctcagtaggtgacaacc

SEQ ID NO: 11330 - DNA, 1183 bp, Homo sapiens
tctgtcaagggctggggctagggcagtcccgcctggtgggcggagttggtcccctttgctgcagatgccttgggatggctgttgtgtgatgcagagagggagttcatttcctctccctcggcctttttaaattttttcctattgaacattttagcatagctaatttattgggagaacatggggaggaggcaagggaagaggattagaagataggctccacctatctctcccctccctcatgagattattccttttagaataactccccacttttgtttttatgtttgttttattttttctttttctttcttttttctttttctttttatttttggagggggcctccaatttttacaatttcctcacagggcagagttgaatgtgctctagtttctccttccctggtccagggtggagatgaattcagcttctgggaaactcagctgccctttagaaagctgccacatcccctttccacctgacagaaaccccttggtcaaactgtgccttgtcttcttattccatccatgaatagaaacgctatcagtcaacgaccccccggacgttctggacaggcagaaatgccttgctgccttggcgtccctccgacacgccaagtggttccaggtttgcattttgttcttctatttgtcttttggtagagaattcctaagttttaacttggctaactgtcaccataaagattccttaacattgacgatagccgtgccgagcttagcacctgcagctgcgcaggtcctaaaggagtgcacctcaacaaattcgaccccaaaagaggctgagactgagttggtgggctgctgctgctgctgctgctttgtgttaagagtaacactctcttgtacacgtagtgacattgcggctggccacagccttggtggtcgccagtgttgactgtttacccttggcaaagcagcaacctgacacttgtgtcgttcatgttgacttgtgccctgggcggtgcctcagactgaagagcctgtgttttgttcccctaggccagagccaacgggctgaagtcttgtgtcattgtgatccgggtcttgagggacctgtgcactcgcgtgcccacctggggtcccctccgaggctgggtaaggcatgttgctgtggctactgggggtggtgtgtgcagagtcttttggatatcccaggaacactt

SEQ ID NO: 11331 - DNA, 1216 bp, Homo sapiens
gaacccagtcatggagctgaacgagaagaggcgtgggctcaagtacgagctcatctccgagaccgggggcagccacgacaagcgcttcgtcatggaggtgcgcagcctgaagctgcctgctggggcagtcccatggggaggcctggggtccccctgcccctggagggaggcactgagtcatctccatctgcactttccaggtcgaagtggatggacagaagttccaaggtgctggttccaacaaaaaggtggcgaaggcctacgctgctcttgctgccctagaaaagcttttccctgacacccctctcgcccttgatgccaacaaaaagaagagagccccagtacccgtcagagggggaccgaaatttgctgctaaggtgagcagtggcccttgaacctccttgcccaggcatgggttcttctgcaatgtgagcacgaagggaatgtcacttccctgtgttctcttctagccacataaccctggcttcggcatgggaggccccatgcacaacgaagtgcccccaccccccaaccttcgagggcggggaagaggcgggagcatccggggacgagggcgcgggcgaggatttggtggcgccaaccatggaggctacatgaatgccggtaagggccctcatactgcactgtccccgccttccccacgtgcatgctctgggaacaaatgtgtggggctcctggggtgggccggagacactgctggaccccggtaaccctgtctttccctttccaggtgctgggtatggaagctatgggtacggaggcaactcggcgacagcaggctacagtaagtgtgcgtttctgtctgtctgacctgggaagcagctgcagtgtagcgtctgggcctgagttagcaaagggtggccagagcagcctcgaggaggctgtagaaggggcacacacctttttgcggtgattaggtcagacggccctcgacccccaccccttcccggccccacagtgggattgattgtgttaatacacgaactcgtgtaactgcaaagttccttaaaagttagaattttaaatttctctgctttaagccatgcgaagcaccaatcttgtgaatacgcttttccggccagtgcacagctcttgtcttgagaaggagccttcattggggggttacaggagcagagaaatctaaaacatgaatttcaaatgtggcgctctgtgccctttttcaaaagaattctaa

SEQ ID NO: 11332 - DNA, 1540 bp, Homo sapiens
acccaaagtgtccgtgctgtgtccctgtgcttcactgggtttctcaaccgtggcttttcaccgcagcttgtctgaaactcttagcctgcagaatttaagacaatggcagtttttatcgtgatttgcctttgaacttggtcctattgaagttcacaataagtggaaaacaattttttcagagaatgtatttttgtgcagaattgcacagaattctagagacagcgttgttcggcatcaaggcaaaagcccacctttgctttttatggaaagcattactttatttaaagagacagacaatgacgcattttaatctacctttgtcttaatttacagcaggttttgtatgaatttttaaccttttaacaaactcccaaatctggttgatgcctttgacagtgatgaaaacgatttcaccacatctgaatccagagaaaccggctttttttcttattgcgagcatgttaaaacgttgggaacatgtggggaattgtatattgcgctgaattaacttctcccgcctcttgtaatgctctggtgggttcttgtttgggaatgcgatattttgtggctggtttagctagagagtgaactctcaaaggtatcaaaactgtgcttccattattagtgcaagaaacagacaggctttaaggggtagatgacgtgaaattttgcaagtcttaattacagctgcagatgcatgggattctggatttttttgttgctttttagtttaatgggactttaaaagtaattgaggagaaagaaccgtgatgttccctgtttctccagtaaaggactggcttttgcttgggcagaggtggtgctgctgggtgtgcagctgccacagactccaaaggcgtagaagtttgtgccaacacacggagtcattctggctctctgctgaggcccctgttttctggcaggtgccctccttggaaactggttttggctctgatcagcggttctttttgcagcaaagcctgcatctgtgttgacttgcaagattttgcgtttattcaggcaaaaactggtcaaaatggttactacatgatttgttcccagaggtttgaaacattcagtgaaactttttaaaactttgattgcatgatgtattttttttttagaaagttattgtttgagaataatgtctttttataccaggaaaatagttatcctgaatgacgttgaaaactccccctcccctttatttttttttaatcaatacatgtgaaagtaacaagccctcggcccttgcgtcttcattcattcccggcttcaggcggggcgaggtggtgtgctcagtgcaggacactggggaagctggggctgtggggctgtggggtgtgggtcctggtgggggggttctgaagatcccatcctcccagtctcctcgctgagctgccgcatgttcgctttctggcattgtgggacacatcctcccccttggtgtcttggctttgtgatggcgggcgagggaggaggcctgcctgaagaacacaaactgaaggttgcagatagttctgtccacgttgtcatgcag

SEQ ID NO: 11333 - DNA, 1198 bp, Homo sapiens
tcttggtgccagcctgatccagtgatgtgtggtaggcaggcagagccgcacaggagcccataagtcttgcccacctgcatcctggccgaggcttgggtgtgggctgcctaacctgagccccgctggctgggcccctcggctctaatccaccactctctctcctaggaggctactcacagtcgaactacaactccccggggtccggccagaactacagtggccctcccagctcctaccagtcctcacaaggcggctatggcagaaacgcagaccacagcatgaactaccagtacagataagcccccgcggggcggagatttctaccttctgcacttactccccatcagaagatcgagttttatgcatcacagttaacatgtcagctggccctccaggcccccgcccccatcccgtccacgttgctgtgtcgtgaggtgcagcgggtcaccctgtggcccgtcctgtgacccatatttagccgtgtttgggactccgtgtcttcaatggtttgttagttgccattacaactttgtctgggtagagtttttgagtttttgcagttcagtatccctctgtctattcacacttcgtgttagtggtaactcagtttgtctttaaatagttacagaagggatacgtcatttgttaatgcttttgtgaagtgagttaaacgagctttctgtattttaatgctttagtgtttcagttttataagtgaagattttattttaaaaaccagtgggaaagagtggggggtttctttttatgtctgggtcattcaggcagtacatctgaattaagctgaatgtagacaaataaagaaaaacaaaactgcgcccgtcttaggcctgggtgtctgacccaccagcagtgcaatgggcaggtttccccactctattcctgctcttgggaaagcagcgtgggccatcaggatggtccctggtccttagagagggtccagttcaggcttctagacattttactcatgctcagcgaaggctggttcctggtcccctgggctgtgtagacccggtgtcccaccaggctccaggctcccaccatctacagaggggcttacagcgcccattctggtcttggggaacccatcacaaaataggctttttctgctccccgattctggtgtagttctaagtacacagtgatgtcctctgtaggggcgtgcctgtggtggaacata

SEQ ID NO: 11334 - DNA, 1116 bp, Homo sapiens
cattatccgcccagccgagccatccctgctcgactaggcctcgaggggggcgtgctctcgggggggcctcacgcacccgcggcgcaggagcttcagtggtctggggccctccgccgcccctatgctgggaccaggctcccagtgggcagccctggcctcttccttaacgctggccccggtccagggccggcccctgtgcctggctggacaccgcactgcgcaaaggggccctggagctccaggcagggggcgctggggtgttgcactttgggggatggagtctcagggtggcagaggggggaccagaacccttgacaccatcctgaatgaggggtccagcctgggggggactctaccaaggtcttcttgggctgggaaagcccatgtagggcaggccttctataagtgcgggcaccaagggcgcctacatccccaggccttgctggggtgcaggggtatatcaacttcccattagcaggagctccccagcggcaagcctggcccagtgggctcggtagtgcccagctggcaggcctgaggtgtacatagtccttcccggccatattaaccacacagcctgagcctggcccagcctcggctgccagaggtgcctttgctaggcccggagccgttggcccgggccggccttgccctattcctctcctcctcctcctcctgggtcccccagggtggctgggcttgggctatgtgggtggtggtggcggggggtcttgggggcctctcagctcccgcccatgcctccctgatgggtgggcccagggcggcctctctctgaggagacctcacccactcctcgctcagtttgaccactgtaagtgcctgcactctgtattctattaataaactaaaataaagggaagacgctgctggtggctgctgtgtgggcctcttgtgttagtgttcaggctggggacatgggtgccacctccatcaggcctcccataaggatgcccaagtccctgcactcataagtgcctcccatctccctgagggctctgctttcgggggtgtcacctttcagaggaagccactcgatacaggggagagcttttactttccttagcatgtgaggagtgggagcagatattctctgac

SEQ ID NO: 11335 - DNA, 1207 bp, Homo sapiens
gtcacagctctctttgctatgggaactgggacacttttttacacgatgttgccgccgtccccaccctaacccccacctcccggccctgagcgtgtgtcgctgccatattttacacaaaatcatgttgtgggagccctcgtcccccctcctgcccgctctaccctgacctgggcttgtcatctgctggaacaggcgccatggggcctgccagccctgcctgccaggtcccttagcacctgtccccctgcctgtctccagtgggaaggtagcctggccaggcggggcctccccttcgacgaccaggcctcggtcacaacggacgtgacatgctgctttttttaattttatttttttatgaaaagaaccagtgtcaatccgcagaccctctgtgaagccaggccggccgggccgagccagcagcccctctccctagactcagaggcgccgcggggaggggtggccccgccgaggcttcaggggccccctccccaccaaagggttcacctcacacttgaatgtacaacccaccccactgtcgggaaggcctccgtcctcggcccctgcctcttgctgctgtcctgtccccgagcccctgcaggtccccccccgcccccccactcaagagttagagcaggtggctgcaggccttgggcccggagggaaggccactgccggccacttggggcagacacagacacctcaaggatctgtcacggaaggcgtcctttttccttgtagctaacgttaggcctgagtagctcccctccatccttgtagacgctccagtccctactactgtgacggcatttccatccctcccctgcccgggaagggaccttgcagggacctctccctccaaaaaaagaaaaaaagaaaaagaaagaaaaaataaatgaggaaacgtgttgcagcacaggcagttttcttctccttctgctcccctgtttctcatacccccaaactcagatgctggagctcaggcccgccgtgtgtgcacccaggcaggagcgggcgctgtccaggctgggccgcccccttggctctccctcctgttccaggggagccataggagggaaagcaggtggcccgggggggatatgggggccccagccctgtcccaaagctccctgctcggctgcccctcgcccgcctttatataaattctctgaatcacctttgcatagaaaataaaagtgtttgctttgta

SEQ ID NO: 11336 - DNA, 1168 bp, Homo sapiens
ctcccaggtcctgtggctcatccctgtgccttggctgcagtggctctttggggcgctggccctgggcctgtcagccgccgggctggtattcaccctctggcccgtggtccgtgaggacaccaggctggtggccacagtgctgctgtccgtggtcgtgctgctccacgccctcctggccatgggctgtaaggtacgggtctggggtggccacaggtggggccgaggggctaggggggcatgggctggccctgcctctgaccccaggggtcttgtgcagttgtacttcttccagtcgctgcctccggagaacgtggctcctccaccccaaatcacatctctgccctcaaacatcgcgctgtcccctaccttgccgcagtccctggccccctcctaggaaggcccgggtcccacaggtaaggactattcccagctgggctaagggggctgccctcccactcccagtcaaggcgagaggttctggggccactcccagacaattctttctttcaggcaacacctaagtggaccaacccctctgcctgtcctgccccccagacgatgactgaaggctcctttgacaccttgagatgattctgctactttccagacttttcttacaaagcaaacacttttattttctatgcaaaggtgattcagagaatttatataaaggcgggcgaggggcagccgagcagggagctttgggacagggctggggcccccatatcccccccgggccacctgctttccctcctatggctcccctggaacaggagggagagccaagggggcggcccagcctggacagcgcccgctcctgcctgggtgcacacacggcgggcctgagctccagcatctgagtttgggggtatgagaaacaggggagcagaaggagaagaaaactgcctgtgctgcaacacgtttcctcatttattttttctttctttttctttttttctttttttggagggagaggtccctgcaaggtcccttcccgggcaggggagggatggaaatgccgtcacagtagtagggactggagcgtctacaaggatggaggggagctactcaggcctaacgttagctacaaggaaaaaggacgccttccgtgacagatccttgaggtgtctgtgtctgccccaagtggccggcagtggccttccctccg

SEQ ID NO: 11337 - DNA, 1229 bp, Homo sapiens
aaaataaataagtaaataaaagaaatagatggggagagtgtggaacagaggtgtcaacatcacctccgggtgaagggatttcaggagcacgttcttttctgtacagagaagatagttctttttttttggtcaagaaattcaaccattagttttttaaagacaagcttgggtggggtgcctgctgggggcagtgctggtctttcactgcagcccaggcaccccttgagagtcccagtgtgtgttatgccccgagccagtcaagctgaagggagagcgggtgcgggggccctcctccgtgtcccagcccggcccctgggattgcgtcgcggcctctgcttgtcgacctgggtgctggctgtcctattttactactattgaccctgaaggccatcgaggagggcacgctggaggagatcgaagaggaggtccggcagaagaaatcatcacggaagcgcaagcgagacagcgacgccggctcctccaccccgaccaccagcacccgcagccgcgacaaggacgacgagagcaagaagcagaagaagcgcgggcggccgcctgccgagaaactctcccctaacccacccaacctcaccaagaagatgaagaagattgtggatgccgtgatcaagtacaaggacaggtaagcgaggaggcggggagggcgggggctgtaggggtccccgtgggagcaggcctggcatctgcactctgactctgcacactcaggcttgggccgctcactctttcactcatccacaaacactgactgaatctctgtgtctttgagcctggccctgaggaacatgctttctggaacagggaagcacacatgtatctgcggtgatgagagggaatgtcacatgtggtcgagaggagaggcaggggtgcgggtctcggagaaggggacattgcagcagagccttgagagaggggaggttggggagagtgcaccagcagaggccacagcaggcggagaggctctgccaaagttgtggcctggtggcctcaagggatgaggtgggatgaggggttatatggcagtaatgggtgctgcccgtgtggccaggaggttggggacaagaggctggcatgtctggagcagagaaagtggcagccctctcctgtccttgcaccctcccaggctacctgtgccatctctgtgttggtgagatggtggccacactcctgctctctgccaggccctgctccaagcctggagatcgctgtcc

SEQ ID NO: 11338 - DNA, 1219 bp, Homo sapiens
attctcctgcctcagcctcccaagtagctgggactacaggcgcccgccaccacgcccggctaattttttgtattttttagtagagacggggtttcaccgtgttagccaggatggtctcgatctcctgacctcgtgatccgcccgccttggccttccaaagtgctgggattacgggcgtgagccaccgtgcccggcccacatcagtgttttcttgagcaagtttatttaaagtttggcaggtccctggcaaggtgccctggcaggggtggccaacgcacactctctcctcctgtcccctctccaggaccgctcaggaagtggcagcgaagaagactgagccccgacattccagtctcgaccccgagcccctcgttccagagctgagatggcataggccttagcagtaacgggtagcagcagatgtagtttcagacttggagtaaaactgtataaacaaaagaatcttccatatttatacagcagagaagctgtaggactgtttgtgactggccctgtcctggcatcagtagcatctgtaacagcattaactgtcttaaagagagagagagagaattccgaattggggaacacacgatacctgtttttcttttccgttgctggcagtactgttgcgccgcagtttggagtcactgtagttaagtgtggatgcatgtgcgtcaccgtccactcctcctactgtattttattggacaggtcagactcgccgggggcccggcgagggtatgtcagtgtcactggatgtcaaacagtaataaattaaaccaacaacaaaacgcacagccttgcctgcaggtggacttgtgcctggctcccaccgtttctgccagcaggagtggcgggggccacctcatgtccaggtccctgtccttctcctggcaccagaacccatggggcccgtttcacagaggaggatactgaggccccggcaggggaagaggacttgtctggtcacgcgtgtggcctttgccactgcaggtctccagcatttgttcagctgagacctacagtgcagggagcaggcagctccatccgttccctgcccgtggcccagcctgggttggggagaccatcacagaaatgggcagatgccacatagagctctcagggccatgatgcaggaagctcagggcataatgggagcccaggtggtcagtgagggaagggacggagccgcctgctccctttcaaatccagaaca

SEQ ID NO: 11339 - DNA, 1138 bp, Homo sapiens
agccattgcgcatggcttgtgttcttgtgtttcttcctttttctttcgagatggcgtctcagtctgccacccaggctggagtgcagtggtgtgatcatagctcactgtagcctcaacttcctgggctcaagcaatcctcttgatttcagcctcccgggcctggccagcatggtgaaaccccgtctctactaaaaatacaaaaatgtagccaggcgtggtggtgggcgcctgtaatcccagctacaccagaggctgaggcaggagaatcgcttgagcctggaaggtggaggttgcagcaagccaagatcgtgccactgcactccagcctgggcaacagagacagactctgtctcaaaaaaaaaaaaaaaaaacccaaacaagccacatttggagtttggggttcccagcaggactatttcccaagcctgagcctggctgtttcttccagaattcgttgcacgcattggctgggatcctcccccgccctccagcctcacagctattctctgtcctcccaccagcttcatgtactggactgactggggaactcccgccaagatcaagaaagggggcctgaatggtgtggacatctactcgctggtgactgaaaacattcagtggcccaatggcatcaccctaggtatgttcgcaggacagccgtcccagccagggccgggcacaggctggaggacagacgggggttgccaggtggctctgggacaagcccaagctgctccctgaaggtttccctctttcttttctttgttttttctttttttgagatgaggtcttggtctgtcacccaggctggagtgcactggcgcaatcgtagctcactgcagcctccacctcccaggctcaagtgatcctcctgcctcaccctcctgagtagctgagattacagacacgtgccaccacggcagactaattttattttatttttgggaagagacaaagtcttgttatgttggcctggctggtctcaaactcagggtgcaagcgatcctcccgcctcagccttccaaactgctgggattacaggcgtgggccaccgtacccagcctccttgaagtttttctgacctgcaactcccctacctgcccattggagagggcgtcacaggggaggggttcaggct

SEQ ID NO: 11340 - DNA, 1229 bp, Homo sapiens
ctgtgatcccagctacttgggaggctgaggcaggaggatcgcctgagcccaggaggtggaggttgcagtgagccatgatcgagccactgcactccagcctgggcaacagatgaagaccctatttcagaaatacaactataaaaaaataaataaatcctccagtctggatcgtttgacgggacttcaggttctttctgaaatcgccgtgttactgttgcactgatgtccggagagacagtgacagcctccgtcagactcccgcgtgaagatgtcacaagggattggcaattgtccccagggacaaaacactgtgtcccccccagtgcagggaaccgtgataagcctttctggtttcggagcacgtaaatgcgtccctgtacagatagtggggattttttgttatgtttgcactttgtatattggttgaaactgttatcacttatatatatatatatacacacatatatataaaatctatttatttttgcaaaccctggttgctgtatttgttcagtgactattctcggggccctgtgtagggggttattgcctctgaaatgcctcttctttatgtacaaagattatttgcacgaactggactgtgtgcaacgctttttgggagaatgatgtccccgttgtatgtatgagtggcttctgggagatgggtgtcactttttaaaccactgtatagaaggtttttgtagcctgaatgtcttactgtgatcaattaaatttcttaaatgaaccaatttgtctaaactcgatgcacgttcttctgttcgcgcgcttctttttgtttttttttttttcctgagatggagcctggctctgtcacccctggctggagtgcagtggcatgatctcggcttactgcaagctccgcctcccaggttcaagcaattctcctgcctcagcctccctagtagctaggattacaggtgagtgccaccacgcctggccaattttttttttttttttttttttgagacagagtctcgctctgtcacccaggctggagtgcagtggtgtgatctcggctcactgcaagctctgcctcccaggttaatgccattctcctgtctcagcctcctgagtagctggggccacaggcgcctgccaccacgcccggctaatttttttttgtacttcttttagtacagacggggtttcaccatgttagccaggatggtctcgatctcctgaccttgtgatccacctgcttcggcctc

SEQ ID NO: 11341 - DNA, 1903 bp, Homo sapiens
gtgtccactgccccgctagacggctttcttaggggaattttcttctggttgtttcacaagacagattctgtccttgtcacccgggacagaaaactcagtcttttcaccctcattcagatgaagggactcaggacaggctctgtgacttacagggacccaatcaattcacaatgagaaattaccggccaggcgtggtgactcacgtctgtaatcccagcactttgggagggcaaggcaagagcttgagcttgagcctagacgttaaagaccagcctgggcaacacagcaagacccatctctacaagaaatttaaaaactagccaggcgtggtggtgcgcgcctgtagtcccagctacttgggaggctgagccctggaggtcgaggctacagtgagctatgatcacaccattgcacttcagcctgggcgacacagcgagaccctgtctcaagaaagaaaagaaaaagagacaaattacccagaaacccctcccttccccacatggaggccttggcaaatgttaattttcctagaaaatccttcagacctgaagacgcaggaaaagaatctggctctcagggtggcttctgcgtccccgccgccaggccccagactatggtcacagggccgtcctgttcctccccgggactccagaatttctctcctcaaaggaaagaaaacagggcatgcgcttgttggcaaaacgcagggccggctcccaaaaaccccatgtgtgtacgattaaaagttggccgtccccaggcctcccagcgcaaacttcaagagacagggctttgctgaaaaccaaacatgggccagctgggctttttaacaacctagagactttccggagctgcctggaacagagcctgcgggaaacggggcttgccagagacactcacagtttccttcatggcctgttttggtcccctaagaatctccacatcattgtctttcttgtgccttttccttggtgagcaacagaaagggaagggttccaagcctctaaaaatgtgctttgtgatcaggagtgcgctccaaaccaaatacgcgcgctgccctttcgaggccagtgagctcagcctccaaggctttaaagccacatttcagcaagagaaagcgctgagagctcgcaggttcattaaagaaggcaaagcactggtttctctccttagaaaagtaggtttcttggcttgatgtagactggcttgctttgatttttagtgaagggaatgtacgtaaaacaaaatagggcttggctggtcaaaggagacaagcaggatggatggatggatggatggatggatggatggatggatggatggatgaatagatagatggtgtttgcatgtaaattgcagagaaaacaaaaccaaagctgattggaaacaattaattgtgggtgtctgagggggaaggtcgcagctttgggcagctttgagaagcggtacaagagttctgtgcctgtgtgtccagccctggagccagccagtgcatttattttaagctcttagaagcaactccttggcccaggaatgcgtgacccctgagatgggtccacgcatctctctacacttccttctctccgtgggatactggactcgtgcctctgcgcccattctcttctcacgcatatccatgagctttaatttcactttctgatcacggtacgtccataaagccagtattacacttaaatgaagtattcttttttgtaatcgttttttttagaaggtaaacaaatttaataaagctaccaataatgttgatgattctgtgtcttttcttttttcgctgtgctcccttttaagctttaagatagatatctttccttttttttttcttttttctttttttgagacggagttttgcttctcgtcacccaggctggagtgcagtggcgcg

SEQ ID NO: 11342 - DNA, 1786 bp, Homo sapiens
acaggagcaggggaatgccatggaacaagggaaccagagccactgtcctagagtgagacacagccatcccttccctcagccatccaagcatttatggggtacctactgtatacccattcttgtgggcctcagggcacaggaaggagaatgccctagaacaaaggaggcagagcctccatcctagagtgagagacagccatccctctcctcagccatctatgcatgtattgggtacctgctgtataccctgtcccacgggcattagggacacacccgtaaacaatacagccccagtcctaacttcctattgcaatccatgccccaatgttctcagggccccctgcctgtgcccatgccctgatgttctcggggtcctcacactcccatcctgatattcgagacacctatctctggggcagggagacctccagcaggggcctcccggacaaccacaccctttctcacagccccagcgcgtgttcgggacgtatttccgcgtgggcttctacggcgcccacttcggtgacctggatgagcaggagtttgtgtacaaggagccatcgatcacgaagctggcagagatctcacaccggctggaggcacgtccttgtggttgggggtggaacggggcatggggctgccttggggctggagtaggggctgtccctgggtggccccgagtcagccctgtgtctccaggagttctacacggagagatttggcgacgacgtcgttgagattatcaaagactctaaccctgtggacaagtccaagcttgactcacaaaaggtgggtcccccaaccatttccccaaaatcttagattcacagagactccaagtgctgtttcctggggaccctcaaatcctctttctctgggaaaccccaaatcatatttcactgagggaccccaaaacctattcctcaggggattcccaaacatccagacataggaagacttggaaatgacaaagtccccagatcccctctctccaggaacagggcttgggctgtgcgtgctggggctgtgggatcctcacacctgaccctgcgcccaggcctacatccagatcacgtatgtggaaccgtactttgatacctacgagctcaaggaccgggtgacctactttgaccgcaactatgggcttcgcacattcctgttctgcacgccgttcacgccggatgggcgcgcacacggggagctgcccgagcaacacaagcgtaagacgctgctcagcaccgaccacgccttcccctacatcaagactcgcatccgtgtgtgccaccgggaggaggtgggtggggatcctgggcctggcgggggtggggaggtgaggggacatcagaccctgggaggggaggggagggtagacacagggacccagacccaaggtggttcacggacctcagacccagagaggggtggcacagggaccctagaccagatccccagggaggggaggggaggagaccagacccagggagacctgggaggcaagatgcagggaccccagacccagggtggcccagggattccagacccagaaagaggaggcagagggagcccagatctaggaaggcccagggaggagaggtgtggcccaggaagaggcccaggtaccccagaactgggctgagaagatatggagaccctgcattccaatctctaaactgaaacctctacctccagacccaggaggacccagggattctagactcacaaaggggaggcacagggactccaaatctaagaaggcccagggaggagaagcccagggattccagac

SEQ ID NO: 11343 - DNA, 1240 bp, Homo sapiens
ccattctcagcaatttcccagaaggactaacctctgatttctctcccctaaatcctaactcccagcccagtgttccatctgctatttctcagtcctctgacttttgactccgtgccctgttacatcacagatgggttaacgtcagcccctcacttctggccttgaaacccatgcccactgtcacctccagatgacttaacatcagtctttcatctgtggctattggcaccatgatttctgtcacctccaagatggctttaatggtgacctgccacctctgacccttgaccgctggcatcccccatttttcccccactctgcagagctccaccttctccagccaagccccggaccccaaggtgaccagcatgttcgaactgagtggaccattccggcagcagcacttcctagctgggctcctgctgacggagctggcactggccctcgaacctgaggctgaagggtgagcagagctcctgtctagccccaggacaggtgggacagtccaggagccatgtccaccctgtcctgagcacctcattaccccatagggcattcctgttgcacaagaaggccatcagtgctgtgcacagcctgctatgtggccatgacactgacccccgctacgccgaggccactgtgaaggctcgtgtggccgagctgtacctgccactgctatcgattgcacgggataccttgccacggctgcatgactttgctggtcagtgggccaggggaagatggggtcacatgatccagggacttggtcacagaaggcacaggatagtaaaggtgggagaacacagtcactggtatgagtatagacattaggattagcagagcaggttaaagtgctaggacagactacttaagtcataacatctctgagcctcaggtttctcccctgtaatggagacagtaacaacaccaactacttcataaggttatgtgaaaatgtggggggctgtagtactgagatattgtcagcctacaatagatgggagatattattgtaccatttattattttctaagaagagcaaaaagtagggaacatccaagtgagaaaatgattggagtacattcattcactcattttcaacaaacatttataggcattgttgaggggggtggtataacagtggttggaagtacaaaattgggatttgtgggtggatgcctttcatcagtttggggaaattcttagccattctcacttgaatttttttctgcctcatttt

SEQ ID NO: 11344 - DNA, 1778 bp, Homo sapiens
gctggtggaagatggttcatcttcctcgcacagtgtgggttcttggagttcatccagggaaggcggcgcctctttctcaggtcctgcaggctggtctctgagcctgcccccacgaactttctggattccaaggtgggatggtgatccctttgacccctgcagaccctctacttgcgaaaagcagcattgaagcagccttttcccattgtagaagggacagggagtcagatcccctcaaccccccggcttcagggaccccagaagtgccttccaagcttcccccaagatccacatcacccacgaccctgccactgtttttgctgtgttcaccacatctctgatcctgaagtgaattctggaactatggaccacattagactgggcagagattcgcccaacccctagcactccggctctgggctttcggccagaagttaattaacctcagagccaggagcctggggctggggcctccctcccaggccctgtttagctgtttagctggttgtgttttaagcaagttcttgcccaatcatgcatcctgctagaaaaggaaatgaagcaacgttcccagccaccgcaggcagttgtcggcgactttctgatgtaagcacctgggctccgacttgaggggggcccttcaagacccaatgtccatttcccaatccttgtcatcggcagggcccagggatgtgacaatttttgctaatggaggagtcacttctttttttttttttttctttttgagatggtctggctctgtcacccaggctggagtgcagtggtgcaatcatagctcaccacagcctcaaactaggggtcacttctaagggatgctgggggttgggcggaaggggtgaggaggtaggattgagtaacttgctgtcactgcttgtactttgtagacagcctgagagtggcaggaccttatgtgaatgggggggatggactgtgatcagtgccggggagtctctgaagctggggtccccacctccaggggcttctgctcagaggttacgtgtgcagtttgaagatgtacatcttgacctccggtttagaggcactttctgcccatcagattccaaactctaggggcgcagcaccttttctttgctcccaaacaccaaccaacaccccttcacaggaccagcactgttaggatggctaagtggatgttttatgttcccacgtccctgactctgtttcagaggttgtgtctgctctcccagcccctgaagccaaaatgacttcctgcagctttcatgagctcagcctcttccctggggtatgtgtgagggggaaagcctggttcaagtttagatttatttctagggagccctggtttcttcataccagaggctacccttagaactttggagtggggtatctttttttcatttgtttttttgatacagagtctcgctctattgcccaggctggagtgcggtggcacaatctcagcttactgcaacctccacctccagggttcaagcgattctcctgcctcagcctcccgagtagctggcattacaggcacctgccaccacacccggctaaattttgtatttttagtagagaaggggtttcaccatgttggtgaggcttgtctcaaactgacttcaagtgatccacttgcttcggcctcccaaagtgctgggattacaggcgtgagccatcacgcccagccgagggtatcttttataccaacaaattagatgactgaggtgtaatggacaaatcctatgcacaaagtgagggtatctgaatatgtgggcggg

SEQ ID NO: 11345 - DNA, 1250 bp, Homo sapiens
aataggccaggcgtcgtggctcacatctgtaatcccagcactttgggaggctgaggtgggcggatcacttgaggtcaggaggttgagaccagcctgaccaacatggtgtaaaaccccatctctactaaaaatacaaaaaaattagctgggtgtggtggtaggtgcctgtagttccagctgctcaagaggctgaagcacaagaatcacttgaacccaggaggtagaggttggagtgagccaagatcatgctactgcactctccagcctgggctacagagtgagactctcaaaaaaaaaaaataataataataagagaaaatagacaaggtctccaggctggtcaactcctggcctcaaatgatcctcccacctcagcctcccaagcagccgggactacaggcaaacatcaccatgtccagctgtccccagctttctaatctggtctttctcttgccccagaacctcaagaaggcatgaagccagcccctgcagtgccgtccacccgcccctctgggcctgcctgtggctctgttgccctcctctgtggcggcaggacctttgtggggcttcgtgccctgctctggggcccaggcggggctggtccacattcccaggccccaacagccttcaaagatgggtaaaggagcttgccctccctgggccccccaccttggtgactcgccccaccacccccagccctgtccctgccacccctcctagtggggactagtgaatgacttgacctgtgacctcaatacaataaatgtgatcccccacccaaacttgtctgtgtctgcctcgctttgctggggtgtggaccggggtgtgggcaggggttgagcgcaggggacgcagctttctgcagatcccacccgggcctcccccaccatctggggatcactcctgaagataccaggtggatggaccctggaccatttctgtcttgagcatccatccgggcccgtgtcccaccttccctgggtctcatctgtgctctgtggaggccaagggttccctcccggggccaaagcccctgctgcagacagacccaggcccagagaaggacgggggcctgggcgctactacacaggctgctcctgcgtgctccccgcgcagcggtgcagagatcacccaaggccttaagattctgaacttttattttctggcatgaaaagtacaaataattaaacaattccatgtaaaagtctgttaccgcggccaggcctgtgatcccggtaataaatagtcta

SEQ ID NO: 11346 - DNA, 1150 bp, Homo sapiens
gtaggggattgggggttacaagattatatccctactctcccttgcaggttcctttgcccaaagactcaacaggtgcagcagatcccccccagccccacatcgtaggtaagtccgagagcatgggggcagccaagtctctaaccttacccaggccctgccaggttctcgctgggcctaggctgggctccctgggcctctgggccgagtcccttgcagggcacagggcatgtatgtctccacaccaggaatccagagtcccgatcagcaggccgccctggcccgccacaatccagcccggcctgtctttgttgagggccccttctccctgtggctccgcaacaagtgtgtgtattaccacatcctcagagctgacttgctgcccccggaggagagggtgagggcttaaagcaaagcatgtgttggggctggggagtgggctggcactaccctgagggtgcatgggagaggctggaggagggagaccgagagagccctggcctctgaccccgcctgcactccccaccttggagtaggaagtggaagagacgccggaggagtggaacctctactacccgatgcagctggacctggagtatgtgaggagtggctgggacaactacgagtttgacatcaatgaaggtaaaaactgggccaggtgcggtggctcacatgtgtgctcgtaatcccagccctcctacaggctgaggtgggaggatcacttgagcccaggagttgaggttgcagtgaactattatagagccactgcactccagcctacatgatagaccctgtgtcaaaaaaaaaaaaaaaaaaggcaaaaacctggacaggcaggacttccaaacattccaaacaccacccaggatgaggggcggcctctggggtcaaggggtaggcccaggctgagacgcagtccacttacaccctcgtcctccggccgcacacactcatttgccccaggggctccagacctgaggtcacccagccctgttggcccttgttcattccctccctcctacaactctgtgctggctactgggtgtcaccaggacaaacctagtccctcgagtcagcaagggaacaggcaaattacactttggggagcttaggagaggagcatgccttgagtggggggtcaggaggccttcct

SEQ ID NO: 11347 - DNA, 1456 bp, Homo sapiens
cccgctgttctccatcctgccccttgcctcccttggtgaaggcgtcatcacccacaggcccaggacgcattgctcaccagtcccttctcttggtctgtttcagggaccgtgcccgcaacaccggagtcatctcttgtaccgtgtgcctagaggaattccagacgcccataacgtgtatccttggaaacctgggctttttccagagggtggggagggggctggagtccggaccctgctcatctggcccactgtgtgccctggtgcagggccaaagccgtccagaggaacaggtgccacctagtgatttctgtggggtgagaagatgcagggcagggttccaatgccaatgatcgcccttgacctaagtggcccagatctgtcagaacccgtggatgtgtacagtgattggatagacgcctgcgaggcggccaatcagtagcgacacagaggacccgccccctgagcagccccgcgtactgtggatccagctgttcggttctggtccagagacattccaggggtccagggtgtgggtcctgggctgtcacagccgtgtgtgtgtgtgtgtgtgtgtgtgtgtgtgtgtgtgtgtgtgtgtgtgtagtgggtgtgcgtgtgggtgtgggtgtgagtgagtgtgggtgtgtgtggctgcacgtgtcactggggtggccgtgagtgtgtgctcacaggtacgcggtggtgtcgggttcctgggcctgaggggcctgaactgatctcacttggctccgaaagcctttgctgtgttccctgcagcccctggccccccagccttggggctctggctccccccggcggaattgggggactgtttcctgacatcctggacaagggaagcccactagaggctggaacaggacctctccagcctcctcaccagcaccgtgcccatctcaactggacttcccgctctccttctccaccttctagtgcccgtggccggggattcaaagccgccgttccccaggtccctgggctgggccctgacagggagccgcccccctccccatggtaaccaggaagcccgtttcatgttcagttgcttttgtagaggaagcaagggctgggatggggacagctgtcaatcacaagcccttaaataaagcagccagcgcacatcccttgctgtccgtgatgtcttgggttctgcgtctgcctggtcaccagaagaaggagaggggacctgaggctctgacgttcgggaggtggcctggtggcccatgtgaccagcccttcaaaccacccagcgttttattcagtcagtaagcattcagggtggtggagcaggcagacatctggccaggtgtttacagcagtcacaataggaaatgggggaggtgagacagaacaggtggtcagaggaggcttctgggaggggcaggctgagacagtgacaccgtagggccacctctagccagacgctgacctctggcct

SEQ ID NO: 11348 - DNA, 1106 bp, Homo sapiens
cagcaatagcactttagggtcttgggaaagcttctgctgttaaagagtgtggactcagtccatcatctaatggctgctgttccccaccttccctccctgtcctctttttgaaggactgctcttccaggggcagccacataatgaccaacctctgacagtgtatacagtcccccctccactcccactctttacatttggggcaacccaggcatcagtcacaacttcactataaatacacaggtctcaggccgccactgcgagaggagccgccaccatgtccgcgcatctgcaatggatggtcgtgcagaactgctccagtttctgatcaagaggactatgccgacctacagcaccaagcccagtaacttgaaggccccagctccttccgctacaacgggctgattcaccacaagactgtgggcgtggagccggcagccgaggacaaaggtgtggtggtggtcacgaagcagagatccggccagccgaagcctgccacctcctacgcgcggaccaccatcaacaagaatgctggcgtcacgctcagcagcatcagacacatgatcctcaagaacaagtaccgccccgacctgcgcatggcagccatccgcagggtcagcgccatcctgtgcagccagaagcctgtgatggtgaagcggaagcggacccgcgccaccaagagctcctgagccccctgcccccaaagcaataaagagtcagctggctttctcaccaccagcccctcatgcccgcaaaaaacaaaaacaaaaacaaaaaaacaaaacaaaaacacaggtaggtccttgcccaggatgtaaacccaggaccactttaaggaaggccctactcccatactccagctccccaattccaaggaattatcaaaaactgtcaactaaagtcagctgaacctagaaccagacttggtagggctcaacaatggaagaaacacagagcagcacagcacaaagcatgtgctcccagtaagcagcagctcaaactctaaatgggccatagagcaggtcagcaattcagaacaagagaagatagacccatgagtggtggtcaatatctagacatcttgttcacagcaccaactgctagtcacc

SEQ ID NO: 11349 - DNA, 1484 bp, Homo sapiens
ggggcctggttcctggatgtgctccttgaaaatttgtctaagtcaccctctaaagacaaggattattacaggtgagccagagaggcccgagaagggcaccccagcatagttgtcctgctgcatagaatctggccacaggatgaaccccctgaaaaccttaaaaagtctccggattgagaccatcctggccaacatggtgaaaccccatctccactaaaaatacaaaaaatttctctttcccttcagtgtgccactgaagatcctggtgtcgccatgggccgccgccccgcccgttgttaccggtattgtaagaacaagccgtacccaaagtctcgcttctgccgaggtgtccctgatgccaagattcgcatttttgacctggggcggaaaaaggcaaaagtggatgagtttccgctctgtggccacatggtgtcagatgaatatgagcagctgtcctctgaagccctggaggctgcccgaatttgtgccaataagtacatggtaaaaagttgtggcaaagatggcttccatatccgggtgcggctccaccccttccacgtcatccgcatcaacaagatgtcgtcctgtgctggggctgacaggctccaaacaggaatgcgaggtgcctttggaaagccccagggcactgtggccagggttcacattggccaagttatcatgtccatccgcaccaagctgcagaacaaggagcgtgtgattgaggccctgcgcagggccaagttcaagtttcctggccgccagaagatccacatctcaaagaagtggggcttcaccaagttcaatgctgatgaatttgaagacatggtggctgaaaagcggctcatcccagatggctgtggggtcaagtatatccccaatcgtggccctctggacaagtggtgggccctgcactcatgagggcttccaatgtgctgcccccctcttaatactcaccaataaattctacttcctgtccacctaaaaaatacaaaaaaaaaaaaaacaacaacaaaaaattagctggtcatggtggcgggtgcctgtagtcccagctactcgggaggccgaggcaggagactggcatgaacccgggaagggagactgggactccctctatcacccatgttggagtgtgctggcctgatcaaaacacactgcaacctcagaatcctgggctcaagcaatccccccgtctcagcctcccaaagtgttgggatgacttgcttgagctgccatgcccagcctctccctaatttttctaagccagcctgtagaggctgggaatcagccctggccattcagggaatccgtggagggtggcccgggcccagcaggctaccctctgactgctttgggccgagacacaagttggagtgagaccctgaccaggtggcatctggtccggtaggggaaggtccaggtccggcgcagtcccaccggtggtcgggcgccactttgtgatcactctgatatcgtccccggag

SEQ ID NO: 11350 - DNA, 1295 bp, Homo sapiens
ctgatggggcgggacctgagatcggccgggagtggggctgcgatgacgctgggccgagaaagccccagtctttggtgaagtcaaggattcgagtcaggttggggatgtggcagattggtctgcgagtggggccaggctttgaagcaacttggagaggagttgtggaaaaagggcagggtcttaagcatgtgggatgtcagagtctctcttggtcctgagagacgcaggccagacagtaggactagaaaccacgtatctagagtatgccatgagcaggtgggactgaggaattccgggtggggcaaggtcccagctgcatcagatggaatcagtgggcatgatctggtgtctggaaaggtggcttcggggactcattgttgtgcctttcactaacctgcccacccacttacctttccctagctgaagtggtgtgcttgggtcgctgtctactgctccttcatcagctttgccaactctcggagctcggaggacacgaagcaaatgatgagtagcttcatgtgagacttgccctacagaacaagtgactcttgagtaaggggtggggggaccccagcctggccatcctagactgacacctctctcctgtctcaggctgtccatctctgccgtggtgatgtcctatctgcagaatcctcagcccatgacgcccccatggtgataccagcctagaagggtcacattttggaccctgtctatccactaggcctgggctttggctgctaaacctgctgccttcagctgccatcctggacttccctgaatgaggccgtctcggtgcccccagctggatagagggaacctggccctttcctagggaacaccctaggcttacccctcctgcctcccttcccctgcctgctgctgggggagatgctgtccatgtttctaggggtattcatttgctttctcgttgaaacctgttgttaataaagtttttcactctggctgtcagcctcttctgttcagtggggtgttcctcctacctggcgggaagggctctagccccataggcctggtgtggggccccagtctggaggcttctggctgttcatttgcttacttcataaaccttgtgtcttaagtcaggtgctagggacaagacagtgacttctgccctctggcaactcaccagatggccctgctgacctagataatctaggctttggtttccttttttttttttcctttttaagaaagaaaatggtcttgatctgtcatgcaggctgagtgcagtggcacaatctatgttcactgcagcctcaaactcctgggct

SEQ ID NO: 11351 - DNA, 1208 bp, Homo sapiens
cagatggcgccactgcactccagcctggcgacagagcaagactccatctcaaaaaaaaacagaaaaagaaaaagactcccaaagccaggcatggtggctcacacctgtagtcctagcactttgggaggccaaggcaggaggatcacttgaggccaggagttcgagaccagcctgggcaacatggtaagaccccatctctgctattttaaaaaataaaaaatcaataagaggctcccaagacttgcggcctgaacacctggtaggacagagctactgaggggctcagtctgaggtagattaattttgcagtgtctaggaggcaattagaggcaggtggctgaaggtcggggagaggtgactgagggcttcaggcaggactgagatggggggtgcccagggacctcagaaaccagggtacagcccagccacagataaccactccctacccctcgctccacagggtgcgctggctctggccctgcctgtgggttccggtgtggtgcagtcgctggcctaccacccaacagagccctgcctgctgaccgccatgggaggcagcgtccagtgctggcgagaggaggcctatgaggcagaggatggagcaggctgaagccaggggacccaccaacaggaccaaggaccgagacacagacatggaaggacttcagataccatcttattctagagacgtagctgaccaaaaagtaggggaggggctgggtctgcaaattaataaatagaagagggggtaagaccttcctgggaccgcagccgctcagtcctcgttcttctcatgcatgaaggcatccatcttctgggcaaaggtttcagccacaagcagggggaagaccagggaggcgtcagcatagacctgggtaggggggaacctgggtaagccatgggacccacactcatcgtcccagagaccctatgccccacccagccagcgcttaccttgacgggctgtgcatccacccggatcttgccccaggagacagcctcgtctggtcgggcacctgagtcagagccatcaaactcctgggctgtgttgatgtaaacagcgtagtcggccccgttccgctgtggggaggcgggggcacggtgggcccagtcagccagtcacaggagacagacacagagggaggacaccgtagccaaacaggctgagaggtgtgtcccagatgaaggaagcccttcacagacattcg

SEQ ID NO: 11352 - DNA, 2680 bp, Homo sapiens
ggagactgccaggtaaggagactgcagctggcaagtcagcactgtcttgggggccgaaaggtcccaggccatgaccttcctcctccccctgcaggtttctgtctgcgtcgtcgtcggagggattactggggagtgcgctgcatccggaagtcgctgtgccctggttgaggggggttagggaggagtgagtgggactcaaatccagatgccttccccgtccgtccgtccgtccgtccatccgtccacttgccctcctggcaggtgggtggggccaccatgctcatcctacaaacggggaggtgggggggacttctggtgggcaagggcccctgggctctaatagggtcatctctggcagcccacttgggccagctacgtgggagggaggaattacacagctgaccgaatccggcttcggatgaggtgagggaggagcaggtcaggaggggggccctcgtagggacgcgtacactcacacggacacacatggccacacgcatgtgcgggtgccataaccggcgaggctgggccagccgctccaccatttccccgactgcatggagacagtagaattagtgaacccctgagttaacccgtaaggccttccgtgtaacctgcatctagagtttaagaagcttctgctgttttgccggaattggcggtgactggggagggctgggtgggtggggggcctcaggcgggatctcggggcggggggaggaggatggtgaccttgggagtcgccctgtcagcacgcacatgcttgggacccactccacacactccctgccagctttgttgcagcctcagctggtggtgtctccgtccttatcctagcctagctcgcagggtgagaaccactggagtggctggggctggccagaggtcaccgtttctccttcctgtgtgctccagtggcttttgaagacactgggttgggacctttttcctgaagagagctgggtgtagccagagctactggcacctaccccgagcatctctctctgtaagcagcttcaggggcagtccgtttctctgtgcttctgaaacccccttctcacgtttcaggccccagttttaactcaaggcctggggcaggggcgtttaattgatgatgacagaggacacaggtttttgccagcaaaaaggaaaaccaaggcttggtggaagggaaaggtggtgtgtcccctgttccctattccatctccctgggacttcctgctcatcatagtacccagtgagcccagagatcctactagactgggtcagcaattctagagaaccttccggaatagtctgggaacatggtcaaggtggaaggggctcccctagagagggtgggggtgtagttacttcccagttggccagaaaactgggccttgcagacccccttagcattttttccctttttttccttccctgctttctacttctttggggagccccttgtgttttggagtctgactggagtctcgcatcctggggcctgctccatccatccctcctgggcgccagaccctccatccaagccctgtgtctttccatagtcagggtcaggccctgcatctattccaaggggcactcagtacacattccataaattagctgggtgtccctgcacgcccaccccatgaaactcgagcaggtctctggaagccatttgttaaaaaaaaaaaaaaaagttttaaaaataccttttaattttctggtaattccagttctttgaagcatcctctgctgggtcttggggtgtgtggatggattggctgtctgatgggattggtaacccctcgctactcaagatggggggatacaaacaccttcagggaaggggagcctggttcttctcgttttcctttttttttttttttttaaaaaaaaactatttaattttttaatttatttttggttgttttttgcacaatgaagtttcagcttctcaaccttctcccctacccagggctgtggacccagactggccttgagccacagtccctctttccctcctcaccctcttccccctgcgggctcccgggtctgtccatttgttactgtgctgtgctggggattggcgccgaggtggcgtgagattccacttgtgtagaactttgttgagtaaagatcagtttcttgtgaactccttagtctgtggcttcctgtgtccttggctttggtagtgaagaaatgtcgggggcaccggggatacttgagagtgggaagatagacgaatgtgaaagatggaagattaaatttgtaacatatatgaaatgtgcagctcattctctgggacttcagctcactaagggtgagccattagtgtcacagcccaggttcaagatgcccctctgccgtactctaaactgagtggtaaggggtgaggccttgccgcactcttatcatcagctgaccctgggtcaaggttttcatagaaggttcagcccagccccaggccgagggtaatttaattaatattagttacaattactcaggcaaatgagaagtagtttcagctgtggggggaaaccacaatcttcagaataaaatctttcttttttttgagaccgggtcttgctccgtcacccaggctggagtgcagtggcgcaatcatggctcagtgcaacctcaacctccctggctcaaccagtcctcccacctcagccacccaagtagctgggactac

SEQ ID NO: 11353 - DNA, 1799 bp, Homo sapiens
aagtgatctgcctgcctcggcctgccaaagtgctggagattacaggcatgaaccactgcgcctggccctaacactgtgccactttatatcaaggacttgcacatccgtggatttttatatctgcagggacctggaaagaatcccccacggacactgagggatgaccgttggggcactgccatctcccatttgcagatgtgggctggaggctagggaggttaaggaacagctaggagctctagaactggaaagtggcagaggctggacatgcaccagggactgtgccccctgagctgtcctggttagaaggaggggagcctagccacactgatcttacttgaatccccaggactcgatgcctgaggtccggcagagctcctttgccctcctgggagacctcaccaaagcctgcttcatccatgtcaagccctgtatcggtacgacactcgccttgtccctaacccatgaccccagccccggcctcaagtgatggagagcaatacccggggatgactgtgaccacattgggatgtattcgtactgtctgatggggcctgctggactaggtcctgcagcttaccctggctggccctccttctcagcacccctgtttctccccaccagccgagttcatgcccattctgggcaccaacctgaacccagagttcatctccgtctgcaacaacgccacctgggccattggtgaaatctgcatgcagatgggtgagtgccctgcaagtggcaacacgcgccccccattagcctgttctcaacctgggggcgggagcctagctctgactgacagcttccttcaaggcaagtctcttgggggtcgtcaggggtggagccaagcagaaaggtcatttgtgattggcttctctaaagaggagggataggagggctgttctgattggaccgttttgtgtagttggctaaaagactcattcggattggttgggtgactttggctttttttttcctttgacttgggcagcgtgttgtcaccttagcgactccagagaagcctctgttgtttggagggtgtgggtctgtccctggttggccagggattctgggtggggattagccggagaaggtcttttgtttcctcactggtagtggttggccagtctctagttggaactggggcgagtagtgagtgaggtggggcggccccctggcccctgtgggtggcgggggctgtgcagggctctgactgggtgctcccccaggggcagagatgcagccttatgtgcagatggtcctcaacaacctggtggaaatcattaaccgacccaacacacccaagacactgctggaaaacacaggtgggcacctggcccggctgctgcctgcacccctgcctgccttctggaggtggggttctgggctgggaagggcatcagaaagagccttgtcaaggaaccaaggagggtgtctggaagtacctggaaggggtcactgggagaagccccaagaaagatgcagcctcaggctgggtgcagtggctcatgcctgtaatctcagcactttgggaggcagatcacctgaagtcaggagttcgagaccagcctggccaacatggtgaaaccccatctctactaaaaaatacaaaaattagccgggggtaatggcacgtgcctgcaatcccagctactcgggaggctgaggcaggttgcaatgagccaagatcatgccactgcactccagcctgggcaacagagcaagactccatctcaaaaacaaaacaaaacaaaaaaaaacaaaaaggaaagggaaaggaaagaaagaaagataga

SEQ ID NO: 11354 - DNA, 1307 bp, Homo sapiens
acccggggctttgggatgagaggcttctgttgtttcccctcctgtgcctgcctttacctggctctgtgaaatgagtctgggccagtgatttaaactctaagcctcagtttccctatatgttgtgtgcggctgactcttctctccatacggtgggtgtggctgggcccaatcaaactgccccctcttggttccctttccttgtaggctgcatgcagggcatggtgccctacctgcctgagctgatcccgcacctgatccagtgcctgtcggataagaaggccttggtccgctccatcgcctgctggacgctgagccgctatgcccactgggtggtcagccagccacccgacatgcacctcaagcccctgatgacagagctgctcaaacgcatcctggatggcaacaagagggtacaggaggcggcctgcaggtgaccctggacccctgatcccacagcccccactctcccccggccaccctctgggaagtgatgacacctgtgactgttgatgtggaactgatttatcgcgtattcgtactggctgatcctgagttgccctccccaactgcccatggcccagtgtcacctgccatggtccactgagcccccgcttcatcctccctcccaccagtgcttttgccaccctggaggaagaggcctgcacggagctggtgccctacctcagctacatcctggacacccttgtctttgcctttgggaaataccagcacaagaacctgctcatcctctatgacgccattggcaccctggccgactctgtaggccaccacctcaaccagccggtgagaccccagagcggctcccgcctcccgatccccgtgcccctgggcatccagtgacctggtggcaaccccgtgttgcacgccagggacgtggccgtgacctcgacaggcagacagacagacccggccccgccctcgccctgctcccagtctagtgggggagaaagacagttatgagacagcgtggtaagtgctgtgcttcgggaaccaggaggtggtaacccaggctcccggggggtggggtggggcgggcggtgcttggacaggtgagaagaatgaaggcctcgaggtctggccagatggcaggcctttcagggtcccatgagccacggtgaggcgctcaggcctcatcactcgggcaacaggtacctgagtcacagtctgccaccccgacccagggagcgcccatttcgtgctccctctccaggaatacatccagaagctgatgcccccactgatccagaagtggaatgagctcaaggacgaagacaaggacctcttcc

SEQ ID NO: 11355 - DNA, 1307 bp, Homo sapiens; identical to SEQ ID NO: 11354

SEQ ID NO: 11356 - DNA, 1101 bp, Homo sapiens
ctcggtgcctgggtggcttgccgcccacagggttagaccctgcttcttaagaaaaaaaaaaaaaaacctttctctggaggcaggagtggtatcatttatatcctaatcatagcggcagagactagattccgataattccccagagggaaatggatcaatttgcacctagcagtaccatcatgctctgcagggtctgctctgtggctgattggggggctggtcactctgttggcacctgtttgcctcctccccaagctgtgcctccccccaacttttgccacggcccctgcatccccataaacagtccctctctgtgcaggttgatccccatcttggtgaatgggatgaagtactcggaaattgacatcatcctgctcaaggtcaggcagggcccacccagcatgggtgggcatgggcgtgggtgtcgcggctgtggtccccaaagtacttaacagtctgcctgtcccccagggggatgtggaggaggatgaggctgtccccgacagtgagcaggacatcaagccacgcttccacaagtcacgcacggtcacactgccccacgaggctgagcggcctgatggctccgaggacgcggaggatgacgatgatgatgatgctctgtccgactggaatttgagtgtgtgcccctgcctgggggtggtggtggggtggcaagccctggactccctcttgggaggtgactagaagctgaggcagaagctgattagaagctgatcgtggccgggcgcagtggcttacgcctgtaatcccagcactttggaaggctgaggcgggcggatcacgaggtcaggagatcaacaccatcctggctaacacagtgaaaccccgtctctactaaaaatacaaaaaattagtcgggcgtggtgtcgggcgcctgtagtcccagctactcgggaggctgaggcaggaaaacggcatgaacccaggaggcggagcttgcagtgagccgagatagcgccactgcactccggcctgggcggaaaaagtgagactccgtctcaaaaaaacaaaacaaaaaaaaagaagctgatcgtgaagattctgagcatgatctctgatcctgggagtgcagtcaaggag

SEQ ID NO: 11357 - DNA, 1203 bp, Homo sapiens
gcttttggaggccaaggcaggaggattgcttgaggccaggagttttaggccagcctgggcaacatagtgagatcccatctctacaaacaattttaaaaattagttgggcgtggtggcatgtgcctgcagtcccagctacttaggaggctgaggcaggaagatggcttgaggccaggagtttgaggctgctgtggactattgattgtgccacagcagtccagcctgggcaacagagctaattctatctcttacaaagaaaaaaaaaaggaggggggatgtagagggcgtacatgggctagggaacagaaaggcagcactgggggtgtccagtgggagggggaggtgctaggcagcccctgcccagcctcaggcagcgtcctttcccggccgccccaggcattctcatcaccaccatcgcttccaagggtgagctgcagatgtggcccgagctgctgccccagctctgcaacctgcttaactcggaggattacaacacttgtgaggtaggcaagaagccatggatggccagagcgagtactggggggctgggaccaccacccaccacccacgtttgtctctctgcccctctgcactcagggagcctttggagccctgcagaagatctgtgaagactcatcagagcttctggacagtgacgccctcaacaggcccctcaacatcatgatccccaagttcctgcagttcttcaagcactgcagtcccaagatccggtgggtgcagctccctgggggcttccagggagcctggagtgggcagggtcagggtgacccacgtgtctgctccccgccaggtcccacgccatcgcctgcgtgaaccagttcatcatggaccgggcccaggcgctgatggacaatattgacaccttcatcgaggtgggccgctgggctgggggtgggcagggcgaggactgagggcccctacaactgaccctgttcctccctgcagcacctatttgccctggctgtggatgatgaccccgaggtgcggaagaatgtgtgccgtgccctggtgatgcttctggaagtgcggattgacaggctcatcccccacatgcacagcatcatccaggtgtgcatggtcaaggccagcccaggcgggcaggcagggggccggtggcaggggtcagggagccacccccagccaggccaggcctcagcttctcccccctaccacagtacatgc

SEQ ID NO: 11358 - DNA, 1202 bp, Homo sapiens
cagcagtttgggaggccgaggcgggcggatcacctgaggtcgggagattaccagcctgaccaacatggagaaatcccgtctctactaaaaatacaaaattagctgggcgtggtggcgcatgtctgtaatcccagctactcgggaggctgaggcaggagaatcgcttgaacctgggaggtggaggttgtggtgagccgagatcgcgccactgcactccagcctgggaaacaagagggaaactccgtctgaaaaaaaaagaaaaaaaaaaaacgaaacaaaaaaacccgcgagacgggggctcctccccctagccccgccccttcgggttggttccctcattcgccccgcccccgctgcgggcgctggagggcctgaccgctcttcccggcatgcattgttcgggacgaggcgagtcgggcgccaagcgcggggccggagcggccttcccggagtcctttgcgcggcacctggcgacaaaatggctgcccgagggagacgggcggagcctcagggccgggaggctccgggccccgcgggcggtggcggtggcgggagccgttgggctgagtcgggatcggggacgtcgcccgagagcggggacgaggaggtgtcgggcgcgggttcgagcccggtgtcgggcggcgtgaacttgttcgccaacgacggcagcttcctggagctgttcaagcggaagatggaggaggagcagcggcagcggcaggaggagccgcccccgggtccgcagcgacccgaccagtcggccgccgccgctggccccggggatccgaagaggaagggcggtccgggctccacacttagcttcgtaaggagccgtgggggtgggggcgggcgccacggcctgtcttggcagcgggagtcggggcccgtgaagggggatcgggaccgaagtccactttccgttctgaatgaggggcccgtccgggtcacccgctgagggtgtggaacttggattcccgacaactggggtctaggggcgggagtggggactccaggagcttgcccgtgggaactgggagctgaggaattgcctaggaatcagcactgtggagaatgaggaaacgtggatatcaggattcctgtttgagtggtacccggaccttgggtcatgggaccaccactaattgtgaggaaagggagtaaatttaagtctggactctgagctatatgtgttagactcagac

SEQ ID NO: 11359 - DNA, 1204 bp, Homo sapiens
ccagctactcaagaggctgaggcaggagaatcgcttgaacccaggaggcggcggttgcagtgagccaaaatcacgccattgtactccagcctgggcaacagagtgagactccatttcaaaaaaaaaaaaaaaagaaagaaagaaatggaaaagctagtatttgaccaaccccaggaatctgcttatgggcctgagcctttaaccactgggaggtatcaggagtcatccctcgggtgtttagtgaacccccaacccaggaggtcgccgcaggtaagctatgagccctcccacatcccccctgcagatgtgcaacatgctgggcctgggggacatgaacgcagaccagctggcctccaagctggaggagacgctgcccgtcatccgctcagtcagcgaacagttcaaggaccctgtgagtggtggtctggctggcggtgagaggcccgggggctgaggacaggggcagaccccgcccctcactgtcctctctcgtgccctgtaggagcagacaactttcatctgcgtatgcattgctgagttcctgtccctgtatgagacagagaggctgatccaggagctggccaagtgcaagattgacacacacaatataattgtcaaccagctcgtcttccccgaccccgagaagccctgcaagatgtgtgaggcccgtcacaagatccaggccaagtatctggaccaggtgtgcccacccacccagcactggctcagcagaggcacctctgcccctttattctctgatcttttgctccaccatctggccctctgccctctagcctcctgccctttgcccccacatttcagatccttcacccttattccggccatagaggactgtggctggcctggcctaggtccctgtgaccctggagagcagggggtctagcccagtgatctctgaccatagtgatgcagctcccacttatgacaccttaagctcctgccctatattctctccctgactctggaagctttctagctttaccgcttctattgatccacactctgtctctgccttcctgccccctgaccactgccttctaccctctgccctggctgcagatggaggacctgtatgaagacttccacatcgtgaagctgccgctgttaccccatgaggtgcggggggcagacaaggtcaacaccttctcggccctcctcctggagccctacaagccccccagtg

SEQ ID NO: 11360 - DNA, 1151 bp, Homo sapiens
accccagtatgtcccagggggtttcaaggccaaagtcacctggctatgacttcctcaacctgtaggtcatgcagaccatggaacccaagcagcggccagctgcgggggcacctccagaactccattccctgaggacacagctccgagaacgggatgtccgcatccgacacctggaggtgggtgtcctcgtccctttacgctgcctccaacgtatctaggcccctgacacttgcctccttgacagatggactttgagaaaagccgaagtcagcgggagcaggaagaaaagctgctcatcagtgcctggtataatatggtaagtgtggggtctgggctctaagatctcatgggtagaatattggtgggggggtcctgtgagctcacctgaccccaaccacacctcctcctgaagggcatggccttgcagcagcgagctggggaggagcgggcgcctgcccatgcccagtcattcctggcacagcagcggctggcaaccaattctcgccgtggacccttgggacgcctggcatctctgaaccttcgccccactgacaagcactgacagacctcacaatcaagccagcctgggctccacccaccctggcttcctccagctcacatggcgcccagcactgggcttcagccaggtgctcgagagctttgaggccatgatctctgctcttccctctcccagattggtggggagggagggcgggaggtagatataggcctgttctttttagcaatgtgattcttgttgttgattctctctctggagttcatgtgctgcctcaggagactctgattttatatttgagaaaaataaaggcgttcaatctgccctggctgtgctctgggcaccaaggtgagggagagaaagtgggccagaggcttagcccattgcttttaagaaaagcttagcggccaggtacggtggctcacgcctgtaaccccagcactttgggaggctgaggcgggtggatcacctgaggtcaggagtttgagaccagcctggccaacatggcaaaacccctcctctactaaaaatacaaaaattagcagggcatggtggtacatgcctgtaatcccagctactcgggaggctgaggtgggagaatcgcttgaacctgggaaacagaggttgtagtgag

SEQ ID NO: 11361 - DNA, 1190 bp, Homo sapiens
tcaatatatccaagagtaaaccgagccttagagaaaagtaaccagcccaaggggacgcctccagtgcggagctgggtggagatttgcagcccgccgaggaaggtccctttgcagccagcaggagaagtagggcaacggggagcctttgggcatcgtcatccccgccgcctgaggttaccctttagatgctgcagcctcagctgctcccagctgtcaccttcgccctgctgccctaagtactgatagtcctggtagaccagggcaggggtcgccagctgcaggagtagcagaggcgccagcagcagcgcccccggggtccgcgccatgctggactccaacggcccccaacgcgctcccaggcggagtcgtgcgcggagtctgcggcgggcgcattacccacgcgggcaggtgcagtggtcccggccgaaggcaacgcgtctccccccgccgcccgcaggcgcatggacccggccgcacgctcccccgcacctgcgggcgcagtggacccgaccgctccgctcgtccgctccctcccccgcgccgtgcacgtcttggttcgggccgggcataaaaggcttcgcggcccagggctcacttggcgctgagaacgcgggtccacgcgtgtgatcgtccgtgcgtctagcctttgcccacgcaggtatgaacacccggagtgcacctggcgggaggacccccttcaggctgctttggcccgatcctgactttagtgctggccgcctttgctttccatccgctatagtggcctcctttgtccttgcgggggaaaccgaggccacagccttgcagcgcaggcctgatcgcccgacttcccgccccctgctcgtgcgggcctcactgtctccttctgggctgggggcttgcgacaccgccctccggccgactcgctcgtggggtgctggtggcagtggctgggtcactcgtgctctggtcaggagagcgggtctccggcagcctccgggcctcgtagaccgggtacccgggagggtgagggttagtgctgtcgcctccgccgtgctgactcagtcatagggcccagcacgcagcgcgaccttgggttgggaggacaaagtgtcttcccgggcgcactgaccgggcgggggtctcagctttcagtcatggcctccggtaacgcgcgcatcggaaagccagcccctgacttcaaggccaca

SEQ ID NO: 11362 - DNA, 2415 bp, Homo sapiens
agatggagtttcgctctgtcacccagcctggattactggattacagtggtgcgatcctggctcactgcagtttcctcctcctaggttcaagcaattctgccacctcagccttctgagtagctgggattacaggggtgcaccaccacgcccagctaatttttgtattttttagtagaaatgggatttcaccatgttggccaggctggtcttgaactcctgacctcaggtgatccacccacctcggcctcccaaagtgctgggattataaacgtgagccaccgtgcctggcccctttgtttctttttttagagacagggtctcactgtgttgcccaggctgttctcaagtgatcctcttgccttactgaaagcccccttctttccctaagccacaatttcccagtctgtaaagtggggctgttgtcccaccctctgaaagtggctgtggagatgaaatgaataaacctcagctagggccagcttggtgcctgcctccttgtgtgtccttattcagccctgtctcttgggtcttagctgggcagggccctgttctctattgtcctgctttcccctcctactaccaccaggatatggctgtgctggggtttcgtctgtggcctatgggctcctggcccgagagctggagcgggtggacagtggctacaggtcggcgatgagtgtccagtcctccctcgtcatgcaccctatctatgcctatggcagcgaggaacagcggcagaagtacctgccccagctgggtgagtggctgcccatggggcctggtggaaggaagacagtctctgaggtctggaactcaagggtggggctgtcccctgagcctattctgtccctatctcaaagatagcataagtggccacctggacccccgccagaccctgggcttcacctggagatctgatccctggccagcctgactgtccccctctgtgaccaccgtcatctccctatgctttctgtgttccccagtccagcccaaagtttaaagtccaccaggttcctgctggccatttgcagtggctcacacctataatcccagcactttgggagggtgaagtgagaagatcccttgagcccaagagttcgaaaccagcctgggcaacgtaaggagaccccatgtctattagaaaaacaaaaaaaggaaagagcctatgtgacctgcgctaagtggacgttggccctcttccgtggtgtctcggaggtgttcagctgcttcaagatgaagctgaacatctccttcccagccactggctgccagaaactcattgaagtggacgatgaacgcaaactttgtactttttatgagaagcgtatggccacagaagttgctgttgacgctctgggtgaagaatggaagggttacgtggtcggaatcagtggtgggaacaataaacaaggtttccccttgaaacagggtgtcttgacccatggccgtgtccacttgctactgagtaaggggcattcctattacagaccaaggagaactggagaaagaaagagaagatcagttcatggttgcatcgtggatgccaatctgagtgttctcaacttggttattgtaaaaaaaaggagagaagggtattcctggactgactgagactatgatgcctcgtcacctggggcccagtacagctagcagaatccgtaaacttttcagtctctctaaagaaaatgatgtctgccagtatgttgtaaaaaagcccttaaacaaagaaggtaagaaacctaggaccaaagcacccaagattcagcgccttgtcactccacatgtcctgcagcacaaacagcggcgtattgctctgaagcagccgcatattaagaaaaataaagaagaggctgcagaatatgctaaacttttggccaagagaatgaaggaggctaagaagcaccagggacaaatcgtgaagagacgcagactgtcctctctgcgagcttccacttctaagtctgaatccagtcagaaataagattttttgagtaacaaataagatcagattcgcaaaaaaaaaaaaaaacccacaaggccctgtgtgaccaggcctctgctgacctttccacctcatctctggccactcatgtgatcctcccagccagacttagctacttgaaattctccagaagtaccaccagttctttacacatctgttccctctcccagcactgctcttccccacagcctcctcctgcttaactcctcacacccttccagtttggccaactccttcctgattccctgggtccccctccccatcttggcattgtgatcatgactttggggtaacctgtctcttgaaagcagggccagatctaacttagttatgaggtctgactcaggggcgagggtaattttttttttctttttttgagacaaagtcccgctccgtcccccaggctgaag

SEQ ID NO: 11363 - DNA, 1203 bp, Homo sapiens
ctcagttctgggctaagtactaccacatacgaggtagtccacacaggttaggtgccaccttgacttactaggtgaattccttttccctctataaaaagggacggtacctacccagccttcctttgaaattttaaaagtagctgacatcgccaaaatgaccatctctggagcccaccacccaccgcctctcctagggcaagagagaataccagaagggcagagggttctgtaacccagagacggggaagtccaaggtcacacagcccgctcgaagtgaggctagataaaactcaaaacagggcggtgcttctgaccttgagataatcaattttacccctctggtcaaccagacgccattgatggagccagggtggaggtgggaactgagtcccatgcaccttttgcggctccgtcgccacactcaagatgacgacacattgagccctgttctacagttagacacattcaagatggcggtacacactccggttccggttccggtggctcagctccccccgcccacccgggcccggacacgctgagcacactggaaggagtcatggcggatggtcaggtggcggaactgctgctccggcggctggaggcgtctgatggcggcctggacagcgccgagttggcggctgagctgggcatggagcaccaggcggtggtgggcgccgtgaagagccttcaggcgctgggcgaggtgagccgggcccgtgatgccggaccgccttgcccttgcacctacagtccccttgccacgggcgctctacgtccaagccaaattccctcaggcctagtttggggtagctgtatatgtgtccactccgggatgtgcgggcgggaagtgggacgagtgagggcccagacgcacggatgttcctcatgcaataaacgtttattgaggcacggtcagcgtgggtagagggtacgatgatggacgaggaagtcgcggttgctgccctcacgcaggttgcgacgtaataggaaggtgcttcaagaaccagagtgatgggggaaaacaggggacccagctgtgacagctgacccagccttgggggtcagggagagcggcctggtgcaggtgacggctgagtctgttctctgttgaggaaagtgatagcactttagagatcagtggccgggatcttgggggatggcaggcggcaagggagaccagcatagctgtaattgcaaagc

SEQ ID NO: 11364 - DNA, 2885 bp, Homo sapiens
tgagctctctcccatcccaggcaggggtgggggagcagcagtggggtgctggttctcaaatgcaagataagagctggctaagaaagccttgcccagcccctccacctagagggaatgggagggagagaagctgagggcagggtcccggtcccgcgtggagacagctgcgctcccgcggtttctttaaacgcccagatgggcaacgacgcgcgcggacgagggcggggttgggttcaggtctggtcacatgacctggcctgaggtgctcgcggcccccaccccaccagtgggcgtcccccccacgcgtggtcgaccatcattggtcggtggtgaggccaatagaaatcggccatctgggaacccagcgttccgaggcgcagcctaacatagtgaaccgacgaaggtccaatggaaaaagacggccatgggcatagaccaatgacaaagtggcaggggcgggcccaagggctgggtcaggttggtttgagaggcgggtgggtataaaagtgcaaggcgggcggcggcgtccgtccgtactgcagagccgctgccggagggtcgttttaaagggcccgcgcgttgccgccccctcggcccgccatgctgctatccgtgccgctgctgctcggcctcctcggcctggccgtcgccgagcctgccgtctacttcaaggagcagtttctggacggaggtaacgcctggtcccgcctcgaggccgccccgacgacgcggccggcccccgatcctggatctgcgttgtcgcccgtaattaccgtttagaggtccaacacggtggcctcccgggactagagccgcgggcgatttctcttctgcgtccctggggagcgcggagggcgtagcggcctcccgcggcgggagttagggttagcccgaggatctctgaaggcacccgacgtgtcaaactagaggttggaatggggagtgtcggggatctcctttcctgtccccagcagcttgtggctctcggcagatgtttggtgtggggggggattagcacagccgctctgacctacccctctaatcccccacttagacgggtggacttcccgctggatcgaatccaaacacaagtcagattttggcaaattcgttctcagttccggcaagttctacggtgacgaggagaaagataaaggtaagagcctaggagtgggtgctcagatccgggaggacttcctggcagaagtccttgtctgtacacacacagccgggacagtccccttggaggaggacaggtggaggaagtgggggagtcttctctattctctaagtcgagggtcctcgcgagtcaaggcccaacggtgacctcactaccgtcccgtctcaggtttgcagacaagccaggatgcacgcttttatgctctgtcggccagtttcgagcctttcagcaacaaaggccagacgctggtggtgcagttcacggtgaaacatgagcagaacatcgactgtgggggcggctatgtgaagctgtttcctaatagtttggaccagacagacatgcacggagactcagaatacaacatcatgtttggtgagggcctgcttcctggtgctgatctctgtcccattagttagagggagacccagaccccattgactttcttaataatgattttttttggaaggggagctaaaagaataagtcccagcaacaatttattgcattatgatcgcagatctaggctgttaatttaatttgcgtgtttgtatatagttatttcccaatcttactaatgaggattttgagttctagagcactgattttttttttttctcctttaaacttaaggctccacccacagcccattcaggacagaatcagggtctgagtttctcttctcagccttgacagacccgagttgaagaaccaggtcttccttttataaagaggggtgagagcctcgagatgatgggtagtctctgactcttaactggatctgcttcacacctaggtcccgacatctgtggccctggcaccaagaaggttcatgtcatcttcaactacaagggcaagaacgtgctgatcaacaaggacatccgttgcaaggtgtgcctgggggtggtggcaaatggctgtcatggggagattcagaggtcagcctcattggggggtggcccccgctcaccttcttccttcttcaggatgatgagtttacacacctgtacacactgattgtgcggccagacaacacctatgaggtgaagattgacaacagccaggtggagtccggctccttggaagacgattgggacttcctgccacccaagaagataaaggatcctgatgcttcaaaaccggaagactgggatgagcgggccaagatcgatgatcccacagactccaagcctgaggttggtgtttgggcaggggctctgctctccacattggagggtgtggaagacatctgggccaactctgatctcttcatctaccccccaggactgggacaagcccgagcatatccctgaccctgatgctaagaagcccgaggactgggatgaagagatggacggagagtgggaacccccagtgattcagaaccctgagtacaaggtgagtttggggctctgagcagggctggggctcacagtggggagtgcaccaaccttactcacccttcggtttccttctcccttctgcagggtgagtggaagccccggcagatcgacaacccagattacaagggcacttggatccacccagaaattgacaaccccgagtattctcccgatcccagtatctatgcctatgataactttggcgtgctgggcctggacctctggcaggtgagacttggaggaaaaaggaggatccctggggtacctcaagtgcataagatcacccaagaggaaagggacagggt

SEQ ID NO: 11365 - DNA, 1763 bp, Homo sapiens
tcattctcctgtctcagcctcccaaatagctgggactacaggcacttgccaccacgcctggctgattttttgtatttttagtagagacggggtttcaccgtgttagccagggtggtctcgatctcctgacctcgtgatccgcccaccttggcctctgggcgaggattacaggcgtgatccacctcacctggcctctccatctttttaactgcagtgtcagcggtgttccttgtcttctctgcagatgcaggcagcagaatatagtggttataggaacacaggtggaaaccctgtccaaagcaagggctatcgggtatcacctctgaccatccttcccattcatcctccaggtcaagtctggcaccatctttgacaacttcctcatcaccaacgatgaggcatacgctgaggagtttggcaacgagacgtggggcgtaacaaaggtgaggcctggtcctggtcctgatgtcgggggcgggcagggctggcagggggcaaggccctgaggtgtgtgctctgcctgcaggcagcagagaaacaaatgaaggacaaacaggacgaggagcagaggcttaaggaggaggaagaagacaagaaacgcaaagaggaggaggaggcagaggacaaggaggatgatgaggacaaagatgaggatgaggaggatgaggaggacaaggaggaagatgaggaggaagatgtccccggccaggccaaggacgagctgtagagaggcctgcctccagggctggactgaggcctgagcgctcctgccgcagagctggccgcgccaaataatgtctctgtgagactcgagaactttcatttttttccaggctggttcggatttggggtggattttggttttgttcccctcctccactctcccccaccccctccccgcccttttttttttttttttttaaactggtattttatctttgattctccttcagccctcacccctggttctcatctttcttgatcaacatcttttcttgcctctgtccccttctctcatctcttagctcccctccaacctggggggcagtggtgtggagaagccacaggcctgagatttcatctgctctccttcctggagcccagaggagggcagcagaagggggtggtgtctccaaccccccagcactgaggaagaacggggctcttctcatttcacccctccctttctcccctgcccccaggactgggccacttctgggtggggcagtgggtcccagattggctcacactgagaatgtaagaactacaaacaaaatttctattaaattaaattttgtgtctccctcctgtgtctccttctggggaaagacagacttaaggaaacccagcagtggtctttttggggggggggggggtttccagtatatctcctttttcagctattgctagagaggttgctgagtgttccacaagattccagggacccttatttaccccataaccctcaaaaccaacgggggaatggctgttgctgctgtaaatactccacatactaacttactgaatccttgaacctaactggtaagttttggttctgcttatttatttatttttaagatagactctcgctctgttgtccaggctggcgtacagtggctcaatctggttcaccctgccccttaaactggcctttttcatgcttctattcctttggggtcctgtggctcagcccaacccctctgggatgcctccaggactggtagatccaagggagaattctgtatttaatgtagtgaggcttt

SEQ ID NO: 11366 - DNA, 1789 bp, Homo sapiens
gtgtcacagcccactctccctcccctgcagggagcagcacatcgcagagtgcatggccaagatgccacagatgattgtgaactggcagcagcagcagcgggagaactgggagaaggcccaggctgacaaggagaggagggcccgactgcaggctgaggcccaggagctcctgggctaccaggtggacccaaggagtgcccgcttccaggagctgctccaggacctagagaagaaggagcgcaagcgcctcaaggaggaaaaacagaaacggaagaaggaggcgcgagctgctgcattggctgcagctgtggctcaagacccagcagcctctggggcacccagctcctgaggctttgtcccttcccaataaagcctgctacctggcagtacccctgaagagatctgcgtcctctcaaggtgtgcctctctgggtcccctggttcctcccccaatacttaagagctggggaatcccccacttggctgtactcaaaaggggacagggactctaggccctgctgactaactggggcttcagtgggaggaaaaggggggtgtacaatgggcaaataatggagaagcagatggcagaagagaagaaggcttctgtttaccaacattcatctccagtaattagccaattacaaggctggtggggggggaagtatagccaaaacagactgtggtgatgatggtgggggccggggagaagcagtccttgtaacgttgggctggggtccactgcctggaaatgacacactgggggaggagacaccggaagcctcaatctgcagggactcacagactcctctcccccttccaggcacccgtcaccatgcctgcctgtgcccagccagccccccaagacccagacaggtgggcgcggggagccccagcaggcacagaccatagggctagtttttaaaactttattcacttcaaaacctttatcagagacacggttctgttctggggtgggggtggccttgacaatgagctgatgttagcccttctccaggctggaggccaaggccagactggggagggggccttgggcctttcaggacttgccctagatggaaagatttgggccactccaatggaggatcaaagttggggctccagcttcccctcatcctagaagaggatgggggggggtcctcaggggtttttcggaggatggagaggcaagcagccgcctttccgtctggctgcagagagctgggacagaggccaagaggggcccatctgtcgcctcccagtcctgccagcttctctgagcaggctgggctggggaggaggacggggggacagctgtctggcccgggagatgggaacaggggccactttaggaggacaggaagctggactgtttgcttgtttttttaagatttttgatttttttttccatttcttaaataaacatgaatatatatatattttttcttttataaaactttcatggaataagggtagggtgggggcttcggtggcctggcttcctggcatcactcgtcatcaaagttctgactcaggaggaagttggcagccaagttctcatttttttcacacgcgaaataggcctggatgaccaggctctctgggaagcccagggccttcaactgtgggaagataggttaagtgtgagcaggagagggtaggggtcctgcccacctgcagtcacccctcagccaggcctcttaccctctctatagcttctttctcctgcggcgtcacctggatgtagttcatctgcggggcctcctctcctatggcgcccacctccccct

SEQ ID NO: 11367 - DNA, 1142 bp, Homo sapiens
aatgagaacttggctgccaacttcctcctgagtcagaactttgatgacgagtgatgccaggaagccaggccaccgaagcccccaccctacccttattccatgaaagttttataaaagaaaaaatatatatatattcatgtttatttaagaaatggaaaaaaaaatcaaaaatcttaaaaaaacaagcaaacagtccagcttcctgtcctcctaaagtggcccctgttcccatctcccgggccagacagctgtccccccgtcctcctccccagcccagcctgctcagagaagctggcaggactgggaggcgacagatgggcccctcttggcctctgtcccagctctctgcagccagacggaaaggcggctgcttgcctctccatcctccgaaaaacccctgaggacccccccccatcctcttctaggatgaggggaagctggagccccaactttgatcctccattggagtggcccaaatctttccatctagggcaagtcctgaaaggcccaaggccccctccccagtctggccttggcctccagcctggagaagggctaacatcagctcattgtcaaggccacccccaccccagaacagaaccgtgtctctgataaaggttttgaagtgaataaagttttaaaaactagccctatggtctgtgcctgctggggctccccgcgcccacctgtctgggtcttggggggctggctgggcacaggcaggcatggtgacgggtgcctggaagggggagaggagtctgtgagtccctgcagattgaggcttccggtgtctcctcccccagtgtgtcatttccaggcagtggaccccagcccaacgttacaaggactgcttctccccggcccccaccatcatcaccacagtctgttttggctatacttccccccccaccagccttgtaattggctaattactggagatgaatgttggtaaacagaagccttcttctcttctgccatctgcttctccattatttgcccattgtacaccccccttttcctcccactgaagccccagttagtcagcagggcctagagtccctgtccccttttgagtacagccaagtgggggattccccagctcttaagtattgggggaggaaccaggggacccagagaggcac

SEQ ID NO: 11368 - DNA, 1216 bp, Homo sapiens
aggcaaacatgccgacatttgctgacacacacaaagacatacatggccgcacacacggatacacccgctctcagacacgcagcgacctacgcccattttcctggccatacaagcagccgaacgttcctgtacttctgtatctgcatagctcccccaacactccttccatgggagggggatggctggggcttccctgatgcccccttcccccagctttctctctgggtcactctggccacccctctgtccctgcgaagctatagctctctgtccctgctccggcctggtgccctgttttcatggcacttggcattttctctccggctctggccctgcctgattcatgcccactgctggggtgggaggtgtgcccaggtgtgggccgggatggggtagctcatgagatgagctggggctccgtgagatgttttgatgctgggccgagctcagagccgagggctctgccgggaacagggtgctccagtctctctagggcctggaatgtcttgtgtagcctcaagagctcccagacggaggctgcgggagcggagtcaagggctaggctttgccgtcagacagaaatgggttcgagctccagctctacatgttctaatcttgcgacctgaagcacaggattttcctggcctgtaaaatgggcaaaaaccagtgtctatctcttgggctgtacttaggttcaatgtggtgcctggcacatagtgtgtgctccataaatggtaattgttgccaattgttggttgtcaacctcccagaccctcccagctgagagagggatgcctctgaggggtagaagacaggatcgagcacctcccaaccatagatatccaagtggactgcctggaggaggaggaggcaagaggagagtttggaaggatgagagtttgcacatggcccagctcttttacctttggatgggggcctgtaggccaagcagagggtggcacaacttcaagataggggagagatggtgggggagagtggggggcaggaggggagagacgaggcctccactgttccatgaggaccagataccctggttgggggccctgagtcctggtataagagtatgtgtgcacgcattcatccaaatgtatgtgggacaaagagacccggtgcatctagatgatgacttcagggacgtccccaagctccagaactttctgtgtctgcacctgggcgttgtcacctggacccgcca

SEQ ID NO: 11369 - DNA, 1185 bp, Homo sapiens
cctcactcgcttgctcgtggatgtcattttctgtcttcttgggggcggccaaaaatcgaccggtgtcggggaccagaggcggccccgcacgcccccgcgtgtgcgtccacgggcgtctgtgcagacggacactgtgccggggcgagctgacaggagttcacggctgcgatagaacatggagatgtcatgggcgcgacagagcctggcggggataccagcagcgtgtgtgtgtggacggcaacgttgtctgtgcgcgtgtgtgtgagtgagtgagggagagagagagagaataggtgtgtgtagaggctcccggtgcctctgtctggctgctgaggctgagatgggagcaagtggctggcgaagctggtggtggcttcaaaccacactttcgtagaacaatcgcaagagaaaattgttggggggagggaggaggaggagaaggcggttttccttgtgcccccccttctaacgctgcttttctccttctctctttccccctcatcccgtcttcccctcctcccgtcctccctcgccccgcatgctcccggcttgccgcctgcaggatgagttccacccgttcatcgaggcactgctgcctcacgtccgcgctttctcctacacctggttcaacctgcaggcgcggaagcgcaagtacttcaagaagcatgaaaagcggatgtcgaaggacgaggagcgggcggtgaaggacgagctgctgggcgagaagcccgagatcaagcagaagtgggcatcccggctgctggccaagctgcgcaaggacatccggcccgagttccgcgaggacttcgtgctgaccatcacgggcaagaagcccccctgctgcgtgctctccaaccccgaccagaagggcaagatccggcggattgactgcctgcgccaggctgacaaggtgtggcggctggacctggtcatggtgattttgtttaaggggatccccctggaaagtactgatggggagcggctctacaagtcgcctcagtgctcgaaccccggcctgtgcgtccagccacatcacattggagtcacaatcaaagaactggatctttatctggcttactttgtccacactccgggtaggtcgttctcaaccatttttccctctcattttattttccttgctggcatttgttctgtttattgttcctctaatttccaagcgataac

SEQ ID NO: 11370 - DNA, 1176 bp, Homo sapiens
gttacatgctgtcttccagagtcctctctaggtctgtctgcaccctcagtcaagaatggaggtgaaggggggtgggttcaacaagaagaagatccctagaggagactgggaaggtctgagctggcttcctctgtactctctccccttcgctagcttccctacctggtctcaaaaggactctgctcattcttcactagactctgagcctctctctgtgaagctgggcccttgagaccagtggttctcatcctgggaggattccatcccactagggaacgtctgacaatgtctggaggcgtttttggtcatcaaaactgggggtgggggttttgctgctggcatcttgtaggtggaggccagggatgctgctaaacatcctgccatgcacagaacaatcccctacacagaatgatgagcccccagggtgagaaactgctttcaaccatgaggccacggggtggggcaacctctagagaaataccaggaggggctgcggccatcccactgtggggcaccagaggcttggcaccccctctgcttcccaccgccataccacgggctctgctgctgactctcacagcacccctcctcaccctcacctccactcccttccttcagcctgctctgccctccctggaagatcaggaggcaagaaaacagatgggtaatgccccccgacagggggacaactggtgggaggctcaccaggtgaactgagaaggggacaaaaagactctgggctgcccttgctctgggtcaggatcccccgcacccatacctgcatccacatcgttgggccacccgctggactggctgctgccagctgctggggaacggcctgtcccgggatagaacacgtcatcaacagggctctccatctcactgtcatcgatggacttggggcgcttggtggtgctggggaagaaagaaagggtcacatgggccaaggatgggctgaggctccagggagtgaccaagagtccaggctaaagaactgtgcatagatggccctctgggtggggagtggtgccggccgacagcagcatttctgggcactcactgcgtgcccaaccccaagatcagccctagggcccctcaagccatcagcttcaacctgctcctcttcctcaagccccttcccaatctgtgatgccacggtcctccaagctgcccaca

SEQ ID NO: 11371 - DNA, 1195 bp, Homo sapiens
agtggtgttgtgaggggcaatgagggcaacaggagatgtggggacgtgttaggagagaaaaaaaaaaaaacaaaaatatatatgggggaaattaacttttttttttcattgaaccaagtgcaatgcatcagagagttttcctatctttgtatgttaagagattaagaaaaaaaaattctatttttgttgtaatgtcctcgcggctctggggacgctaaaagaaccgggcctgccccgccctgcgcggggataacgaaagctgagtgtttttcccttttttttgttcgtttttagtttttttttttttaagtcgttttcctgcgttgacgaggatgatctggggtttttatttgtttcgtcgttcgttctgtttcggtgggagggctgaaggaaacgttcacattttagagtttaaaaaaaacacctcgacatttaaaaaatcaaccaacacaagatcaaaaaggaaaaggacgagagaaaaattatttttaagataattaaacataaaaccctggtgcttcttacattataaagtacgttttaaagaacccacaaactattatacataagtttatgaatcaattaaatatcctgcacttgttaggaatacgcatatcccttctttgttgagtttaacggaacgggacagcggcgtgcccccggcggctggactgctccggccgcgggtctccccgggcgcccctccctggggcccagcacccctcctcgccccatccccgtccgggtacgggggcgcggcaggggtccccggcccctcccccgcagaggtcaatgccaacgaacaaacgtcccctccctccctccctctccgccccgagcgcccttctttgagccagacgccaacttgaccctcaccagcattatcaggagcgcgctcagcaagttggtagtttcctcccccctttcccggcgcccctcccgcccccattcaacatctctcatcctatccccgaccccctccggggaacaccgggaaggctcgacgctccaggacaggaccagccacgcagacaggtcgatttgcccaggcccgcgcccgcacgcacgcacgcacacggccccgcacacagccccgccccaccccgcaaccagccctgtcgactgccttatacacccgcccccgcgctggccggccgacctagtgccttgttctcacccccgtgctggcggagcg

SEQ ID NO: 11372 - DNA, 1535 bp, Homo sapiens
agggctgccgaatacagcagcgatggagaacggcaccgggccctacggagaagaacgtccacgtgaagtccaggagacgacagtcaccgagggggctgccaaaatcgcctttcccagtgccaacgaggtcttttataacccggtgcaggaattcaatcgggacctgacgtgagcaggggtcagacgttagcctggcatcggctagtgggtcagtgtggatggcgggggcggggtatgagctagtcctctgtctcccaccagatgtgctgtgatcaccgagtttgctcgcattcagcttggggccaaaggaatccagagtgagtggaggtccaggcttctggtgggcgggggtcacacaagtttatctccctgcctgggctcttctgccgcccaaatccagaggggcttcagccacatagcaggccctgggttctgctccttcagcctttccgcagggatttcagggacgatattttggagattaaggggaggtttctcagaggggaccttgttattctctgacttgtgcctctgggtggctgcagtcaaggttccaggagagaaggacacgcaaaaagtggtcgtggacttgtcagagcaagaggaggaaaaggttgaactgaaagagagtgaaaacctggcctcaggagaccaacctcgcacagcggccgtgggggagatctgtgaggtggggcctgagcataggagctggcagccctggaatttagcgggagacagagggctcctggagggggagagctataggaggtgggtggtgggggctccttggggcccagaagaggatggaggtggagatgtgagggaggttttctgcttactccaacaggaaggcctgcatgtgctggaaggcctggcagcttcaggcctacgttccattcgatttgccctagaggtgcctgggctcagatctgtggttgcaaacgatgcctccacccgggctgtggatctcatacgccggaatgtccagctcaatgacgtggcccacctggtacagccgagccaagcagatgcccggtaggttctgggcatcacagcctagctctgggacaagcctgcctggggtcaaattctggctctgtcacattctcactctgtgaccttgagtgagtgacttagcctctttgagccccagtttccttgtctgtcaactgagaaaattagttttacaggggttgctgtgatgagtaatagataattatggtatgatccatactctgtgccagaaataagtagcatcctggtctctgttttaacttcttacactccttttattcattcaaatgagccatagtatatccagtgtctgctatgtgtcaggcaccgttttcaagaactggaaatgcatcaggaaacaaaacatgcaaaattggtgaccttcgcaagagttggcaaactatagcctgtggggctcacagcctttttttgtttgtttgcttgtttgtttgttttttgagatgtagtctcgcccttgttgcccaggctggagtgcagtggcacgatctcagctcattgca

SEQ ID NO: 11373 - DNA, 1154 bp, Homo sapiens
catatgaataagtatgcctttgccccctcctctttgcaagggatagcgtgtggccaccctggtctgcagctagcttagcagatttgaccacatattgtaaaagtgagtctgtaccaggacagatagggtagagggctctgtgtggtttagcaccatggtagattccatcgtgcggatgtccctccagcaggggaggtctttggggccagggctaggccagcacccacatttgccgcctgaccccgtccctccgtctctgtctctccattcctccctgcccctcgtgcagccgctgccatggcccagacactgcagatggagatcccgaacttcggcaacagcatcctggagtgcctcaatgaacagcggctgcagggcctgtactgtgacgtgtcagtggtggtcaagggccatgccttcaaggcccaccgggccgtgcttgctgccagcagctcctacttccgggacctgttcaacaacagccgcagcgccgtggtggagctgccggcggctgtgcagccccagtctttccagcagatcctcagcttctgctacacgggccggctgagcatgaacgtgggcgaccagttcctgctcatgtacacggctggcttcctgcagatccaggagatcatggagaagggcaccgagttcttcctcaaggtgagctccccgagctgcgactcccagggcctgcatgcggaggaggccccatcgtcggagccccagagccccgtggcgcagacatcgggctggccagcctgtagcaccccgctgcccctcgtgtcgcgggtgaagacggagcagcaggagtcggactccgtgcagtgcatgcccgtggccaagcggctgtgggacagtggccagaaggaggctgggggcggcggcaatggcagccgcaagatggccaagttctccacgccggacctggctgccaaccggcctcaccagcccccgccaccccaacaggctccggtggtggcagcagcccagcccgccgtggctgcgggagcagggcagccagccggtggggtggcagcagcagggggtgtggtgagtgggcccagcacgtcggagcggaccagcccaggcacctcaagcgcctacaccagcgacagccctggctcctaccacaatgaggaggacgaggagga

SEQ ID NO: 11374 - DNA, 2430 bp, Homo sapiens
cctaacccctagccgtcatctccacactcaccaggcccaccaggggagggggctggcctgggggtcttgggaaggcccctccccaggccctaggccacctcgcggaagccttcagcctccgcccctcactgcagccccttgggacttgaggggggccccaggggttctcaggacccctcccaccacctcccagtgcttccacgtctccaaaagcgccttcctgtcaccctcgtctatccctgcgcctgggggctggggtaggcgaggccgtggggactacccattttatagctggggaaacaggctccgagaaattgcacaaccgacctcaggtggccggcagtggcgtgcctggtgccctttctcctcttccgcctctgttgctccctttggtcctctggggcctcagagaggcaggtcctaaaggagggggggtctcctgggggcagaccgagggtctcggaggatagaatgagaggtttccagggctggcagagtgtgtgcgtgtgtgtgtgcagaagttttgctttcaaacaaatgaagatacaagaggcagtaggacctgggttggaacccaggggagcagactggggggctgttgcccctccctccatctccccacacccaccccaccccacagcagggctcctggcccccacccccctgtacataatttttaaaacctttttttagcgaatgaaatattgaagtataagattccttttatttttcaaaccaatggggctgtgtctattgtccccctcggtccccaggggtggggggccttggaaggcagggcggtgttggggggctggggggcaggctgaatgtgtgtgtgtgggtgtgtatgtgtggagtgtgtgtgtgtgtttccatggtaggactccagtcccagctgctgcctaggctcctgtgggtcctgtgggtccccctcccctgttcaccttccccaacagggctatagtttaagggtgtcccaggccttggctggttggctgggcccagctcctgggggctgggcagggcagggcagggccgggtccacttccattgttagcagttgtttgcagaattttctcttttaccattcctctctttttgttctcgcccagagtgggtggttttttgttgttgttttagattttcatgtgaaggcagttttttttcttttttaactccccatccccctatgcagggtgtcatttcaccatccacatccacatccttgtttgtgtttctggccctcgtcctccctgcctctcatctgcctccccaacccccacctacccactgctcccaggggtctctccaggggcagggggattttaggagatggggtgggggccagcccctactggacccttgtaatctgatttggagaccatccccccgatgggaccagcagccccgccggcccactgggggtccctcttaacatctgcttgttgcgggggtcagtcatgagtgccagggtctggctggggtcttggcactgtcttcctggccggggcctgaaaccttagcccccagccggcctgagtgggggatattgacacccccagctaaagcacaagcaccttagtcacccctcctctccccccgcctcctggcctgccaccccaccccagcgtttaccccaaagcacaatgccctggtcacttggcaagcggctgggcctgacggaggccgaggggcagaccggggctccagccagacccctgaaaggaaggtgctcccccacttccaggccttagttggggtgggggggccagctcctgggcctggggtcttctcacccccacccccttgtcctgggtaggcccctgcctgcccctctctgccttttcctcgggtgtccctcctcgagcccctgtggcattggcttgggtggcagagcccacttgtttcagggaccccaggaggtgccccctggctcccaggactgtgtgtgggtccggggggtgggggggtggggagaagggtcgggcagggggtgcaggggaggaaactcctcaccaggagagccaaagacagggttgtgccttaccccaggagccacccctgtaccccccttgccctgccattcaccctccacccctacccctgggcggcctgctgctttttccttctcttcctcccctgccctgagctgcatggttcccccaccctgggcagccaggaaggaatctgaatggagaatcaccaaccaccagagaaaaaagactgtggggccctcccctgccaactccccttccctggccgcccactcaacccacacctctttcacgcaggacaggctgcccaccctgtccacgtgaagtgccaacgccctccccaccctgggccgagcccccacccctccctgggcccccaagtgagattgcacatttaactactgtaaggagaggagcggcgttggcaaatgtgaac

SEQ ID NO: 11375 - DNA, 1560 bp, Homo sapiens
tccgacggcgccgcccgcgtgcgaggcaaagcccgcttgccgcccggcggacagcatgctcaacgtgctcgtgcgggccgtggtggccttctgaggaccccgagcggcgctgccggagcccagagcgcgcgtcgaaccgtcggcccgagggcgcagacctgaggcgaggccacccccctccatcctgggggaagcgcccgcgaaaaccgtggagagaagccgccgcccgggctgctgagaggcccggagagggactctgtccccggggagccatcgccttcagtgtgcagggacggcaccgaggagtctgagccgggggcgcgggcgccttccgcagagacctgcgcccacaggtgctgtcttagtggactgggacgtgaacctttcgctctccttctggactgggagaagggaggcttgggtgttgtgttttttgttttgtttgtttgtttgtttttaaagatctcctcagggtcggacttcattttgtactgtgggctgtgctggccctttcaaggtttttcaagagttggttttgcgtttccaacctcggagaattccaggcactccccttccccctccgctgacatacttgtataagcggtcatcgttgcgtcatggggcaggcgtggggagcttcctgtcgccttgcgtgggtgtggggcctgggaggaggtcctggggcgtgcacccgccctgggcagtggggaggagagtggcctgagttacttcacccccgcgtgctgctggttaatgtcccgcgtctctgcaccttcgggtgggagcggggactgatctactttcacattctcaagtttttctcatctgcattagaggtgcccagtaggttcccaggttccagcgtgcccctccctcagacacacggacacaatcagccgagaagttcctggtctgaatcacgagaatgtggaggggtggggggtgtcagtggaaaggcataaggctgagctgagaccagttgctggtgaaactgggccaatctggggaggggaacatccttgccagggagtttctgagggtctgctttgtttacctttcgtgcggtggattctttttaactccgtctacctggcgttttgttagaaatgtcagataggaaaataaaaaccatttgagtaaaaaagccggtgctgtctggttttctgctgtggtgggggaggggcggggttaaagcgtcaggggctggcagccgctcgctggggccccaagaaccggtctgaccggttaccacgtgggcgagagagggttgggcccccttttccttgcccgggcattccctaactggtggagccccgcctcccccagatttgggggttcccttgaaattgtcctacaactccgggacagggagatcggggctttctgagttgagacaatagtgctaaacacactgccccaagcggagctggggatcgattgcacgcactttgaagccttgaaaggtggtagatctcgcccccaccccctagaccaaactgaatcagctgtggccggggccctacagtatcaggtggagctgagcgggtgagctttgaaggg

SEQ ID NO: 11376 - DNA, 1191 bp, Homo sapiens
gggcacctgtagtcccagctacttgggaggctgaggcaggggaatggcatgaacccaggaggtggagcttgcagtgagccgagatcgcgccactgcactccagcccgggtgacagagtgagactcctcaaaaaaaaaaaaaaaaaaaaagtataattcagccaagcacaatggcgtatgcctatagtcccgactatcaggaggctaaggtaggattgtgagttcaagcccagcctgggcaaaataggaagaccccgtctaccaaaaaaaaaaaaaaaaggttgggggaggtttttgtttttttggatgtgaaaagaagagcctagtccggcggagagcggggctttcctgaactgtgcctcctaccagtgaggttgctcagaccttgcctggggctggagtgttgcctggagaacagccatgaagctgcctccccacttcccacttcccacccctgctcgctgacccctgctactcctgcttctttcccctagttctatggggcttctgttgcttatgaaaatgccctgcgggtgttcaacatcgtcttcacctccctcttctctctggaatgtgtgctgaaagtcatggcttttgggattctggtaagtaccaccttggggctacagctatgggcttgggagaagcccaagggggaacaatgggtcctggatgatggtctcccaacgtggccccaagaaccccaacctcaagggtggcttcagtatcctgccagtggccacagatcctacttaggcattcttgtgtttgccaaggagtcccagggagacccaacctgtgagtgttaccatatggctgcttatgtatccagttcctcaaaatgatgggagtcatcatggctgggagtctttagcatccattttagagataagaaaactgaaatcaggctgggcgaggtgtctcatggctgtaattccagcactttgggaggccaaggtgggcggatcacctgaggtcgggagttcgagaccagcctgaccaacatggagaaactctgtctctactaaaaatacaaaattagccgggtgtggtggcgcatgcctgtaatcccagctactcgggaggctgaggcaggagaatcgcttgaacctgggaggcagaggttgtggtgagccgagatcacatcactgcactccagcctgggcaacaagagtgaaactctgtctcaaaa

SEQ ID NO: 11377 - DNA, 1218 bp, Homo sapiens
gcctcaaataccttgaacgctgcatgtgacaagtaaattctctaaaccaatgctttccattagaactttctgcagtcacagaaatgatctccatctgccctgtccaataggattgtcacttgaaatgtagccagtgtgactgcagaactgtgttttttattttattgcatttaaattaattttaattgaaatagccacatgtggcctgtgactgtcgtattgaataagacaggtgcaaacaaataattctgtttagctgagtgatatgtgaggttggcccaaaaggaatgaaggaggaaggtgccttctctaggcattggctttgctcgcaaaaggctttggacaagagaactctgcaagaggcagtgaggggtggtgagtgcaggagggtcaggggaagtgagagggtgataggtactgatttctaggtgggctggttccctgatcttgtcaacatctgcccagcccaagacgctgaccttgccttctctcccttccaggatgacacagaaccatacttcattggaattttttgtttcgaggctggaattaaaatcattgcccttgggtttgccttccacaaaggctcctacttgaggaatggctggaatgtcatggactttgtggtggtgctaacggggtaagtggcgcgtgctatacgctttggatttaactagctgaaggattacgaggcttttggttggtgtggtccgggccaggctcaggaaggctgagcccttgtgttctccctccccttgttatgcgcctgcctcctttctgccaacaccccacctccatgtctcagctgtatattacagcagatgctttctgttacaattaaaataatagctcattattgttggctgcttccagagtgctttatgcccattctctaatttaatccttgcaacaacccactgaattaggaaatattaatattcccatctgaccactgaggaatcagaaactcagagtgtaacttgcttaaggccacccagcaagtaagtgatggaactgggagatgaacagaagattatgcattccagaactcaaggttttaagtgttgtacgtgcatgggtctcttgatttgcttgaggatatcttgcttttatttcaacttggtgaatgttttttgagaatgtctgggtgcaagggattgtgattatgacaaaggagaaaagcaagctaaataaggtacagttactgtcttcaaggag

SEQ ID NO: 11378 - DNA, 1149 bp, Homo sapiens
tctaaatatttctgccattaaaaaaaaatgtttcagcatatcctgagagtgaaaaaaaaagtgtgtaggtacttaaataaagtctaatatatgtacaggcaagtacatatattcagatgcatagatttttacaaaatgaacacacccacgtatccagcacccaggtcccgatcagtgccctggaagtccccctccccataccgcctcctagttgctcccccaacaagggtaccgctcacctgacttctaaggttcattttgcctcttttaaacatgtaaatggagtcacacagtacgttcttttgccactggcttcttttgctcacatctgtgtatgtgactctactacaatctatccattctactgttgatgggcatttgtgtcatttctgtttgtgccactgggaacattcttgtgtcttctattatttttttcccacagttctcttagataggagtggaatcgcccctgctactttttgatgcatgtgttgtgggatgtgtatttggaaatggtgttgactaagggttgcaggtcgatatggaaagcaggttcctccctgtcttgtttaagagaagtgagtgaatgatccatgaacttgtcggtatgctcacagggcctaagagtgctacttccaaatgtaaattctggcatggtacactggtgaaggatgcagtcttgctttctccacactcggggcaatttgtcactatgatttcttcctctttcatccctcagtgggtcaaacttgaagccatcaatgacaattaagaatcctcatttatttcattttttcccctcttcctaagtgaggaaacccaaatggaagtctttgatgttcaaatttacattgccgtgtttttctcatgccaggcagcaagccgtcttgaccacacaccttggtttcatgttttcattgactggaattgtgattcaaatagggccatgagggtctctgatgattgccgaagagctcagatctgtcagctcaaaaaggagcatctgtcagccttcctagagttccctccccacttaatgccactcactccttctaccaagtgccaaggtgaatgtcatctttccagccctccctgtgccaccaggtctcccactgaacatgatgtagaaactcaggccatcggaggaac

SEQ ID NO: 11379 - DNA, 1307 bp, Homo sapiens
aatgctgccacttttgtggttccgaggaggcggctcactccgttcgggcttggcaggagtcgtggagtgggttcggccacgtggaatccgcgtcctgggaacccgtggaatccgcgtcctgggaacccgtggaatccgcctcctgggaacccgtggaatccgcctcctgggaacccgtggaatccgcctcctgggaacccgtggaatccgcctcctgggaacccgtggaatccgcctcctgggaacccgtggaatcgggttggatgcgcatgtgcgtgtctctttttccgggggaggctccgcccacggccccgccccgctcccaagtgcgcgcggacccctagctccctctgagttgcgctgggcttggctgctgcaccatgaccctggaggcgatccgctactcgcggggctccctgcagatcctagaccagctgctgctgcccaagcagagccgctacgaggcggtgggctcggtgcaccaggcctgggaggccatccgcgccatgaaggtgcagcggggcggcggggcggcggggcggcggggcggcggggcggcggggcggcggggcggcggggcggcggggcggcggggcggccgggttggaggtgggagtgcgcccgcgcctgcagcttccgacgcccaaatccctgccccgcaggtgcggggcgccccggccatagccctggtgggctgtctcagcctcgccgtggagctgcaggcgggcgccgggggaccgggactcgccgcgctcgtggccttcgtgcgcgacaagctgagcttcctcgtcaccgcccggcccaccgctgtcaacatggcccgcgccgcccgcgacctggctgatgttgcagcccgggaggccgaacgggagggcgctacggaagaggcggtccgggagaggtacggggatctggtaccaggcacggcgctgagcaggaattatattgactctttttaagtacagtgacccactatacagatggggaaactgaggcacggcgaccttaagtcccttgtccagggccccacagatggggagactgaggcacggcgaccttaagtcccttgtccagggccccacagatggggcccagagtctagcctgggcagcctggccctgaaacctaactccttaatcgtgcctcccctgaatacacgcagccccttatccgcccttggaggccctttttagtatctccgtgttctcttggtttctgcttttgaggaactttttttcctgtcctggtccccttcctgccatctttttccccccacttcctttctgctccagccctccctgcaatgt

SEQ ID NO: 11380 - DNA, 1402 bp, Homo sapiens
cttcagagactcttctccgattccagcctgtgctcagggcttggccgggagggaatggctggccagcatggagctggacaaaggcctagaggctggccaggctaatgtggctgcagggggttgagggggttgcagaaagaggctccaaagcttagccttctacacacgtgattcccacctagtccaggtgcgccctgatgatttggaaaggaagtttctgttcagcatggtgtggaggtggaagtggaggtggcagtgtcatggttaacccacgcatacatgtacgtgtgtctgcccccgctcctgacggatttccctccctcacctcccaccaggcccgcaagccctgatgaatatcatgcagaactggtattccttattcacaccagtggaggcggctaccatcgtggcagtgacgggcaccacacacgccactctgctgcgactgcagctggacacatcgcggagggaggagctctgggcctgcgcccgcaccctggccttgcagtgcgcgatgaaggaccctcagaactgcgccttgcctgccctgaccctgtgcgagaagaaccactcggccttcgaggcggcctaccagatcgtgctggacgcggcggccggcggcctgggccacgcccacctcttcactgtggcccgctatatggagcaccgcgggctgccgctccgggcctacaagctggcgacgctggccctggcgcagctcagcatcgccttcaaccaggacagccaccctgccgtcaacgacgtgctttgggcctgctctctcagccactccctgggccggcacgagctctctgccatcgtccccctcatcattcgcagcatccactgtgccccaatgctgtccgatattctgcgccgctggactctctcggcgcccggtctgggccccttaggggcacgccgggccgccaagccactgggtgccgaccgggcgccgctctgccagctcctggacgcggcagtcaccgcctacatcaccaccagccactcgcgcctcacgcacatcagcccgcggcactatggggatttcatcgaattcctgggcaaggcccgggagaccttcctgctggcgcccgacgggcacctccagttctcacagttcttggagaacctcaaacagacctacaagggcaagaagaaactcatgcttttggtgcgggagcgttttggttgagggacagtggggtgcgtgggagtggggatccccctcgcccctgcgtcccccacccttgctctccaattaggcccacgtggcatttcagtattattaagtcagggaaggagcccggctggagatgggggcagggggagcagcatcctgccacgtgtgtgcctgggagtctgtgagcaagtgtgcaagactccagaagcagaagccata

SEQ ID NO: 11381 - DNA, 1085 bp, Homo sapiens
aggatgatgaccccgatggcttcttaggctgagcgcccagcctcacccctgccccagcccattccggcccccatctcacccaagatcccccagagtccaggagctggacggggacaccctcagccctcataacagattccaaggagagggcaccctcttgtccttatctttgccccttgtgtctgtctcacacacatctgctcctcagcacgtcggtgtggggaggggattgctccttaaaccccaggtggctgaccctccccacccagtccaggacattttaggaaaaaaaaaatgaaatgtggggggcttctcatctccccaagatcctcttccgttcagccagatgtttcctgtataaatgtttggatctgcctgtttattttggtgggtggtctttcctccctcccctaccacccatgccccccttctcagtctgcccctggcctccagcccctaggggactagctgggttggggttcctcgggccttttctctcctccctcttttctttctgttgattgtcgctccagctggctgtattgctttttaatattgcaccgaaggttttttaaataaaattttaaaaaaagaaaaagggaaaaaaaagccacggagtccattttatgaatggggtggggagagggcactaaagagcctcctaagagagcctcaggttaggacagaattgtttggggagggagaaaaacagaaacaatgaattatagctgcctcacagccatgtataacaataattgctccaggaaggtgggaatatttgcttttttttcttctgtaatctcaccgtgtccgtgtccagaacagagctaggcacacagcaggtgctcaatttttgtttttcgtttagacaggtttcattctttcacccaggctggagtgcagtggtgctatcatagctcattgtagcctcaaactcctgggctgaagtgatcctcccacctcagcctcctgagtagctgggactacaggtgcactctgccatgccgggctaacttttaaaaatttttgtccgggcacagtggctcatgcctgtaatcccagcactttgggaggccgaggtgggt

SEQ ID NO: 11382 - DNA, 1177 bp, Homo sapiens
tgcccagctaatttttgtatttttgcagagacggggtctcactatgttgcccaggctggtctcaaactcctaggctcaagtgatccacccaccttggcctcccaaagtactgggattatacaggcatgagccaccacacccgaccctctgtaataattttttaaccaggggccatcttttttattctgggccccactaattctgcagcctatcatgatcccattttacagatgacaaaactgtggcctcagagccttactcaagctcccagagcaaggtactacagagttctctctccagccaaggcaggctaaccaggtcctgacatacctctgagccagccctcactttcacccattaacagcaggataagggtcgcccctgtagaacatgattcctacagggagccaggatcgctgttgtcatttaatgtttgaacaccagccggggaggcccccaaggccttcagatcgggtccaagtctcaggggtgggcccttgaccagccactgcttcccacaggacaactcaaacttatacatggtcatggagtacgtgcccggcggggagatgttctcacacctacggcggatcggaaggttcaggtaagcgggccaccccccatcacatcaggctgtcagggtgtccacaggtggcagtgcacgaccaagccccctgggaatgcagaggagtccagcatacttcaacatgcaggtggtctcccagaccctgtgggtttctgtttcccctctgctgaggaatatgtgatatttcaaccaccacaaaacaaaacagagcaaacagggcaacttaggtgtccaaactgaagttgctgccaggcacggtggttctcaccagtaatcccagcactttgggaggccaaggtgggcagatcacctgaggtcaggagtttgagaccagcctggccaacatggcaaaaccctgtctccactaaaaatacaaaactgagctgggcatggtggtgggcacctgtaatcccagctacttgggaggctgaggcaggagaatcacttgaacccaggagacagaggttgcagtgagccaagatcacaccactgtactccagcctgggtgagagagtgacatgccgtctcaaaaaaaaaaattgaagttgttgattttgtgcattttttgagccccaaaaggtggcatgcatc

SEQ ID NO: 11383 - DNA, 2930 bp, Homo sapiens
cctgctccctggagactgggaaaaggccgcagggcagggggactgggcggtggtggctggtggtttaaaggttgaactttctctgaagctcctttccccttgctcttggtccctgccccgcaagcaaacctgccccctctgcctcccagtgcacccaatgaccccctcccttggggcgactcctgatgaagcacaactccccgcagggcccccagcccacaggggtggccatatttgggcagttcccagtcctgtgggctcggctatctggggagcagattttgggtctggatctccctggggagtgggtcctgggcttggatctttccctagggggccctcttactccttcctctctcctcctccttccccattgctgtaaatatttcaacgaaatggaaaagaaaaaaaaaagacaaaaaaaaaaaaaaagaaaagaaaaaaaatctcatcacttgaagccaccgggagcctgcggcccgggccagcccgggctttctccggagcagagcagcgctgctggcctggcagccaggacttctccgtgtacgtgcatccccagtccccgccggggcgggcgggccgccagagcagctttttacaatccagagacagaaaacaaaatctagatgcaacagcgaaacaaagaacccatttccttcctggcaccctcctttcctgctccgcctgcccggcatcatcagcccttctggggcgtgtacctctcactgcctgccccaggaccagaggcctgtctcccccttccctccccaccggcccgggggagacctcttcacacccaaagatgctttgtcaagatggctgcgctgtccctttgagttcctgcttcttgtatattgctctggggactctcgccggggaagatggggctgatttcccacctagagaggttgatggcagaaggaaaatggggaggcactggggttgtggagggcatgggtatggctgaggagggtgctgggaacggcaaggcggtctgggggatggggaggggcaaaggtgagagatcaccttccctatcctccaccttcccgcagggaagacgaagccaggtgccagggctggggtcgggacacccatgttctgggcggcttgaccccaaatcccagaccccggaagctccaggctcgggatgtgtcctgagcacctgtcccggccccctcctctccagcctgtcaggccagcctccccagcccccttccctcaactctaggggcagcatagccccaggccaccctagcccagcccctgcattgccgtttccccagaggtggcccctccacctctgctctgacctctccccatctctctgcccctccttttctcacaagtgccatgagttttcaaacatcttcgggtctcagcctgctgctgccatgaactttgttgggttaagggggaggggctctaggaaggaactggggggaaggggacaggtaggtggctggagggaccctttttgctgctagaaagcccctcccttctcccggggagctggggctggcttgtccccatcaattaggggagaaggggtcagaccaaagatggtggtttgtcccgtgtaagggaacaggtgtggggaagaggtggggttgggttccaactctggctttttctggtagaaaggcctaacccattacaccagaagaccatgggtgaagtctagatggggaggagaagtgaggccagggacagtcttgccagacgactctgaggagggcaagggacagttccatggcccttcccggactgcactaggctgggagctctgttgtgtggaggggtggtcagaggtctgtgaagagcgggcaggaggcatgagcaggcgaggagctggcctgtcccgggaagcagcccagcctgtggctgcccccgacaccaggaggagggccaggagagttccagggggctgaggcacacagagaggccaacttcctccctgcccagccttccttgtatctctccagactcggacaatcaaagggagagagggtgtatcgggtcctgttccagccggcatcgccgggtggcttccaggcctcagagctgtgtggcagggccccctgctggggctggacatcactgcagtccagtgcaaagccgcccccagagcccaggtgtccccccaacctaaccagacctggtgccttgacgcccccaccccagctgggacggtacagagaagggtcttggtttcctctcctactcccttccttaggctcctgaactcgtttgctcctaaatcttgttaattctttttctctggattttggtttcttttggctttcccttgccttcccctttctctgtctccaacactctttccccatgtctttctggctgtctctatgttcctcttctcttatcctcaactttctgtccattcgggcctcctccccacctcccacgccccagcccctccctccttggtctccttttcgatatgccaaaccaattttgggtcgagtgcatttaacgagaacaaaacaaaaggctcataacaacaagaacgtttcagaaaaaaacaaaaagttttaaaaaaattgttgagtcaaaaagtcaaacaataaagaaattaagatttcttggaatgacaagagtggtgtgacttcttgagtgggggagtaagaaatgggtgaatagctgggcgcggtggctcaggcctgtaatcccagcattttgggaggccgaggtgggtggatcacttgaggccaggagtttgagactagcctagtcaacatggtgaaaccccatctctactaaaaagacaaaattagctgggcgtggtggcaagcacctgtggtcccagctacttgggaggctaaggcaggagaattgcttgaacccggctgggaggcagaggttgcagtaagccaagatcgtaccactgcactccagcctgggctata

SEQ ID NO: 11384 - DNA, 1105 bp, Homo sapiens
gtgccagtgagggagaaagggaatgtgagatcagagatccagggggcagggggaagcctacggaaaaccagcaggaatcaagcccacttctccacatggaccgcaccccctcactgtcccctagtgcatccagggcccctcttcaacctgaccagcccctttctgccctgcagagcaccccttgggaggccgggaagcctgtggcatggacaccctgcccctgaacggcaacttcaataacagttactccttgcgaagtggggatttccctcccggggatgggggccctgagccgccccgaggccggaacctagccgatgcggcggcctttgagaagatgatcatctcagagctggtgcacaacaacctgcgggggagcagcagcgcggccaagggccctccaccgcctgagccccctgtgccacctgtgccagggggcgggggcgaggaagaggcgggcgggcccgggggtgctgaccgggccgagattgaacttctctataaggccctggaggagcctctgctgctgccccgggcccagtcggtgctgtaccagagcgatctggacgagtcggagagctgcacggccgaggacggcgccaccagccggcccctctcctcccctcctggccgggactccctctatgccagcggggccaacctgcgggactcaccctcctacccggacagcagccctgaggggcccagtgaggccctgcccccaccccctcccgcaccccccggcccccccgaaatctactacacctcgcgcccgccagccctggtggcccggaatcccctgcagggctactaccaggtgcggcgtcctagccacgagggctacctggcagccccaggccttgaggggccagggcccgatggggacgggcagatgcagctggtcaccagtctctgagggcacctcatggaccaggggctggtggcccaggccagggagggaaccctgggcagggctctggtgggagagggagacagatggaggcagtggctggtgggccactctctccaggtgcccctcagccatgggccctacagtcccctcaggggactctaacctgggggcctgaggtgccagggttcacag

SEQ ID NO: 11385 - DNA, 1068 bp, Homo sapiens
cccgattgctggcctggctttgcatggcatcctagagagatcacgggcagtaccaggggaggctagccccatgggtgtggggggcccctggtcttgcctggggcatgaggccatgcgtctggtcctctatggccatgatcccaccgtctcccaaggcactctggagaagcaagttggtgttacgttggtcatctctccacaagccttccagagcatgaggaagtgagcgcattgctgcgtgcagaggggtgagggctgccaggttggcggcaccagaggtcctcacggcccatggccttgcccagggccctgtctgtggctggcacctggctgagcccagcgtgcaaaaccaaaggccctgagcgtgccccctgttcctgtccccagtaccagggccgcatcaacgagctgctgctgtcggtcatcacctgggtgggcattgtgatctccctggtctgcttggccatctgcatctccaccttctgcttcctgcgggggctgcagaccgaccgcaacaccatccacaagaacctgtgcatcaacctcttcctggctgagctgctcttcctggtcgggatcgacaagactcagtatgaggtgggctgggactctagggcaggtgacggccagcgcctgggggccgggagaagaagggggacacctgtccaggcagcagcccctcaccctcagtgctccccgcagattgcctgccccatcttcgccggcctgctgcactatttcttcctggctgccttctcctggctgtgcctggagggcgtgcacctctacctgctactagtggaggtgtttgagagcgagtattcccgcaccaagtactactacctgggtggctactgcttcccggccctggtggtgggcatcgcggctgccattgactaccgcagctacggcaccgagaaggcgtgagtttccacctcccagccctgcaccctcccacctggttccctgctgggcggcaccccttggaccaggaccctcagggcggtagtcccttcctcctcctgatcccagaggctgcagcctgcagagtcctaggccttcatgagt

SEQ ID NO: 11386 - DNA, 1823 bp, Homo sapiens
tcccatccttctcttcttccctttggctcccttgtctgttcctgtctgtctgtccctgcaggaattgcctccttccagtgtctaccagccttggggctctggaacccccggggccctgacctcagcaactgcacctccccctgggtcaaccaggtggcccagaaggtaccagccaccacccctcgcaggcaggcacatgtgctcgggcccagggcccagggcccagcgggggtcgtggagcagctggggagacatgggctggcaggtctggaaggcaggactgtggggtcacctccctggcctacaaagggagcagggacagatggggtgggaaggggcagatggcgatggggaagtggagagagagataggagaggctgcacaggccagggaagccggggagggcaggatggtccctgacagtcctgggattcccccttcccgcccccacctcatgcagatcaagagtggggagaacgcggccaacatcgccagcgagctggcccgacacacccggggctccatctacgcgggggacgtctcctcctctgtgaagctgatggagcagctgctggacatcctggatgcccagctgcaggccctgcggcccatcgagcgcgagtcagccggcaagaactacaacaaggtggggcctggcggtggcgctgacctggtatggggagggcgcctgcccccaggggcttgggaagtacctgacctggtacctcccagccaggctgccacctccactcctttcctcagagaggaaggacccccccctctccgccaaggactgccgggtctcactcctgtgctgccccggatggtcctgggggttggggatccctgaggaatgtcttgctgatagcccagccctgggtcagtggtaaccgcagacgagagagctatccagatgtgacagtattagggtgagggaaccggcacccagaggcctggcctgacatcacctccatctctttctagatgcacaagcgagagagaacttgtaaggattatatcaaggtgagacccagggggtcccagtgtaaggaccgtgggctccagctgatggggggattaggggtggaggttgagaagagggcatgcagagcccacccccaggaattagagggtgttggggggctcacagcaccatgccctctgcctgtgcaggccgtggtggagacagtggacaatctgctccggccagaagctctggagtcctggaaggacatgaatgccacggagcaggtgcacacggccaccatgctcctcgacgtcctggaggagggcgccttcctgctggccgacaatgtcagggagcctgcccgcttcctggctgccaaggagaacgtgggtgagtgccacagtcacccagggcaaactcagatacgaaccttaaaccacggggttctggcctggaggccacaggggggctatccgacccttgggcatcttgccagagtctcgttctgcagcctgagcccctggactgggaacagaccccaactgtgtatgccttgccttcccctgtccccacagtcctggaggtcacagtcctgaacacagagggccaggtgcaggagctggtgttcccccaggaggagtacccgagaaagaactccatccagctgtctgccaaaaccatcaagcagaacagccgcaatggtcagtgtccccggcggggcctcgggtggggaagcagccccacccccaccccccagctctgtgccagcgtctctgtgccatttgtagagggcagcggtgctgaccttttctcatgctagtgtaaaatttgaggggattcatgggccctgaagtgc

SEQ ID NO: 11387 - DNA, 2201 bp, Homo sapiens
aaatcggggtccgggccaggggaggtggggggcctggctggggcgggctgggtctttatcctagcgcctggttccctcccctgccccctccgagctggacctgggactgcccccctgagggaccctcagtcgggcctgggccttggagtgaattctctgctcacccctctctcctccgccagcactaaccctttcttcccaggtggtttgcagcgcagcctcccacggagccaggacctcgccaagccccatacgcccttgtctctcttccctctgcacagctctcctctccctccccaactctcccgggagccctgtccctctccatgtccccacccccacccctgtgcacagtgccactgtctgctgctgagccagaccccatgagagaccctgccggctgggggcagggctgggcgccctccaggaggggccagactctttcattccccgtcctagcctgggagctgcctctgggaatcccttcctcggctactgacttcgtgggtactgggtggggggtggggagcaggctgcatcaggaacctggggagagagttgaaacccctatcctggaatagggagacactcctgacacccacagtgggtatggaaacaccactctaccttgcaatttttgcaggaggaagaaagaggagttaaaaaaaaaaacactgtccgggtgtggttggtgaaggatgggatcctggaccctagctcttccctaagtggcagagaagagggagaaggggccgggtgctgagtccctggaccgtcaaagtcaggagtgactgtagcggggagattctgcccccacttaaatcacacaggaccacctctgggagggctcttgccaaactcctccccagcctgtggggtctctagcagccagggaagggaagaggggcaccacttcccctcactaaccccgctcttaatggccttcagggttcacatttccagggagaggggcagctgggcagggcgtggggagggggtcgggtcccagcccggaaacccccttcccatcaccagccataccaagcaaccgtgactgcagcagcaggaggggacaacctggctccccaccagcagcgtgaccaacttgcctctctcccccctctctctctctctctctctctctctctctctcctccctctcgcctctgccccttctctcctacctcctcccctcccgcccactctgcccagtcttcgtgtgcccagggaccctgcagaaggtgctggagcccacctcgacacacgagtcagagcaccagtctggcgcatggtgcaaggacccgctgcaggcgggtgaccgcatctacgtgatgccctggatcccctaccgcacggacacactgactgagtatgcctcgtgggaggactacgtggccgcccgccacaccaccacctaccgcctgcccaaccgcgtggatggcacaggctttgtggtctacgatggtgccgtcttctacaacaaggagcgcacgcgcaacatcgtcaagtatgacctacggacgcgcatcaagagcggggagacggtcatcaataccgccaactaccatgacacctcgccctaccgctggggcggaaagaccgacattgacctggcggtggacgagaacgggctgtgggtcatctacgccactgagggcaacaacgggcggctggtggtgagccagctgaacccctacacactgcgctttgagggcacgtgggagacgggttacgacaagcgctcggcatccaacgccttcatggtgtgtggggtcctgtacgtcctgcgttccgtgtacgtggatgatgacagcgaggcggctggcaaccgcgtggactatgccttcaacaccaatgccaaccgcgaggagcctgtcagcctcaccttccccaacccctaccagttcatctcctccgttgactacaaccctcgcgacaaccagctgtacgtctggaacaactatttcgtggtgcgctacagcctggagttcgggccgcccgaccccagtgctggtgaggacgactcacttccaggcatggagcctgcttgcctttgtcccctccacccccacccacccctgggtcccagagtggggagccccatcctgtgagctcttggggatcgggaggtaaaggaaattcacagcatgtgacagacgctgttctaagcacttcacagtcattaactcgtctcctcacgg

SEQ ID NO: 11388 - DNA, 1163 bp, Homo sapiens
acctgatccccatctctgaccagctgggggcccagccctggggaggggtgtcagctgtccccagccctgggagggggcagcctgccaaaaaatgaaaaaatgagggcgagggggcgggggcgggcctcgtggttgggggagcgaagggtgggggagcgtgttctctgtttctttcacacttgcaaagctgcagtcagggtttcttctgggctgttgtggttagaggaccagggagatgggcggcgggcggcgggggcacagtctggggacttccacagactccgtaatttctagcagagaactccctagtggatggggctggccattactggctgttattggggggagcggaggtgctgctgctgaggggcttctagggtgagatgttagggatgaccatttcctctccagaaagttttgggaaatttacccatctgaggccggcagcagcaggcagggctggaggacatggcctttagggatcccttttgccttgaaattacagtggtctgtggagcatcccttccgaaggaggtggggcagggtccctctgagctgctcccctccccgtcttcccctctcccccatctcagagaggcctgggctgctggccccaggtccgccccctcaccacacccctccagtctcctctctttctcctggagtctctctccctcccagcaccagccactcttcttgcaggcccactggtttggatgcggcaccactggagattttctcttcgagggccagggcagggcgggtggggtgacggggcaagggagggaagaggagggattgggagtttggtgctggtgaagggtccttgctgtccaaggccccagacagacccttcctcatcttctcccccttcccctgggttgacctctaaccacatttttcccccctgacaccctctgagcaggttaggctctgaggcctcccaccgtccccttcacacaaacacgtcccctcagatgccacacacctggtgggggtggggaccggcttgggcagaggccagtgtgctggacagagtgggcaggccgacccctcagggcatcagggacagggggatggccagtccccagggcccaagccagggtcgttttggctcctgcccagctctatgtcccaggctcctctccctctacaaaaactac

SEQ ID NO: 11389 - DNA, 1541 bp, Homo sapiens
ctagaggacagggaggccaggcactcacttgtccccaaaatgttcactgagcatctcctgagtgccaggccctgggtgaggcgctgggaagggaggcagaggctgcccctgcggagctccctgctggaaccttcagagaggggccaggagagccagtccctccagtcagaagttcctgaggggccagggatgcagagggggagcggcctgggcagccacctggcccagggcttcagaggctgggggtgaccccagtgctggtgagggtgggtcaggggtgggtggcagggggcacgtgatgtgtgggaaccctcccacacagtggacaagcccgactaatgctggatttgctttgcagctgagcacagtctaaccgcgccccttcctcccctaggtgccgcccgtccgcagggcagcgggcagggcggagctcccagctcctgggcccccgggccctgggtgggttgagcagagaagccgagcctcagacttgcccctggggagcctgggagcgtgtctgtgcccccacttgctgtcccacccagtctgtgtcccccacccccgccacctctctgcctccgtctccccaaccctggctctctctggggcccgggtgcaactgcccgtctgcctgtcgttctgtgtctggctctgccaccttctctctgtgtttgcttcttctgggttgtgagggcttgggggaagtcagctggacctgggtgaggccagcataaaggggaaggagttcagcctgtttcttggctgagggtgggcccaggccctgggagacactgaaatccttcccctggggcccctggttctagcaggagggcagcaggcagggtgggaagggagccgagtggcttatccaccccaccactccctggtgccccctctgaccggagcccacctcccagctggggctccctactccctgcccccgccttgcaccaagggtgccccctcccacctgagggctctgtctgcctgcctgtacccccctaccacccctgtgtctttctgtgtcttctccctcctgtgtgtgtccccctcgtccctctgactgtctccccagcaccctctcaccccacctgaccacccccagaggaagggacctgggggcgggggcccgagctgatgctacggaaggggttggggaagcaggagcgaggaaggaaaggaaaagggggcgtgttgccagaaaagaaacgaaagcaatttaatctctttttttttctctttttttcttgcacattttttttttcaatttgttttctctctctcttccgatgcttaaagtagaagtggagcagaaaggtaaacgcactgttaccaatgctaacccctaactcacactttgttctacctgtaccatacttatgtgacctgccctcccccggccccttcttctctccccaacccacacttggtccggtcggtatcccccaccctgggttgtcctcccagtgggaccagccctggtgcggccacgggcatctccaccctccagatacccacggaagctcctctctgagcttggg

SEQ ID NO: 11390 - DNA, 1263 bp, Homo sapiens
tcgggcgtccctggttcccgatctgtggcgccagctggattctaattagccaccagagcttgagagacaggaagcagggggctgggggcgggggcttggatttctgcccaagacggggaggctgcaagttgggttgcaatgagtccctcacttgggaggacactcattacctccttgctcatggtgaggatgcgagtaggggagatgagtgggcagggtcaggacaggggcatggggaagaggcttccagagggtccaaggcctgcctgggatctccccgtgagctgtcccaggaggttccagtggggaagagttggcagtctctttgcccagaggtgcccagatagctgggtctggctgctgggtgtaagggtggggggtgtggtgtgagctgcagaccccggagggggccctacagatagggctggctcgagggacgtgctggacctcagcctctcagagctactcagccaccagcaggaggagaggggagcggcctggaggccctatccccacctcagtctccctgtcctcccccaggctggtggtccaggccgtggtgcctgccaggtgatgtggggcaaagccccccgcacaggccactgagagctccggacacgcacccggctgccaccatggcccgcctagccgcagtgctctggaatctgtgtgtcaccgccgtcctggtcacctcggccacccaaggtaggtgctgctggggccggggaggggccgcggctcccaaacccttctggggggggcagataaaatgttgaaaaccctcctgatcactcagtaaagaattacagccccctgccccgccccagacctcagctggagcaggccagtggaagactcaggggtaacacacaccccagtgccaccaagaggcccctggaccatcctcttacctccaacaagtcggctgggccaggttggtaggggccatcccgctgtggcccctgggaccaggacaggccttcttggtgagccgatgctcctctctctgtctctctctcgctctctctctctctctctctctctgtgattacatcttcgaggctctcactgggaagaaggcttaattaaagcatgcccgctgacgtttatttaaaaacaactaattacccggctcggccctatgccggccctaggatcctgcacacgccactattagtgccccaagcctgcccgcccaccctcaccgattactcgattactggccccgtgaccagcccaggccgggggcaagggcgggataag

SEQ ID NO: 11391 - DNA, 1214 bp, Homo sapiens
cccagaggagccgtgtcgggggctggcaccacaggatgctgggcgagggggttgtttttctctgggaggcagtggcgcgggggatggggaggggtccgtctgggtgtccagccggccgcagtccggggggcgccgctgtcaggaggagggggtgcagccgggcagcaccttctctccgtggtgccgggttaaagcacgggaggccggcaggtttgatccactcggattattcgtgctttgaggacagctccccacccccaccccaggtgcgcattggattgagctgcgagggtttggttgtcatcctcccatctgacggtcctgggacccgagtccaggcctgaagtggtggggtggggggatgctgtgtttgctccagccgtgtccagaaaatgccctcccaggtatctctccagtgcacccctggcccccatctgaagacagccgctggctacacacacccctgtctctacacttccagtccgggtcctcacactgccccatccctggccaacacctcactgtacctgcctggaccctttcttcctgttccaacccccatccacccccagccatgccagctgcgtgggtgtttctgtatcccagttccaggcagggcccccccttccgcctggcttccaccggactcagagctggggtctgtcttcccacatcccacttcccaacatgtgtgcctgggggcaggagggggaggggttcaaaatggctgccaagatggctggctcgcgcgctctctctctctctgtctgtctctctctctctctctctctctctctcactctctctgtctttctctatctctctctgtctttctctcttcccctctctgcttgcccggctcccttatcctggtagggagtcactgcttagaggaggtcggatccagtggggcacacctgagggtgaatgtctattccgggccgttgacctccatgctgtttggggacagaccattggtttctgcttctctctccaacaccccaagggctggcatgagtctaacctgaccccagaccccactccttcaccctggctcacagcctgaaagctccgtgccctccacctgctctccagggcctggccccctgaattgatcaaccccacggagggtccacacccctcattctcttctcctgtctgcccccggcaggggactctgcgtgggtccctgtcaggccccagctttggggggc

SEQ ID NO: 11392 - DNA, 1320 bp, Homo sapiens
gagtgaaactccatctcaaaacaaaacaaaaaaaaaattacaaaaattagccgggtgtggtggcacgcttctgtagtcccagctactcagaaagctgaggtgggaggatcgcttgagtctgggaggtggaggttgcagtgagctgattatgccactgcactcaagcctgggcaacagactgagaccctgtctcaaaaaaagaaagaaaaaagaacaggaaatcaaaacagagcctggcaggcagcccgtgcccaaccagtgttaagcgctgtgattcatacgtgcatgcaggcaaatactcaatccgtcgcttgttttctggttactgcatcatctcagtgattcccttgtgcctgtgggtctccagtgtgtcccctggtagggggtgacatccaggtccttcaggcaacccctgtggtctgatgctccagcgattctgtcacccgccaccccctagaatgtcatcaaattggtggatgaactgatggaagctcctggagacgtagaggccctggcgccacctgtccggcacctcatagccacccagctgctctcaaaccttgaagatatcatgaggatcctggccaagagcctgcctaaaggccccttcacctacatttccccttcgaacacaggtgaggccttggcctggcctgccctgccccaaccctgggccccacctggtacctggggtccctaatcacaactgcccctctcccctcagagctgaccctgatgatccaggagcggggggacaagaacgtcactatgggtcagagcagcgcacgcatgaagctgaattgggctgtggcagctggagccgaggatccaggtagcagcggtggtctggagggggagcccgtgggagagagatggaggtgctgggatggggccagggtgaggttcagaatagaacaactgactgggcgcggtggctcacgcctgcaatcccagcattttgggaggcccaggtgggtagatcgcttgagctcagaagttcaagaccagcctgggcaacatggtgaaacccggtctctacaaaaaatacaaaaattagccaggtgtggtggcacgtgcctgtagtcccagttactcaggaggctgaagcgagaggatcaattgagcccgggaggtcaaggctgctgtgagctatgatcacgccaaagcactccagcctggacgacatagtgagaccctgtcttaaaaaaaaaaaaaagtccaggcacagtggctcatgcctgtagtcctagcaccctagcactttggcaggctgaggtagatggatcacccgaggtcaggagttcaaaactagcctggcca

SEQ ID NO: 11393 - DNA, 1478 bp, Homo sapiens
aaaaaaaaaaaaaaagccgggtgtgctgaatacccatctcagcttctcaggaggctggggcaagaggatcacttgggcccaggagttcaaggttgcagtaagctatgatggtgccactacactccagcctgggtgacagggggacccgatctcaaaaaaaagacaaacacaaaaacaccaagaaggtggggctgagggcagagcatggggaggagcgtgcatggtcccagggcctgctcctgccctgacttggtgtctgggccggcaggttcgggaagaataccggaagtgggcctgcctagttgctggggggagcaagtactcagaattcacctccaccacgtctggcactggccacaatcagacccgggtaaggggctgcgcctggggcgggtgtgggcaggaaggcaccagggctagcggggctcaggcctctgggctctcctctccaggccctcagggcatcagagtccggcatatgaaggcgcatggttctggacggcccagcagctcctgtggccacagcagctttgtacacgaagaccatccatcctcccttcgtccaccactctactccctccaccctccctccctgatcccgtgtgccaccaggagggagtggcagctatagtctggcaccaaagtccaggacacccagtggggtggagtcggagccactggtcctgctgctggctgcctctctgctccaccttgtgacccagggtggggacaggggctggcccagggctgcaatgcagcatgttgccctggcacctgtggccagtactcgggacagactaagggcgcttgtcccatcctggacttttcctctcatgtctttgctgcagaactgaagagactaggcgctggggctcagcttccctcttaagctaagactgatgtcagaggccccatggcgaggccccttggggccactgcctgaggctcacggtacagaggcctgccctgcctggccgggcaggaggttctcactgttgtgaaggttgtagacgttgtgtaatgtgtttttatctgttaaaatttttcagtgttgacacttaaaattaaacacatgcatacagaagatggccttgcctgctggtggtgattcagaggccgggcccagggtgtccgtgaaaggccaagatgaccaagaaatagatggggtgggagccaggcttccataataacaagtttattctcatacaatctctagcttctcaacagtggcgcctggaaaggggaggtgaagctgcatgcgggcggctccgggtgggcggctctggcacgtggtggttaccggctctgctcgactgtaagacatgagatgcagtgaactgaagggccgggggaggaaccctctgccccagacccctggccctgcccaaggcacttactgtatgtggagatgtcgatttcctctggaagttctgccacattaacttcaaaccggtcctggacgtcattgaggattttgg

SEQ ID NO: 11394 - DNA, 1138 bp, Homo sapiens
tggtctggggtgggggtcctgcatggcagacgctcatgcccacccatgtcttgccctccccacctagacatgcggcgggatgtgcaggagatcttccgcctgacaccacacgagaagcagtgcatgatgttcagcgccaccctgagcaaggacatccggcctgtgtgcaggaagttcatgcaggatgtgagtagggcgagagtggcagctttggccttccccaggggcctggagcctggggccccaggacacccgcacggcccacatggcacggaggatgctgggatgctgggagccggcggagcctcctttcctcccctcggtcttgtcaaactgggagtcaagcttggtccacacctgagtcgggccagagcttacatccagcttttgagcgatgtttactgaggtctggtgcagcaggtcctctgggaagtgtcgcacaaaggagtcgcccactggaaggttctgggcaggcgagatgcccagaggtgatccctgcccgcccctcccacctcccttcccacacagcccatggaggtgtttgtggacgacgagaccaagctcacgctgcacggcctgcagcagtactacgtcaaactcaaagacagtgagaagaaccgcaagctctttgatctcttggatgtgctggagtttaaccaggtgatacttccatcagcctgtcctggggctcaggaccttcgggaggtcactgggccacagggactgtgtggccctgactgccactccttccctcaggtgataatcttcgtcaagtcagtgcagcgctgcatggccctggcccagctcctcgtggagcagaacttcccggccatcgccatccaccggggcatggcccaggaggagcggtgagtgcgagccgcccgccaaggctgcagggagcaccaccaggagcccagtgtctgacggcctccacttgtttctcctgcaccccagcctgtcacgctatcagcagttcaaggatttccagcggcggatcctggtggccaccaatctgtttggccgggggatggacatcgagcgagtcaacatcgtctttaactacgacatgcctgaggactcggacacctacctgcaccgggtgagcagcctcacgggcatgttgctttcccctggcggt

SEQ ID NO: 11395 - DNA, 1117 bp, Homo sapiens
aggtgacggtcctggtcatgtgccacacgagggagctggccttccagatcagcaaggaatatgagcgcttttccaagtacatgcccagcgtcaaggtgagtccctcgggccagactggaccaggcgccacttggtttctgcagctttgttagcctcggctctggcccagccagcatttaccaagcttggcaggggcagctgcctttgaggtttgcggtggtttttgctccttaaaagcctgatgaattatgcatggctcccaggggcctgcgcaggtcccagcctggggctgcctttgagtggagccccgggaggctctcaggcctgccttggtcccctgaggcctcctgttcgcaggtgctgggccgtgcaggttggggccttgggccgtgtatcagcatggagcggtttcctcctcatccccataggtgtctgtgttcttcggtggtctctccatcaagaaggatgaagaagtgttgaagaagaactgtccccatgtcgtggtggggaccccgggccgcatcctggcgctcgtgcggaataggagcttcagcctaaagaatgtgaagcactttgtgctggacgagtgtgacaagatgctggagcagctgggtgagtcctctgcccttgcagccccagctgagagtcagtgactaggcgggccccatagcaggcggaaggctcttgagtgggttacatgggcggccggcaggcggggctcctgtggtgatcttggggaaagctctgctgctggcagagggatgtgctgtttctgagcccgagccgaatgggaccacggggcccaagcaagcccccgtccctcctggacgtaaaggcatgcacacatacctctgggagtatgaggcttctgccacctgttgggttggttccaggccccgcctgccctcagtgagccccgacagggccggtgggagatgggcttgtgtcctgggaggcagctgcagctctcaccccagcggctgtctctgcctcaggctcccctccctgaagcgtggctcgaggcgcacgggcacggctgctccgcgccagcgtgtaagtggattgcagctcctcccgcgcctgcgctcgctggccaccccccagcccctcaggcacc

SEQ ID NO: 11396 - DNA, 1274 bp, Homo sapiens
ggggcttctctgggctgagtagtctgaggaggttcactggagctgaggcttgcgtgtggagaaggaggcatttgtgcagagacctgggggcagagcattcctggcggtgacagccaggttcaaaggcttggggcaggggctccaggggtctgagcagctgaacaaggctgggggtggtgtgggatgaggtgagcaggggtcaaaccaaggggattgcctggcctgtggtgagagttgggattttaactctgtgagccatgggaagcccttggaggtggagggtgttctgtctgtgggtgtggccagaggggcatgggggagagatggggtagcttgggggtggggaggtggagacagggcgaagctgcgaggtgcagcccaggtagagctgatgggctcactcatggaaggaggcggcagagaatgccatttgaatgaagcttcatcatccttctgtgcccactcgcgggaccctgcctctctctcttctcagcatcatggcagaacaggatgtggaaaacgatcttttggattacgatgaagaggaagagccccaggctcctcaagagagcacaccagctccccctaagaaagacatcaagggatcctacgtttccatccacagctctggcttccgggactttctgctgaagccggagctcctgcgggccatcgtggactgtggctttgagcatccttctgagggtacgccttctgggtgttatcctcttgcccaggtcctcaccaagacaagaccagccctgcccgcccagagcggtgccgcctccagtttgccgtgggtgagggaggggcccgtctgtcccgcggatcagttgtgcccagcggggcctgtggctgccctcggcagtggggcgttctgctttgaccaggcggataccccagccctgcaggtgtctgtggccttgtccggactcggcctcttctgattgccctcactgtgggcccccggtcaactggtgaggatcctgcacgggggtgcatccaggttctcgtccctcacgctctgcttctcctgcagtccagcatgagtgcattccccaggccatcctgggcatggacgtcctgtgccaggccaagtccgggatgggcaagacagcggtcttcgtgctggccaccctacagcagattgagcctgtcaacggacaggtgggtgggctcctcccttcctggccccaccctgcctgtggcggcggaagtagagtaggctggatggggtggctcacacctgttagcccagtgctttgggaagctga

SEQ ID NO: 11397 - DNA, 1168 bp, Homo sapiens
cacgatcttggctcactacaacctctgcctcctgggttcaagtgattctccttcctcagcctcccgagtagctggcattacaggcgcgtgccaccacgcccagctaattttttgtatttttagtagagacggggtttcgctatgatggccaggctggtcttgaactcctggcctcaagtgatcgcctgcctcaacctcctaaagtgccgggattacaggcatgagcaaccttgtctggctactgccagcattttctgactgggccctctctcccatttcaggtgaagtcagcactgtgcttaagctggataacacagtggtggggcagacgtcttggaagccatgtggccccaatgcctgggaccagagcttcactctggagctggaaagggtgagctgcgttggaggacagcagggcctagaggaggaggggttccatgcctctggcaccctgagtgatggccctcttcctctccctccaggcacgggaactggagttggctgtgttctggcgggaccagcggggcctgtgtgccctcaaattcctgaagttggaggatttcttggacaatgagaggcatgaggtgcagctggacatggaaccccagggctgcctggtggctgaggtatagcccacacctgaccctgagaaaatgcttcttctccctcactgccccattcccagtttcctagaaggggaaaatatgttttaggtctggctcttccagaaggggaagataagttttaagtcaggcttttctagaagaggaaaatagattttagatccagctcttctagaaacggaagatatgttttaactctgccttttctagaaggagaagatacgttttaggtcaggctcttccagaaggggaagagacgttttaggtctgcttttttctagaagggaaagatatgttttagatcaggctcttctagaaagggaagataggcttttgatctgcctgttctaggctgggcgtggtggctcatgcctgtaatcccagcacttcggaaggctgaggcaggaggatcacctgaggtcagggagaccagcctgggcaacatggtaaaaccgcgtctcaactaaaagtacaaaattagctgggcgtcgtggcacatgcctttagtcccagctacttgggaggctgagacaggagaatcgctt

SEQ ID NO: 11398 - DNA, 1240 bp, Homo sapiens
ttgcctcaagggcctcgttgcgcctcaagggcctcgttgcacctccagggcaacatcgtcacctcctttgacacccccatttccctcctccacttttgttccccccaaggaccctcctaatcccacatctccacttttcccttttttttttttttttagccagggtctcgctctgtcgcccaggctggagtgcagtggctcaatctcggctcactgcaacctccgcctcccaggttcatgcagttctcctgcctcagcctcccgagtacctgggattacaggcgtgcaccactccaccacaccaggctaatttttgtatttttagtagagacggggtttcgccatgttggccaggctggtcctgaactcctggcctcaagtgatcctcccgcctcggcctcccgaagtgctgggattacaggcctgagccaccacgccgggcctccacttttcctaatccggcttctccaccaggctctcgcaggtgatccctcctgagccccagtccccccaccccacttgtcctctgtatgctcactcctctccgtggtccccgagccccaggactggtccccactgcagcacgccccctcctcagcctccaggctgaccctcccctccgcttccctcccctgcagactctgggctgggaagccctgttggcccggcgcctgccaccgccctttgtgcccacgctgtccggccgcaccgacgtcagcaacttcgacgaggagttcaccggggaggcccccacactgagcccgccccgcgacgcgcggcccctcacagccgcggagcaggcagccttcctggacttcgacttcgtggccgggggctgctagccccctcccctgcccctgcccctgcccctgcccgagagctcttagtttttaaaaaggcctttgggatttgccggatccttgcatcctccgtgtcttcttgtgtgcagtcattgggggtgggggcgtgcttggaggtgtggacgtttgcggggcaggtggctgggtggtcgtgggagtctcgactgatgggggtgtcatctgaagaggatcaaggggcggcgtggactcggggctgttcttatggtggggagcgtgggtgagccgagatgggagggggcgtcgggattgtgttggggggcgcccaggggcgtggggcaaaatggtttggggatagggttttggggctgtattggaagagctcaaagccgcagtgagcagaatggtttcggaagtccgtt

SEQ ID NO: 11399 - DNA, 1210 bp, Homo sapiens
caggagttggtctcgaactcctgacatcaggtgatccagcctccttggcctcccaaagtgctgggattataggcatgagccaccgcgcccagccctcccttccttttcataaccggcagcattacctgttagctgaggggactctgggcagacagcctggattctagtccacttctgccacttcccagctcccagggaccttccttgggcacatgggccgcagtttgcccatcagtaaaatggggatgagctgaacaccgataccaccttctcagggttgtcctgaggtctaaatacgaatatatgtaaagtggtgacaatggcagtccgtccaattactatgtatattcacattgttatgatgtcgctgtcacccctccctggcccccagccctctgcctttgaagagaaggccattgagaaggtggatgacctgctggagagttacatgggtatcagggacacggagctgggtgagtgagggctgcctgggggagggggcatctaggtctgctgggggccgaatccaccctgagccccttggtccctggtgtcatttgtgcctccgttctgacccctcccccaatagcggccaccatggtggagctgggaaaggacaaaaggaacccggatgagctggccgaggccctggacgaacggctgggtgactttgccttccctgacgagttcgtctttgacgtctggggcgccattggggacgccaaggtcggccgctactaggactgcccccggaccctgcgatgatgacccgggcgcaacctggtgggggcccccagcagggacactgacgtcaggacccgagcctccagcctgagcctagctcagcagcccaaggacgatggtgaggggaggtggggccaggccccctgccccgctccaatcggtaccatcccctccctggttcccagtctggccggggtccccggcccccctgtgccctgttccccacctacctcagctgggtcaggcacagggaggggagggatcagccaaattgggcggccacccccgcctccaccactttccaccatcagctgccaaactggtccctctgtctccctggggccttgggttctgtttgggggtcatgaccttcctagtttcctgacgcagggaatacaggggagagggttgtccttccccccagcaaatgcaataatgccctcacccctcctgagaggagccccct

SEQ ID NO: 11400 - DNA, 1178 bp, Homo sapiens
ataatgaggctcccatctctaaaaaaaattattttaactatgtgggtgtggtggcacgtgtctgtggtcccagctactcgggagactgagacaggaggatcacttgagcccaggagttggagaccagcctgtgcaacatagtgagaccccatatctccacaaaaaatacaaaaattagccaggcatggtggcgagcacctgtagttccagctacttgggaggctgaggtgggaggattgccggaatctgggaggttgtggctgcagtgactatgatggcaccactgcactccagcctgggtgacagagcaagaccctgtctcaaaaagagaaaggaaaactaaatcctagtcctagcagagctgacacgctaatgtgggccctgctgtggccctggctcaggctcagtgggtgatgagttactgggatggaatccccctagtcctctcccagctctctcccttcgccctccagtggtgattagaaaagggggagggagggggaagaggtttcagcgtctcccacccctgcaggtgatgttctgcaccctgaacacccacaaagtggacatggacaagctcctggggggccagatcgggctggaggacttcatcttcgcccacgtgaaggggcagcgcaaggaggtggaggtgttcaagtcggaggatgcactcgggctcaccatcacggacaacggggctggctacgccttcatcaaggtgcctggggagacggggcaccccggaggcctgggagtgagggtgggccatgggaccccggaaaccagggcagagccccaagggctgatgactccccgcccccgcagcgcatcaaggagggcagcgtgatcgaccacatccacctcatcagcgtgggcgacatgatcgaggccattaacgggcagagcctgctgggctgccggcactacgaggtggcccggctgctcaaggagctgccccgaggccgtaccttcacgctgaagctcacggagcctcgcaaggccttcggtgaggagccgccccctggacctccccagtggcgctgctcgcatgggcgcaggcggtggtgccgggagcggccagcaggtggcgcccaagcctggcctgccgaaagggaaggggttgcagaaagggaaggggttgcagctcctcccgaccccagacggggtgctggcccttg

SEQ ID NO: 11401 - DNA, 2335 bp, Homo sapiens
cgaagacaaaatattgaccatcgaagtgaagaaggggtggaaagaaggaaccaaaatcactttccccaaggaaggagaccagacctccaacaacattccagctgatatcgtctttgttttaaaggacaagccccacaatatctttaagagagatggctctgatgtcatttatcctgccaggatcagcctccgggaggtaaggtgccaggtggggcggtgtctgtagagggcgatggctgctttttgaagcagtttagtatttgctgaaccaatgtgttggggtgtgtggtgcgtgccaggcttggggcacaacagtgaacaggactgaccagggcgctgttgtggagctttcgtggtggggacgtgtagatttgggggccaggtcttagctgcagaggcctgatgggtcttatctatggcagacggcctctgggcaagagctgagcctcttgagccagcttccatctaatgctgtccttttgcttttcaaggctctgtgtggctgcacagtgaacgtccccactctggacggcaggacgatacccgtcgtattcaaagatgttatcaggcctggcatgcggcgaaaagttcctggagaaggcctccccctccccaaaacacccgagaaacgtggggacctcattattgagtttgaagtgatcttccccgaaaggattccccagacatcaagaaccgtacttgagcaggttcttccaatatagctatctgagctccccaaggactgaccagggacctttccagagctcaaggatttctggacctttctaccagttgtggaccatgagagggtgggagggcccagggagggctttcgtactgctgaatgttttccagagcatatattacaatctttcaaagtcgcacactagacttcagtggtttttcgagctatagggcatcaggtggtgggaacagcaggaaaaggcattccagtctgccccactgggtctggcagccctcccgggatgggcccacatccacctccagtccctggccaggggtgagaggcagaccagcagatggacttgatccctctgtgtctttttgcttctggctggtagataatgtcaacctgcagtcttgattcccagaccctgtacactcctccttttctgttgtgtgatcagtttgtgctttattctgtatttgtctcccatgtcttgctcttctcctggagaattctgtcttctctttggccatctcaaattgagaacctaaactattcctgcagaactgcctggttggcgtccacaagcaatacctctcgttccagcaggaccaagggagccagcctccagtgagtgactccagcaagtgcagccacctctcccttgatggtctgggagcctggcctcagcaaggggccttcctgacctctggctccagtgaagctgaatgtcctcactttgtgggtcacactctttacatttctgtaaggcaatcttggcacacgtggggcttaccagtggcccaggtaattttttgtttcatggactatggactctttcaaagggatctgatccttttgaattttgcacagccctagatacaatcccttttgataaaagggtctttgcttctgattacaggagcactgtggaacgtctgtaaatatgtttttataattccatgtatagttggtgtacactcaaaacctgtccccggcagccagtgctctctgtatagggccataatggaattctgaagaaatcttggggagggaaggggagttggaacaaatgtctgttccctggaggccagtccagtgctcagacctttagactcattgtaagttgccactgccaacatgagaccaaagtgtgtgactagtcaatgaagtgcgacagcattaaagactgatgctaaacctcaggggagcggtcctgtgactctgtttgagggttctgctggttttgggggtggagtggggagctgggcatccttccaaattcaatcaaggtgagagggtgggatgggcaggaggcaagtgccctgcaagggaaacgtaagtctcccttcctcagccataagtgggttggagaacttctacccagactcggggtccaaaaaaccagagacccaagcacagtggccttggggatcattttttgatgaaggttggagtcaaagtagcggtggggagaggcagggtctggctcctaattctgcctttcttcagggtccctggctttttcagcagaccttggctctggggccaaggggccaacccagggtctggcctcttaattccttatcactccttccctgctagaacgggctgggcgtcctgaaggctggccaaaccggagctcaa

SEQ ID NO: 11402 - DNA, 1072 bp, Homo sapiens
caaggcagggctggttacggttcccgagtgcaggccaccaagcccccttgtctcccgctgtcgttgggaatgtgcaggaggggtacccagcttctctggcttgaccgtggtgccctcatcttcaggatgggccctagctgccgtggcccggtctccctgggctctgggtgggtgggcctgccctgggatggccccagcccagaggtttgtttctgagcattgtgtcctgctccttttcctcaggcagcctctgggggcccccgctgggtttctgtgggtaggaagggtcccccaagaattgctggctggtggctgacttgggatcaggcctgcctgcttgccacgacccctgtataataggattgcactgacccctgcatagggtgggtcagatccccgggggctgcctccctccagccctgcccctctgcacccccatcgttcatcactggcctgggggctcagggagggctgggccagactcctacctcaggggctggcacaggcctggctcttggacgcaggaagcgccgggctttagtggggcgcaggtcctgggtgagggtgcagtgtttgggctgactcagtggaaagcctgccccacaggtggctataaggtgagaagtgggtggggaggaaggttggggagacctcatcagcccaagctggaggcggttgcctaaaacttccacacaccccgatcctttccacacttcgagagaggctctctgcacccataactccagaatctgtcacctccctggtaacacaaatgcacaaggaaaataatccaaagtgtctcttacagctcagaaggggaaatggatgatctgtctcgcggattctcaaaatagctgggatttctccaagcccagtgaactccctaggcctgagctgcgggctggggcctgcacggcccgctggcctctcactctcctctagccactggctctgtgcagggcgggggctgggaggtgttgtcatgcctgcccctggggctttccctgtgctggtgccgttgagggttttgaggtgaccactcaaaagctgctttcagggcagcctggctccc

SEQ ID NO: 11403 - DNA, 1122 bp, Homo sapiens
gtgtcctgccccaactacacctacgaggtgaggggctgccttacccctctctgccctgggacttggggtcccatgtggagggaccagcccctaggatggggcgcctggctgggcagctgcttttgccgcctgcactgcgagcattgggaggtggagaccgcggcctctctgctgtggtggcggggaggcgtgtgccgctgggcttccgccgtatacagccccgcctccgctggaattgggttcccatccctgactcagaaagcaggggcggcgggaggtggctggctgagtccaggacagccacatacacgggttgcgaggctgcccacgctcactctccgcccctgcccacaggtggggtcctggatcggtttcgccatcatgacgcagtgtctcccaggtgagcctgccgccctccctcggcggggccctgcccctccgggccggcagcccctccctgacgcccgttctttcctgcagtggccctgttctccctggtgggcttcacccagatgaccatctgggccaagggcaagcaccgcagctacctgaaggagttccgggactacccgcccctgcgcatgcccatcatccccttcctgctctgagcgctcacccctgctgaggctcagcccctcaacccggtggcattctgggggaggagtggggcccacagctctccagcacccggaataaagcccgcctgccccagtcggactcgggctctgtgtgtttctttccggggttggggaccaccacactgcccttcactctctccccactctcgcgtcggagcagtaagaggggactctggttgaggggcctgaaggcttttatttgactggtccatagggtggggggtgcaccccctacagggccaccttggggtccacttccccgggtccctggcctttggccaactctgccgccttcttctcccgccgcttcttccgctggagcagcctccgctcccgctcaaactccttcatgcgcatcacatagctgggggaaaagcacgagaggggctgtcagggtccctggccaggacacgccccccaagccctgggaagcggaggggccgtcccagagcactgtgggggaggcctctgaagaagacatgtc

SEQ ID NO: 11404 - DNA, 1273 bp, Homo sapiens
aatgaattattattatttttatttttctttttttttttacattttgtatagaaacaaattcatttaaacaaacttattattattattttttacaaaatatatatatggagatgctccctccccctgtgaaccccccagtgcccccgtggggctgagtctgtgggcccattcggccaagctggattctgtgtacctagtacacaggcatgactgggatcccgtgtaccgagtacacgacccaggtatgtaccaagtaggcacccttgggcgcacccactggggccaggggtcgggggagtgttgggagcctcctccccaccccacctccctcacttcactgcattccagatgggacatgttccatagccttgctggggaagggcccactgccaactccctctgccccagccccacccttggccatctccctttgggaactagggggctgctggtgggaaatgggagccagggcagatgtatgcattcctttgtgtccctgtaaatgtgggactacaagaagaggagctgcctgagtggtactttctcttcctggtaatcctctggcccagcctcatggcagaatagaggtatttttaggctatttttgtaatatggcttctggtcaaaatccctgtgtagctgaattcccaagccctgcattgtacagccccccactcccctcaccacctaataaaggaatagttaacactcagtgttgttggtctgtgtctaggtaaggtggggagtggtggcagtgggacttctatctcccccacccagggctaacttgagctcccatcttggggtaaatacatttgacttgccagtctacttatgcttcctcttttggcagatgactaccgattggattagtggttgtcacctgacttaagctgagccaatcagattcttttgctcgagaactttctttaatggagaggctaagaaagttgtcagttggtggagctcttaaggtcacaatcagatttagaaatatcagtggccaattcgaggtggtgggcaaagagacaagcaaacagggcagaagaatgaagctaatattcagggagaatcagaaatgagagctcaaatggctccttgagggctgggggggttatctcggctcccagtgcagttatcaattccagttaattgagtgttcattccattgagatcaacaggtatttattaattgctttctaagtatctgatcatggttctgcatgaatttcacttttacttcatgctcctatgggttttggagataaccttg

SEQ ID NO: 11405 - DNA, 1194 bp, Homo sapiens
ggaggctgaggcgggagaatcgctggaaccggggaggtggaggctgcagtgagctgagagatcatgctactgcattccggcctgggcgacagagcaagactccgtctcaaaaaaaaaaaaaaaaaattatccagtgaatggcaagatttgcagaaagcctggcatgggtccgtatattccagtcccctgtgcaagccttgtctggagtctctgtactctacggtgtgaatgcatggaaggggattgtctcctctgacccctgactccgcccctctctgcctcacccttccccaccagcccggtgtacgagaagtactgcgccgaccactttgccgacggccgctgcgaccagggctgcaacacggaggagtgcggctgggatgggctggattgtgccagcgaggtgccggccctgctggcccgcggcgtgctggtgctcacagtgctgctgccgccagaggagctactgcgttccagcgccgactttctgcagcggctcagcgccatcctgcgcacctcgctgcgcttccgcctggacgcgcacggccaggccatggtcttcccttaccaccggcctagtcctggctccgaaccccgggcccgtcgggagctggcccccgaggtgatcgggtgagtgaccccacctggaaaagccgtggtggctggggagaggagagatgctgttgatccaggtcttgtgtgtttcatttcacttaatgcctttacccaccagatgtcaggagcaccgcctcctggctgtgacaagcaaaaaatgcctccagatggagctagtgcttctggggtagaattgcccaggtctagtgctggcttgtggggaggcaggttgctaagtggcttggcagagtggttaaatacatgtgtagggtttttttcttcttcttcttcttcttctccttctccttctccttctccttctccttctccttcttcttttctttttttttttttttttgagacggagtctctgtcgcccaggctggagtgcagtggcgtgatctcagctcactgcaacctctgcctcctgggttcaagcaattctctgcctcagcctccagagtagctgggattacaggcatccaccaccacaccgggctaattttcttcttcttaaagacatagaagataaagccgggcacaatatattcttgtagtcccagctacttggaggatcac

SEQ ID NO: 11406 - DNA, 1203 bp, Homo sapiens
cctgggatggcagggcttatctgccaggtggggtctccagtgtggaaaggggagcggttgggtgggacatggggaggttgagggggtctcaaccttccttagtcttgacctcttctcttccccctctctccccttgactcttcttttccccactcctccatttcttctcctccttccctccactccccaccctcatttttatccctccctccccaaacccgacccccagccgttctggggtccgcgttgcgagcgggtggcgcgctcctgccgggagctgcagtgcccggtgggcgtcccatgccagcagacgccccgcgggccgcgctgcgcctgccccccagggttgtcgggaccctcctgccgcagcttcccggggtcgccgccgggggccagcaacgccagctgcgcggccgccccctgtctccacgggggctcctgccgccccgcgccgctcgcgcccttcttccgctgcgcttgcgcgcagggctggaccgggccgcgctgcgaggcgcccgccgcggcacccgaggtctcggaggagccgcggtgcccgcgcgccgcctgccaggccaagcgcggggaccagcgctgcgaccgcgagtgcaacagcccaggctgcggctgggacggcggcgactgctcgctgagcgtgggcgacccctggcggcaatgcgaggcgctgcagtgctggcgcctcttcaacaacagccgctgcgaccccgcctgcagctcgcccgcctgcctctacgacaacttcgactgccacgccggtggccgcgagcgcacttgcaagtgagcccatccacccgatcgatccgtctgtctatgcatccatcccagtctgtttgtccgtgggccctgcctctctttccacctgcccatccacttgccccgtctgtttctctgtgcactctatctgcccatcggtgtgtcccacgtgtctgtccgtgtgtctgttcatccatgtgctctgtctatcttgttcttgtttctatctgcctatgcacttctctgccccgtttgtctgcccttttctccatccaataattacttttttttttttttcccgagatggagtcttgctctgtggcccaggctagagtgcagtggcgcgatctcggctcactgcaacctctgcctcccgggtttaagcagtactcctgcctcagcctctggagtagctgggattacaggtgtgag

SEQ ID NO: 11407 - DNA, 2333 bp, Homo sapiens
tggaccagcagagggagttggcccggaagcgggagcaggagcgaagacgccgggaagccgtgagtctggaggcctggtggggaccctggtctaaggattagctcctgagggagctgggaaagggggactggagcctggacagggaggggcagcgggggagccccgtccctgctggtcggcatgtggtcctctggactcagctgtagggccctgagtgctgtgtggacggggtgagcgctatgaggggtcagccacggggagggctacggggctgactgctggtagcgggtatgagggcttgtagctgcagggtggctaggtcatcctcctgactccctccttcctttctcctccagatggcagctaccattgacatgaatttccagagtgatctattgtcaatatttgaagaaaatcttttctgagcgcacctaggtggcttctgactttgattttctggcaaaacattgactttccatagtgttaggggcggtggtggaggtgggatcagcggccaggggatgcctcagggcctggccctcctgcatgctatgcccggggcaggcctgacgggcagctgaggattgcagagcctgtctgccttacggccagtcggacagacgtcccgccacccaccacccctcacaggacgtccgctcagcacacgccttgttacgagcaagtgccggctggacccaagccctgcatccccacatgcggggcagaggcccttctctccgccaaatgtctacacagtatacacaggacatcgttgctgccgccgtgactggttttctgtccccaagaacgtgacgttcgtgatgtcctgcccgccgggagtctttccccacaccccagccatcgccgcccgctcccaggaggccagggcaggcctgcgtgggctggaggcgggcgaggccggcccaccccctcgctggcactgactttgccttgaacagaccccccgaccctcccccacaagcctttaattgagagccgctctctgtaagtgtttgcttgtgcaaaagggaatagtgccgtggaggtgtgtgtgtccatggcatccggagcgaggcgactgtcctgcgtgggtagccctcggccggggagtgaggccaccaaccaaagtcagttccttcccacctgtgtttctgtttcgtttttttttttcttttttttctatatatattttttgttgaattctattttatttttaattctctcttctcctccagacacaatggcactgcttatctccgaaatggtgtgatcgtctcctcattgagcagcggctgccaccgcgctgtgggtagtgtgtgaccgtggctgtactgtatagtgaacatagttggcatatctttgtttgaagtttgttggtgactccaccaaactggtgtgaaaaaagaaaaaagctcaaaaaaatccacaaaaagacaaaacacacaaaaaaaatcctgcctatattttactcagtttcaaactttattagtctatttttaattataaaaccagaaagctacaatttcttttctttcccctccaccccccccccccccacccatttgttggcttttttgttttttaatgtcagatctgttgagttggtttttttggttttggtttttgtttttgtttttgttttttactgagaaaggaagggccaagggatgaggtgggaaccgggccctgggggcgccacagactaaggcagagactcccctacctggcgcccagccccaaccagctggccgctcctgcccatgcttttttttttttttttttttaatttttataattggagcccctggtgaggttacgcgtgccatgagaacccactctacaccacgacgctggtgcctcagtgttggccaaactctggagtcactgactggtttgactttcatacggtgaatatgcatttggtctgtactgatcatggaataaacacatctctctttttttaatgctggcgtctccctgacatttctttgtgaaccaactgttgcctaggctaggcccaggggaccccctggaccccagaccacctctgtacaggaactactgccagggattacctagcccctctcctgtgacctgtccctgtctgccctgggcgggagccacgcagactcatagcaaccaccccaagctgaagctgtgacgcagagcccggtacccatccttgtggaccctggctgaggtggagggtgtgctctagcagaaccctggccagactccagacagtattcttcccctccaccctactccatcctgtcccccctactccatcctgtccccccactcaccaaaggacttgggccacttctcccacc

SEQ ID NO: 11408 - DNA, 1101 bp, Homo sapiens
ggggagctgctggcattgtctttctgggaagattctgctttcttggaccaaatggcagcctgattaccagtgtcgggcctgcatgctgcccccgacacacgcacgcacgcgcacacacgtgtgcacatgggccatagccacaagccagctctcctccagggtcctttcaacctcgctgtccagggaccctgtccttcttgcccgtggggcttccatctggcagagaacgttcagggcttgttgaacttgaaagctcattagacttaagctgtcacctgtgcttggtgccccaggaacagccagagaggacagtgcccactcacttcttgttggcagcctcctgtgcaggaagtgccagccgggcctcgacgcaccagctggctgtgggtcctgaggaggggcgggaggcggccgctcagtgcagatggggactcctctcctctgccctgaccttaccctccattacctccttcactggagtggggctggggggtgggtggaatcagtgttttaatcggatttttaaaaaacattttatttctttgtacaattaccatcctatgtaaagatgaaatttgtgttgagttgaagattgtcatggaataaagatcacaccgtacttgaggccatcttcatgtaaccctttctagagagttttgtgtgggggtgtcttggggctggtgtgttgtgaagctgtgcacttcctgtcttgtcttttactggtaactctgacacaaggctcagaccacatgggccagaagggggtacctctaccaccagcccctttaggcatctggtcctgggggtctgccgtgcacatgccgccttctctcccccactttttaggcctgccttgcctgggggccccagcacttgcaaggggccctggagacaagtcctcaggatattccctgtggcctttccaaggcagctgagacatgccccctggaaccccccacaggccctgctgcgctttgtccctacatcttctcctatgggcctctgctcacagcctgcaggctgtgaggggttagagtgaccatccctcttttacaaccaaaaaaacaaggtttcttccaaggccacgagacaacaggcgag

SEQ ID NO: 11409 - DNA, 1243 bp, Homo sapiens
gctgtaacatgtctcttgacagtagtgcacttggaataataaaggttgggtgattatatcttgatgatacattacttgttcaatacagccactgatggaatgcttccttttttatttttttccttaatttttttttttatttggttgggaacagctgaatactaggaatatatcttgctctatagaggatttttttttgtatgtttcaagcttcagcctttaacctatacctttgtagtgcaccatatggtgtgtgactttcacaggacttcgcagcacctggttcacatgtggcactgaccgcgtcacatccacgcactcccaaaggccagaagtatctgaccgacctacgccactggaaacacacccaccgcaacctcaagaaccagactgtgcagagggcattgcgtcccaatctttagtccttgctgaatcagttctctaatattttacctcatttgtgttccacctctagattacttcaggtttttttcctttaaaattagttactaccactcaaatgtatttacaaagagaatttggccaggcacggtgatgcatacctataatcccagcacttcgggaggccgtggtgagaggatagcttaagcccaggagttcaagaccaacctggacaacatagcaagaccccatctcttaaaaaaaaaggaaagaaaacttgatgtgattgccataggtggaataatccaacataaattgccatagatagaaggtatctgtaatatatatatatatatataaaatgaaatatatgtttcattttagagaaataactattactttagatctttccaaatctgagaaagggaggctagcatgtgttcaaggttagcacgcaacagaatttcctaaaatcagaagaattggaagatcctccccttttgaaatggccctgctgtgtcagtttccctgtggccttttgaactgtacatctcacatgttgggaaacgctggccactgggaaatcattagaaaggaggctgtagaatatttgccgagcctctactgtataccaggggctaactcaccaagcacattctaggaattgggccctgctcatgaggagccttagtggagattccaggtgaatatttatgaaaaagtcaacattagaactgaaaatggaaataaactgcttgaaaagacgatggtgcctctgggtcatttctgctcagcatccgtttgtgttgtgtagatgcgtcttaatcgcagggtgagcatg

SEQ ID NO: 11410 - DNA, 1217 bp, Homo sapiens
tacaggttgcacccacctttggctcttagtttcttaattgttcactgcttatagcttttttgtaagcaaatcagatttctgtaatacagccgtaaagttagagatatatagatctgtatttttatttacctacagtaagtgtggtgtggaaggagagggaatttgaacaaagatcagataggttgtggttccatgcttgtggagtggccctccgttggtggggctggaagtgcgtgggtgcaggggcggggtggggtccctctaagctggcagggtcggggcagcaacttgtagggcactcagagcagcctctccagctccttctgccctgcccgcagctcatgatggagcagtccaagaagtcctccctcatggtggcccgcagtattctcaacaacaagctcatcagcaagaagctggagcgctacctgaaggtgaggcactggtccgggcctgccctgtccccagcttagtccccgcctgtgctccctcccttcagtgtccgcgcccctccccacagggcgagaaccctttcaccgacagccccgaggaggagaaggagcaggaggaggctgagggcggtgccctggacgagggggcgcagggcgaagcggcagggatctcggagggcgcagagggcgtgccggcgcagcctcccgtgcccccagagccagcccccggggccgtgtcgccgccaccgccgccgcccccagaggaggaggaggagggcgccgtgcccttgctgggaggggcgctgcaacgccagatccgcggcatcccgggcctcgacgtggaggacgacgaggagggcggcgggggcgccccgtgacccgagctcggggcgggcggagcccgcgtggccgaagctggaaaccaaacctaataaagttttcccatcccacctccgggtttctctgttactgtgccgcgcgggcggggcggggtgggcagaggggcggggtgcgcatgcgcgcgggccgggccgtcgggcaccgcggtgggaccacaactcccattaggccacggagctggatcgtagcagcccgaaaggccagctgggacggcgagggcgggccctcgtgaagaccagccaatgggggcgcgcggaagtagtgacgtgtgcgcctggtcttccagtagtcgatggcggaggtgcgctgaacgcatgcgtgctgtggtcgcctagtaaacggggctgctggtgggccgcgtcgaag

SEQ ID NO: 11411 - DNA, 1217 bp, Homo sapiens; identical to SEQ ID NO: 11410

SEQ ID NO: 11412 - DNA, 1369 bp, Homo sapiens
cggcgccccttgggggccgggcacactacagccagggcgccgggagccagctagctgcccttcccccagcccgaggactctggggccacagggtgtcttccttcagcccatgcccacctggtccagcaggggcagcagccaggtctctgatggcagccggtctggtcacaggggaggacagcactcccccgtctagcagccaggcagggcgatgtctgccatccgtggccatttgcaaagaccccaaagacccctgttctggttccctctctcccccatgaatatcctctcacacacatgtacatgcgaacacacacaacacgcacctcgtgagacccgggacctgccccggacccccagttcctgggttgaacgaccacatcatgccacggtgcttgctcaggggaagccacgctccctctgtggggcctgctggggcctgggagccccccactgagcccacaatgccacggaaatccttgttggctgcccccgagaggggccttcccagctgggaagagctcagagctgacagctgcctcctgccatgtcaaggccccccaaagagcctcaggggctctggggccctggagggtggggttggggggtgggactctcctcccccactcctgctccctctcccttttcactgttgctttctatgtatagctccctagacctttcacttttttaaaaacgcgttttgtgtagagaataaggaacgtggatctttttattttgcaatcctgggccagctagaagccaggagctgattgaccttttaacttttttcagtggccacattttggttatcgatgtacctagaagtatgtaaattagattaaatttctcttctggaaacaccctggggcaggcggccagcgtgtgtttttctgtcaagtggacaggctggcattggctggcagccggggctgggatcggggcctcctctgtccagagcgccatggaggccctgggttttccagttggccgccaagccgaccagacgcagctggggatgagcccaagttcccagctgttggctctttaggccatggctgggagggggtctctggctggctggcaaagcggctccagtgagcagatgaaccagggttctgggcagcctgtctgggaagggagccaggatcaagaagcagttgaggctagaggagcttatcaaaggcaggagctaccagcgagggtgtcagggacccgttgggagcatttgggtgggggccagtggggttgtagagagctggaactcacctgcttttaatacatgtgacttctagtgagacacatgcacccctgacccaaggaacatgcggggaaaagaggagccactggctcctttgcgatgttattt

SEQ ID NO: 11413 - DNA, 1175 bp, Homo sapiens
gtctgggagagggaggggcactgcccaaggctggggtggctccagggagctggtcctggtggggctgatgggttcctggtaactgaaaccaagccactgacaacctgcagtgattcaggctgggcctttcaggactctaatcagccttcctctctctctttctctcttccctctctcttctttactctcttctctctccgcctcttctcctggctgtacctgggtttccctctctgctttcagcccttgttttctcatctctgagctctccctgcctccagcacctcccatccctgcccctgtccaatgtccccgaagctccccgggctctttttctgggcctcaggacctcaccctccatcccgtgtgccctgcaggatgtcgctgctgagcctgtcctggctgggcctcgggccggtggcagcatccccatggctgctcctgctgctggtcggggcctcctggctcctggcccgtgtcctggcctggacgtacgccttctatgacaactgccaccgcctccagtgtttccagcagcctccaaaacggaactgcttttgaggtcacctgagcctggtgagtatggcagcacgacgggtctggggtctcagggtgggtggacttctagaggggtgggaatggggctcagggagctggatattgagggtgggttggggtctgggacatcagaggagtgagggaggccgaggggagcccctatttcctcactgccccaaccggattcattcctcctctctgtccactccatggccccaggcctttttctttctctctcttccccaccctaagcctgctttggctcaagttcctacttgtcttccccacattaatgcatcgttgtatccttgttctactgggggcttctagggtggactgcacagagcaggtactccctggctgcccatgttttttttttttttttgagacagggtctcgctctatcacccaggctggagtgcagtggtgcaatcatagctcaccgcagccttgacctcctgggctcaaccaatcctcccatctcagcctccccagtagctgggactacaggcgtgcaccaccagacctgctagtttttttttttgtagagacagggtctcactatgttgcccagagtggtctcaaactcctggcctcaagcaatcctcccatctctg

SEQ ID NO: 11414 - DNA, 1153 bp, Homo sapiens
ctatctgcttgtatatctaccgactgaccaacctacctacccatttatccatccatccatccagcgatccatccatccatcctatctgtgtgtccatctgtccatttaatctatctatctatctatctatctatctatctatctatctatctatctaatctatctatctatcatctccctccctccctccccacctacctaccaatccatccatgcatccacccatcctatctacgggtccatccaaccatctatcttattatctatctgtctgtctatctatctatctatctatctatctatccatccatccatccatcatctacatatctatctagagaaagacacagagagaggaagagagtgagggaacagagaagcacatagacacagacacagaaagagacaggcagagaccaatatttcaggtgaaagggctgagaagtttgggggtgtgtggtgggtaggggggtgcaatgggcagtggtagcatctgaggccccctgccagcctggtgtcagccttgtctatccccagatgcggggcaatgaggaggacatgaggctgatggaggatctgggccactacttccgtgatgtccaactctggtggcttgggtctttctaccctgtcctgcatctcgtccaccctacgttcactgcccctgtgctccaggcttcaggtatctttctcaggaggctatgctgcagcatcttccctgcctctgctccctgccttcccaacctttggacaggccatgctgagcagaaaaatggacatatccaatagagaccatggctctgccactaacctgctgggtgactctgggcaggtccctggtgctctctggctcctgaggcctcttttagttctgaatgaagaaaactcaaccctgtgtggtctaagcaaagaaacagaatgcattgactgtaaagtaaaagtcaggaagtaaaagtgaagtccaggaagggtggtcttcaggcatggctggatccaggccatcataatgccagtcttcatctcttagctttgtatccctctgtgatggtttcactctcatgctgctaaagataaatcccagaaactcaacccccatggaaaattccctgtagttccaggaaaatttccaggattcccctaaatttgcctggcc

SEQ ID NO: 11415 - DNA, 1160 bp, Homo sapiens
ccaggacagatcacttgaggtcaggagttcgagaccagcccagccaacatggcgaaaccatgtctctactaaaaatacaaaaattatggtgacgcctgcctgtagtcccagctactcgggaggctgaggcaggaggatcgcttgaacccaggaagtggagactgcagtgagccgatatcgcaccacagcgctccagcctggtcgacagagtgagactccatctcaagaaaaaataaaaataaagttgttctctgaagagcaaatgtctcattccagtaatgacccactcagcaggaatatggtggagttcagtccaattcaggtcagccatatccaaaagaccacaagtcattactaagttgagcaaaagagtttttatctattagcagaaagggcctctctggcagcagagattaaaaactggcccaacttcatttccatacttcagggaacagcaaattgaggatttacttatctaggacttgaattccttctttgggaccaagttaataaaagaccaagaaactcctgattaaactggataatgaaggattctgtagacagggctgcacgtatcggctttgtttgacttctcttttctcagttaacatctcagagctagaacattccacattccccagcagcgtgtgggggctgactaaagtttacaattccaactaaaaatcaccctgcttctggcttatctgaatcccttacccaccccaccccaccaccctactcctatttattcagcaccacactacccaggaaatacactagcaaattgtgcaatggaataaaatccacactttagattcttgcaactgtatcatatgtaatagtatcactttttctacattttggtcaaataaatttttacataaactacaatttgcgtgaattttagaatgtgtgggggtacacagagcattttggttcaacaaatgttaaagggatggaaagggaaaataaccagagccaagaatgtagacaaggttatctatttgctttatactgtgacttcatgatacaaggatattacagtctcattgcaggcgagagcactcagcctcggtcactcgaaaactcctggccttccttatcccctacgctgcctaagccaggctgtgaagaatgagtaggattttaagagataaaag

SEQ ID NO: 11416 - DNA, 1831 bp, Homo sapiens
tggttggatggctcgttggttagttggttggtttggctggtttgattggtttggttgtttggttggttggttggttggttggttggatggttggatggatggttaggtggatggttaggtggatggctggttgattgtgagacgtagtgctgattctcagtgataacctcagaaaacctcttgtgatttcaggaaggcaacagcccccaggggagcaaccagggagtcaaaatcacaccggaccagcagaagaggagcagctttttccgatgtgttcttctgtgaggaacaccgccttactctgagcctcgctcagcccagctgactgtgcctgttctgagtgagcccctcactcagccggggccctcccacctccaacgccccgcccacgccgcggccaccgggcccacggccaccagaatgcaattgagaaatcgtttattttagtaactgtctgatctttttcaactttggagatggaataagttaaaaatttgctatttttcctgtaacatctgctgaacgggcccacccacacgttgtatattcagagagagagagggagtcaaggtgtgaccgtcgaccacagccagtgtcaggcctctgcctctgggcctttgctttgtggcctcactgcaacacaaagctccaccaggaggctggttcacgtcccctaccacggaagcgaggtcccagaaggccagcggtggttccaggagcaacagctcccaaaccctgagcaaggcaaccgatcgccaggaccaggaagcatcacccaggagatttggcgcccacttccacctcttctctcagttttggacaagtgacaaaccattttgccccctcactcttcttttttaactgttaaaccaaaggaaagcacaaatgaaggaaatcctgtgtaaagcattgagaaggaaagaagcctggagcagcctctcctgtccacagccaggggttaggtctgcaggcccgtctgcggtccccatcgagcatcaaggggacgctgtgtgtgctgcaagtgaccccgaaaacaaccacagccgtcacatggtcctcctgaagttggggcaccctcctctcagcaccaaaatggcccccactccttcgtgtcctcccgctatctccaaatcggacgttctttctagctgagatttttatttttccacatctgtagtgccatgaagcgattctgtctttgacttccaatggcaaacctgggtgatcgggaacaagcacgttgtacccttggctggacatggccaagacacaaggcattccacggcggcaagctgaccgcacagcagtctggcttgattttcagccgtcatcattgggttctgttttgacagctctgctgtcccatagggactgcgactgggaccaggtcaaccacgccaggggggtgtcaccagccttttctttttttctttctttttttttttttcctccttaagctgctgtcaatccaaaccattggcatcatcgtttcttttgaattaaaaccaacatatcagcaatagtctgctctccccgggaatctctaacatgctctgtttacatcgataaatgcacttaaggaaaacaaacaaattaaagctcatcttaaagtccaaggatttttatgtccacattttccctgtaggccacacggacatggccaggtgctgggggtgggtctggacaagatggtagagcccatggattaccccatcgagcggccacctcagaggagatgccacccatcatcaaaagactaaattgggaaaagaagcctcctggcttggtgcagtggctcacacctgtaatcccagcactctgggaggccaag

SEQ ID NO: 11417 - DNA, 1617 bp, Homo sapiens
gcatgtaacgctctgaggccagccagctgtcttctcctggatgagacagactccagagggtaaggagctagcgccatggtggcctgcagtatgcagagccccgcaggacccagcgtgggcgcccttccaagcttcctctagctttgggcctatgctgtcccctgcaggccctagggaagccacttgcaactatgcggccttcagacttcctcctcagccacctggccactgagacagcatagcctgggtaacggaacagccacctaaggcaagaatggaacggacacaccttgctcctttctgagcccgtttcccaaaaccccccttccaggtgcttctaatgggtgttgccatagcagacgctgctaatgcatcacagcattctttgaaatggaaccagacacagcctgcctctcaatcctcagctgggggctcctagcagcctcttgtatttactcagagttgacacatcacacagatcctgtttggcattcctaccttacggacgtctcaggggtgacaggaccagggcagagccccggtacaaacagacaaggctgcagtcaaatgggagggtccaggtgtccgtgttggagggctgggatcttgtagggcctgtgcgtcctggctgaggatcaaaccacatatgttattgggagaaacgatttctgttgacgtagatattgaaagaataatgaaggcagaagagaaaaacgaagtgtggaatttggggttgtcctgtgtaaattacacaataaagcaaaagtcagttattgtaagtctgagtgtcttctttttttttttcccagacagagtttcactctcttgcccaggctggagtgcagtggcataatcttggctcactgcaacctccacttcccaggttcaagtgattctcctgcctcagcctcccaagtagctgggactacaggcaaccgcgactacgcctggctaatttttgtatttttagttagaaacgggatttttccatattggccaggctgatctcgaactcctgacctcaagtgatctgccgcctcagcctcccaaagtgctgagtgtcctcttataggctgtttgtcaccaaaatgtcttttggatttgtggcacagaaaaatattcatactggaaaacggcaactcaggtggaaaaatttcgatggcacatctgttcccgcctatggttcacacctaagagagatgacacacactctcattagcagtggcttttgccagtgattctcccatggcctggtggaaagacagtttcagaccttttccttccacaagctagcagcaggagtctgcattatgtactactgtggaaaccctttattagtatagtggaaaggtagttatttcagctctttccctgcataacaaacgtctccaaaaggcagtggcttaaaacaacaaaaatgtatttttattttattttattttattttattttatttttttgagatggagtcttgctctgttgcccaggctgcagtgcaatgacgcgatctcggctccctgcaacctccacctcccgggttcaagcaattctcctgcctcagcctcccaagtagctgggattataggtgcgtgccaccacgcccagctaatttttgta

SEQ ID NO: 11418 - DNA, 1624 bp, Homo sapiens
ggaagttggggagggcgctcaggcttgggactcctctggggacaaggctcaggaccttggggagggagtgttcgctgggaaaccttgagagattccgtgtcttagaatgctggagagagggtgcatgcttaggacccgtcggggagcgtggctgacaacagtggggagtggaccttgcgctcctccgaccccctgggggtgaggatccggattgtggggggagttggggatgtagggcaaggatccctcaggggcgcaacactaccgcggggagcgcgtcaaggccctggttagggataggttgcgctcgccggggtagccatacgtgccctgtcctgggaggggaactgacgcttactctcgccccctccctgcaggtgagaagccctaccactgcaactgggacggctgcggctggaagtttgcgcgctcagacgagctcacgcgccactaccgaaagcacacgggccaccggccattccagtgccatctgtgcgatcgtgccttctcgcgctccgatcacctggcgctgcacatgaaacggcacatgtagccgggacgcccccgcccacctgcgcgcggccgtggcgggtcccacgcgccgggcgcggccccctcccaaactgtgactggtatttattggacccagagaaccgggccgggcacagcgtggctacagagggtctccctcgatgacgacgacgacgacgccaccaccccagcccccgtctgtgactgaaggcccggtgggaaaagaccacgatcctccttgacgagttttgtttttcaaaatggtgcaataatttaagtggcatcttctctcccaccgggtctacactagaggatcgaggcttgtgatgccttgtgagaaataagggccttaatttgtactgtctgcggcattttttataatattgtatatagtgactgacaaatattgtattactgtacatagagagacaggtgggcatttttgggctacctggttcgtttttataagattttgctgggttggttttttttttaattaaaaagttttgcatcttttaaaaaaaatcacagcactggtctggttgcttggaactggggccttggggcacttgggaggaggggggagcggagagtttgatggagggcagccccactaaagcatcgtgtgcagtgggtcctgcgtctgccagcaccgggactgccagctgctgtgcctgcctgccaggaacctgtgggtttttctgtaaatttagacactgcattttaggactgagggagggttattttaaggttgttctttgagccataaattgcctctttgccccacagctggggaaagtgctggtcccactgacgtggcctcctctacgttgaaaaaaataaaactacttacctcttcctggaagcctctgaggttttagccaaatttctggagtgccagctctatatttttatttttatttttaaagggggttaacctgctgagtttctggcatgttctgccctttactcgtctcgacatttagcaagtcttttcttaaggggtgagttccccattctgctagcggaaaacagtgaaacctgcattcgagggccatgcatgaagctcttttccagatgaggaaacggaggc

SEQ ID NO: 11419 - DNA, 1284 bp, Homo sapiens
tcccagatgctggggctttgcgcgagatgcgtgggtcccagcgtggctgagtgaggaggaaggtgaaatgcgaccccctgtgagcctggcggtcgagccttgagctggtggagatagacagactgacaaaaagtctgaaggacccataggctgtccagtgggcagtcttaaacatgcacacagcgttgacacctgcactcatggaaatcacaatgaaggaacaagcttttctgtcatctctccgcctggcacatggaacatgtctgatgtcccatgctcccatccagggtttgtccatcccagggcacccagaggtttctagaaccctgctaggcctctgtgccaggaaatggctgatgtgtgaggccaggacaggagaactgaggccgcttccttctgtcctctgggcagccaattctgctagaatccaggggactgcttgatcaggctggtttctggacattggaggaaagggaggccccgggtgggtcacttaacctccctgagcctcagttttcctgcctgaccatgggacccactcaggcctagcaggtgggtgtgtgggtgaagcgccttgcacggtgacgtgctgtatgtggtctgtagcccccatccccaccctgcggcacagggaccgggacgcaggcttctgccatatgggcaccttttccaggaaagacaggctgggcagctgaggtggctgcacacattctgggagtcattaattgggcccttttctccctgtgaggtcacagtttagtggaaatcttttccgttaaaaaaagcgtgcagggagttgaacttcaaagagggctccagcgtcctctgtgggtcatcgctcatacaggaccaaatgtgagtttgggtctgagtcacgtgtggctttggtgccatctcttgtgttctagaggctgcagttttcaaattccgtgggagctgcttgtcttattttgtttaaaggtcaattgaggtgaaattgacatttggtgtggctggcatgcagtgtgggtgcacgggcagacaggtgttgacctggacagtcacaggtggacccctccacctgggaacctgcagaggttcctcgagggagagttccggtcacagcgtacagctgagtagcccacagttggccatctgccctcaaggccacatactcagttctgtctccatctaagccagaaagtgcactctggggaccaccaagggccatctcctggggcatgcatggagctttggtgtgggcactaagttcttcttgcctggaggtcttttcaagaaaggtgt

SEQ ID NO: 11420 - DNA, 1633 bp, Homo sapiens
tcagagggcttctcaaacttaaccaaaattggatcagtttctgctcattgtggaaaccccacattctactaatcagggggcaggggacatctgaggggcatgtgtctatgtgtatgtgtgtttccacaaggaacaccttgaaaagcaaatgtgttgctaaagatgaggaagtaatggcaagcagcgccccagggtgttgctctttcaagtaagaattggcctctcctgaaattttggttatgtttaaaaacctctgcactttactctgacctcatgaccctggagttgtgatcaggcctggggcaggggactgtcggccccttacatttttgagagctcttgagcccctgataccaagacaggtgtgaccttttccttaggtggtcacatcccccctgttcacaccagagtctgcccctgcagcctcgaacctggggacatgtagtttcccatttcgtcttggtgctgttccgggagcggatgggccgggccgcgcatgtctggatgtttccttggtgctctgctgcctccagcagctctctccgtgctgccaccctctctcccagggctcctccctggagcccttctgctcctgggcctctgtacgtcatggattcctcttcctccctggaataagagtgagcgctcgtgctctctaaacaccacacttgcctctttatgttcaatgcttgatgtgtttcttttctcagcagccaagtcctcagtcccaaggatttatggggaagcacacgcgtcccctgggctgctgggaaggcactgctggcgagctcatctgtctcttgtgtctggcccccgctgggtgcaccgcctccctctttcctcccatactctcttttctcgtggactcgtaatgaggtggtttccatagccgcccccgggcccgtcatcatcagctttatcgtctaaatttaaacgatgagcattcatccttcatgagttacgagaagccagaactcctcgctttgctccctggctgttcttggcgtgtgtgtttccgtctcacaacccggctcctactttccccatctggcattgtcccctggcaccgcttttggcttgtcctgctcagtcttcgttcagggaacagcttcctcttaaatgtcccttttgcaggtttttagaaaccggttttcttggataaaagttggcagtgaagtggcagtttgcaagtggccagtgattcccccaactccaaagacagatttttacctttctggttatttttgttcatcttttgggcagggcaaaggttacctgagacacaattactttgggaatgtagattaagatacgttacatggaaacttgcaactggcatccgaaagaaaaactgtttttatcctgttgtacaaatacagtttttaaagcatttttctggcttgtttctatttcttaataaatacttggaagagagatttttgtttactcctgaacacttcaagactgcttcagagccgagagagaggtgtcttagttctcccttgtgggtcgaagttgggggttttaggtccctgagaatagtgtatccacagtggtacatctggaacttcctatgtttggacagttctactcaggttactaaattccatgtgaagctcacgcagtgtgactt

SEQ ID NO: 11421 - DNA, 1479 bp, Homo sapiens
cccatcaagggcggggacgtccgggataagtgggaccagtataaaggcgtgggcgtggctctggatgacccctatgagaactaccgcaggaacaagagctactccttcatcgcccgcatgaaggccagggacgagtgtaagtaggcgcccatgccgggagccgcgccggtggccagcggtgccggctgtgggaccttcctggctgactggcagaggaagattgcagtgacagctcagttcttacaccgtctccacttgtggagagccacaggaagagaaggaagaccagcgcatgcccagtgggaacgccgtgctccatggcgtggagggcacgggtgccacccacaaaccacaccaggaggcgctgcagccaccagggccccaggctcgttttcctttatagcgaagcaaaaaacacaagaccctccgcccgagtaaattcttcagccacgaagggatggatgtgcatctgccctaagtcagattgaagcctcctcctaggctccaggaggagcatgtgcaggaagggttggcctgagccagagccggcaccccagctccttcctccagctccccgcacccaccggccctgacctggcttcccctcggctgtgtagggacaaagccgaagcccagtgccatgactgcccgcggattgaaaaacagaaacacaaaactttgacttgacttgcgaagtgaagcagggttttcatttttactctccttggtttaggtctagaaagaagaatactgacctgagaggaggcccagtgagattctgaaacctaattcttcgaaggcgtactggcccttagttcagttattttagttgtataagttgatattttttttctggaatgtagccatttgctgttatctgggaaacaagattctaacaggaaaccagcctaagacacttcaggttgagcgctgcctcggagtctgtgcccgtcgcgtcccctgcttgagttttgcacttggaagaaccctgcaccggctggcgtgtgcgacggcccagtcccatccagagcatggagcccgaccccagccagcgccttccactccatcatttcatttcacacccccgaagggaggggaggccaggaggggagctgctcctgccagaagctggtgggtgaccgttgggaatcggccacacctggtgtccatgggcagcctggtgcaattccattcatttgtacagaaacatttttgaaaaattcttttcaataagatgcaaaatcttccaacttttcaacccaacgtgatgaatatttgattttgttctagatttcctgtagctgtgaattgttaaaatgtatgattcaggataaaacgtaaacacgtgctgttagtaatttcttgtggatttcattgttttgccttcaaataaagcctttttttaaagacctttctcccgcacatgtgtaagtcagaagtgtgcacgggctgagtgaggagacacatgtcctggtttga

SEQ ID NO: 11422 - DNA, 2317 bp, Homo sapiens
acttcacggagccatgggcagcagggagagctgcgggcgggggcccaggcaagccaggcagggcagggcctcaacaggaggacagagacggagcagaagaaggatacaggccagggggctccagggccggggctgaggctgttctgagcgggggcccagggtaggcattgcaagcaaagggtgacgtgaggggcccgctgcatgtctgaataaaccagagggtgttcaggtcacctgagtttggagaccatgtcccctgtgggtgattttctgaagagagaaccctgtgactgtcatcagcctcagagcagctatgacccaccatggttggtgtggctgaggtcctacaagagagtgggatccccaagagggaagcatgaggagctctggtgcccagggtacccttgacactgaacctgggccctgccctgaccccactccttgcagaccctgggtgggcctgagagggctctgcccaggcatggtgacagctggggttctctgctgcagctggaagatcacgagtacaagcctttggaccctaaagacatccgcctcccaccccccatgccgcccagcgagaggctgctggctgcagtggaggccttctacagccccccgtcccacgacaggcccaggaacaggtaaggggcccaggtcagtggggtgggcgggaggcctctgtcccctctcccggctccctgcaaccacaccttctgtccaggctagaaaatgtggctgtccctcaggagaaactgccctccccccgcctgagtgacaagtgtgtgtcacaggcacagcacacacgtggccctcaatgaagggcgttttaatggagacacatcagaagaagttagggaaggtgtggcacggcggcacgtctcaagcagccggctgccacagggccctcagcccacccttcccagtggtcacccctccttcctgtgctgggctgcaggcctgtccacccatgagtcagtgttcctgtttcccagttccacagaccatgggtccccaccacctcagcggaacagcagggtggcaagggcgtgggcaccagaggagccactgggctgcaggaggacagccctgtgggaacactgaaccaagctctactgcgcccatgctcggagcccacagccacagggccatgtactctccaaggttctgtggattaactcctgatgactttttcacgacttccttgtgggtgggtgtcacgtggtcacacacggaatgccgtgtcttacagtgaaggctgggagcagaacggcctctatgagttcttccgagcaaaaatgcgggcccggcggaggaaaggccaggagaagaggaacaggtaaaagcgcagatgtctgcagtggccggggggccagggtccacagcttgtgatgggtgggagcagaccccagatacactcatcacgtccaccctcacacagcctgtgcctatggggcggtgttttccacaaggcctgaattcacacagcagcaggctcggccacactatttaggaacttggtaccgttgctgtggctatggcgccacatccacagccagagcccctgcatctggggtggtctaggaacctgagggccagggtgggctgggtgcagcccatccactggggcacctgatcatcaggcctctccccacagcggaccctcgaggtctcggagcagatccaagagtcgagggcgttcttcctcccgctccaactcaagatcctccaagtcttcaggctcgtactcaaggtcaaggtcgcgctcctgctcccgttcctactcccgctccagatctaggtaggcagaggctgcctcagggcagtgcctgaggcctcttcctgtggcctccccacgacgcctggctgctgctgacccttgggcacccttccctgcagaagtcggagcaggtcgcgctcctccagaagccgctcccggtcccagtcgcggtcccggtccaagtcgtactccccaggaagaagacgccggtcacggtccaggagccccaccccgccgtaagatcctgtcttaagtgctgcgctggtaactctgggaagctgcggtgctttgctgtgaatgtggaaacattggtggttaggagactgtgttaggaggccgccagcattagcccggggacagtggcacccctcacccttcaccacagtagccacttggcgaagcctgaggcagtaactggggtctgctttctaaccaccatctgggttggaggtgtcctgctctcaatgctgagcgtggggtgggggccagcgtctggagcccccttatctagctgagacaggataaacgggtagagac

SEQ ID NO: 11423 - DNA, 1159 bp, Homo sapiens
gaacacaggcacacactaccatgctcaactaatttgtattttattttttgtagagatgaggtttcgctacgttgcccaggtggtctggagctcctgggctcaagcgatcctcccgcctcagcctcccaaagtgctgggattacaggcatgagccaccgcgccccgcctttgttttttgttgagttggtttgcagaggttgtttgttcctctgggctgcagtgttttccttggttacctggagggcaggtgttgtctcctggtatgtcctgtcagtgccctgcccactccaggagggactgtcacagattcacggcaggcatgagagacagaatctcctcctgctggggacaagcaagggagctgatggccagagcagcccagagtccgggcatcgccaccatgtccccaccccgcccctgctgagccaggccggagggctcaggctgcgggtccctcctcatgtgttctcgaccccaccgacccccgcccgcaggagcaagtgacagcggccgtggcccacgcggtggagcagcagatgcagaagcttctggaggagacccagctagacatgaacgagtttgacaacctcctgcagcccatcatcgacacgtgcaccaaggacgccatctcggtgaggggccagcacttcccagagcccagctttcccttggtccctccctgaggcagggcctgtcgtagccaatctgggctaagggctgttacaatgggtgcccttccctcccgcctggagctcctgaggctgtgggaccctgtgccccccacgctcatggtgtgtccttccctgagctgatggtgacgcgctctcagggatgcagtgggtgcctgggggagccgcggccctgctcactcgtcattggctcggttgttgcaggccgggaagaactggatgttcagcaatgccaagtccccgccgcactgtgagctgatggccggccacctccggaaccgcatcacggctgatggggcacacttcgagctgcggctgcacctcatctacctgatcaatgacgtgctgcaccactggtgagcgccgccaccccgtgcccagagcgccacttcctcgcgctcctcctcaaccctcctgggtggccgcttgctccggtcggtagcttggcttggcctgtcccgagactaggg

SEQ ID NO: 11424 - DNA, 1266 bp, Homo sapiens
gttcaggtgattctcgtgcctcagcctcccgagtagctgggattacaggcatgcaccaccacggctggctaattttttgtgtttttagtagagacagggtttcaccatgttggccaggctggtctcgaactcctggcctcaaatgatccgcccaccttggcctcccaaagtgctaggatgacaggcatgagccaccgtgcccagcctgattgacaatggcctcttgaaggctgggttttcccagccggacagtgcccgccccacatgctccactcccacgctttcatctgcaggcctgccttcctctcagccacctcactgctgagctctgtggtagagaatttcctttacccatcagggtatggtctggctggtaatactgactccaacccagctccttcattttatagaaggaggcatttctgaatcatgtttgttcaccatggcgagactcactgcagaatttttaaccaccttattttaagtcattcattctaggaacagtcaagcccctaccacaaaggggccagatccgttcaagtgaggaagcacttgcagtttctgaattttgctgtatatttgtcctatgtcacccaacaggccctttgctatagctgggacattaccagaccccaataccttagggtctcacagcctgaaggacacagagcattgaattattaaaagacctgaaaatattataatgtttttcaattgtcacctgttttcaagacttaaatgctatagacttttctgcaggaatgacgtgtatattcctcactggcatttaccaaaaataaatgatggtttccagggaatcaaaattggtcccgatttgtcagcgagggtctctttttgagtggccctgtcttcagtgtgcccagcaacaaaatgtggaaggaggagaaagagcaagccaacttggctgtcacgtctggatttactgcaacctttgttttttcttctgagccaaaaataaggacgtgcaatttgtgaattgattagatgatacaatgaaaataggatcacagctaaattaatgacgtgactttattgaacggaataacatgggaagtccaggaacattgtggcagctgtgcttatgaaacttttttttttttttttggtatgtttcatgttttttgagacaggatctcattctgtcgcccaggctggagtacagtggcgcaatcccggctctcagcagccacaacctcccagactcaagggatccttccgcctcagcctcccaagtagctgggatac

SEQ ID NO: 11425 - DNA, 1225 bp, Homo sapiens
agcgtgcgcccccagtttgcagagcgagtttagcccaagagcttttcacaaatggtttctttccctaaaaggccttttacctttggtgtcagccgccgccagccatcaggaatcaggaatctagttagcggttgcccttgtatccctggtcgaggccctgatgtttggcccacgcacagacgccgacgctgcgaagccctccgcgcttctgttcgcccgtcccgttcgagctccggctcccggtcactgggaccgcccacgtctcaggtggcacagcttggacgcaggtctgtgtccccttcttccgcttccggcctcggctccgccggaagcgcatctacagtggactgggcctgcactcgagacgtggtggctggcgcgtcggccggcgcggagggatgacgcgaggaggcagcgaccaatgggaaacggcgtagaccggggcgcctgcccccccgcccagccccgcccccgcccggcgtcgggccgtcggacgggctggaaggggcggccgctcgggcaggatggcggcggccgcggtgggcgcgggccacggcgcggggggcccgggcgcagcgagcagcagtggtggggcgcgcgagggcgcgcgggtggcggcgctgtgcctgctgtggtacgcgctgagcgcgggcggcaacgtggtcaacaaggtgatcctgagcgccttcccgttcccggtgaccgtgtcgctgtgccacatcctggctctgtgcgctgggctcccgccgctgctgcgcgcctggcgcgtgccccccgcgccgcccgtctcgggccccggacccagtccgcatccgtcgtccggcccgctgctgccgccgcgcttctacccgcgctacgtgctaccgctcgccttcggcaagtacttcgcgtccgtgtcagcgcacgtcagcatctggaaggtgcccgtgtcctatgcacacaccggtaggttccgcgcccggcctcgggggcggcggccgggcccgccgcttcgggtttgggcgcatggataggagtgcgccgcccggggcgcgtcccgccggactgagaagtcagcagaggggctgccaagggtttggtaggggagggacacgcacggggttctcagggagaagaggagctgagaagagagctgagaggtaagcaggacagaccacaacagccgtggcaggaggaagccctaccgaaagagaaggggcgaagaggtgtgaggggctgccaggcc

SEQ ID NO: 11426 - DNA, 1160 bp, Homo sapiens
gcagaagccgggtgggcgggcaggcaggtgggcaggtggccggggcccagctgcctcctgcgctgggaactcggggagtccggcccaggcgggagggagggggcgggagtcacgcggtctctctgcgctcttccctcaaaactctttttgtgaaatgctgctaccagtttactaacaaaattgcgaagaaggaccgcgtggaaggaaggacggcaaagtgagttcagaactctatagcaaaccagctataaaaagcgttagtccctcacccccaaagaggtgcggacactttccagcacctgaaagctggggcctcagttgcaggcaggcacagaaaacctgtgggagaggtcacctttaacacagcaacagaagcacgcatctcatctctcttgcattttctgttctttaatttggccctgagtgtcttgagacagtgggccatgccactgcctctgtttgctccctacccagccactgtcaggccagtgttgtctgtcatgtgccagaagcttctcagctgtggtgagccactggcattgggcaggcgggccagctggccagccagtgtgacccacactccatgggcagccacctgtttatatctggtttcagttataacccagtttttaaagaaatgctgcaaaaatttaagttttctcatgtttattttaaacaattcctcttccatcagaccaccagacaaaaaaacctttcctttcttcctcccttttcttttttcccttcctgtacacatctagaaaacttcacctttctagagtccccccaaaacaacacaaaagttattgtgggtgctactggttttatgctgtactgtggggcgagggggaagacctgtctgtacgctggaaacactcataaccattcctttagattcgtttgccttatggttatttgtcataaacgcgatttgcaaaaacaaggagccttagtgaatgtacagtacctagacttctgtgttctcaggacgcagaagggagcaactttgctatttggtccagtaagtggacaccttgtgatataaatgtggaaataaaaaaaaaaaaaaaaccatttgcacaaaccagtctgagaatcttttctcatttggaccttcacaaccaaatcagccctttcctggattgtggattattagccag

SEQ ID NO: 11427 - DNA, 1413 bp, Homo sapiens
tctctgccaggaccccatagagtcacagcttttggaggggttcacagaatcctggcagcagctccagtcaagaatgtcactggttggcatgatattcttagttgtatttttccttctttaaaattgcatcttgaccaggcacagtggctcatgcctataatcctagcactttgggaggccgaggcgggcagatcacctgaggtcaggagttcaagaccagcttggccaacatggtgaaaccccatctctaccaaaaatacaaaaattagccagacgtggtggtgcacgcctttaatcccagctactcgggaggctgaggcaggagaatcacatgaatccaggaggtggaggttgcagtgagctgagatcttcccactgcactccagcctggccaataagacctgtctccagcaagaccctgtctcaaaaaaaaaaaaaaaaattgcatattgactcctgaagaacttcaagccatgttgagatccattcatttgatggacattttctaagtacctgtgagccaggtgctgccatttcaaagtctcttcttaccacgctcctcagtggctagacattttcacgtggccagaaagtcccgactcttgctgggcgtccctggacaagttgccttcctcctctgagcttggcgctccccatctgtatagtggagacccttggcccccctctgtacggaagggccgatgcgaagctgcagttaaaaaaggctcacatgctcctagcctcgtgcagtcaggaggggagaccaggacagttggaaattatgattgcaaatggctttgcattttagatcattcgtgtgtgtggatcagagaaacgcacaagttccctggcacaaaggaagccctcagtagacacgtctagggcaggcttgagagatcagatggcgtgaaaggcttgtgatctgttcgtctcaggctccccctaaaccaaagaaatggaaacagctggttggggttccacgatccagctctatcaaggggctctgagtgtgcacagttgggacctggatgtatcaggtctccctcaggctggagtccactgtcactcattcagccattgaacaaacatacagatgcttacctgctctgtggtcagccttgtgctgctgctgggcgggccaggagcctgcttcagtgtgagcgaggtggatgatattatagctgaagggtccctcctggtcaccctcatctcagcctaggtcaccaggatgtctgagaggggtgggtgcatgggacgggcgtggccagtctcaggtgaggtttgggcccagacctcgttggagtcccagacgttgccaggctgttggaaaattgccttgttcctgtgatgcctgggagttaggtgggtcctggggaggtttcatcctcttgcttgtccacctcagctcggtgt

SEQ ID NO: 11428 - DNA, 1230 bp, Homo sapiens
gcagctctgcatgctcaggtgcatgggtccagccacgtctccggtgctgaccacctcccacatgtgtccttagttcacaggaaacgggccgtgcgagatgcacagcgtgcagaagaacgagcacgacaagaccccggagcacagcaggaagcgctcccggccctcgctcctccgccccgtgtctgcacccgccaaggtacctgtgagccacatgcagccatgcctgcacgcggggcccccagcaaatcgggccttcccagcatgtgaccagggaacagaggccccagcaggggttcggggctggaccgggggctgtgtgaggttcaccggcagtgggaccgttggaagtcagctctcctctaaggtggctgttcttccgttctccctgtcctgtgagattgttttgaaaaggaggaggaggaaggagtgttaaccctgccctaggtcccaagaaacagggtgtaccacccagtctccttttcaccctcaggactctctcacaggcaaggccgccatgtacgtttgttcaggttggtcactgcacagctgagggcagagaggggctgggatccagctcctgtcacgcctttcacctgcaatggtggttttccgattccattattccttgtgcagttactacttggctttctactattggtgggaactttgtcgtcctcccatttatttagttatgtatattagatatggactctgggttataatccattctagtgttgatgtccatactgttccagattgggccagcggggtccctttggctcttgtgtcctttttttctttcctttgagacagagtctcgctctgtcacccaggctggagtgcagtggcgcgatctcggctcactgcaagctccgcctcccgggttcacgccattgtcctgcctcagccttcctgtgtccttttggcatgtcctcatcattctttctcctgtggggggatggggtttcactctgccacctaggctggagtgcagtggcacagtcagccttgacctctgggctctagctgtcctctcacctcagccttccaagtagctgggaccacaggtgtgcaccaccacacctttttgtagagatgaggtttcatcgtgttgcccaggctggtctcgaactcctgggctcaaacaatcctcccgcctcagcctcccaaagtgttgggattacaggcgtgagtccctgcacccagctcatcctcattcttcaggcactt

SEQ ID NO: 11429 - DNA, 1239 bp, Homo sapiens
gagccatcatgcccggccccctgttcttacccacagtggcgagtggtgtcccctagtcacccctgtgggctctgtgttctctagctgcctcccacctgtctgacttgcctttgtccccctagacgcctgtggcctctcagacccggcccacgttgagagcctgcaggagaaggcgcaggtggccctcaccgagtatgtgcgggcgcagtacccgtcccagccccagcgcttcgggcgcctgctgctgcggctccccgccctgcgcgcggtccctgcctccctcatctcccagctgttcttcatgcgcctggtggggaagacgcccattgagacactgatcagagacatgctgctgtcggggagtaccttcaactggccctacggctcgggccagtgaccatgacggggccacgtgtgctgtggccaggcctgcagacagacctcaagggacagggaatgctgaggcctcgaggggcctcccggggcccaggactctggcttctctcctcagacttctattttttaaagactgtgaaatgtttgtcttttctgttttttaaatgatcatgaaaccaaaaagagactgatcatccaggcctcagcctcatcctccccaggacccctgtccaggatggagggtccaatcctaggacagccttgttcctcagcacccctagcatgaacttgtgggatggtggggttggcttccctggcatgatggacaaaggcctggcgtcggccagaggggctgctccagtgggcaggggtagctagcgtgtgccaggcagatcctctggacacgtaacctatgtcagacactacatgatgactcaaggccaataataaagacatttcctacctgcacagcctccctggtctttatttttattttttatttttgagacggagtcctacttcgtcacccaggctggagtgcagtggcgtgatcttggctcactgtaacctctgcctcacaggttcaagcgattctcctgcctcagcctccccagtagctggaactacaggcacccaccacgatgcccagctaattttatttttggtagagatggggtttcaccatgttgaccaggttggtctcgaactcctgacctcaggtgatgcacctgaggcctccaaaagtggattacaagcgtgagccactgtgcctagcctcacttactttcttttggtcaaccttaatctttttttttttttttttttttttttttgagatggagt

SEQ ID NO: 11430 - DNA, 1448 bp, Homo sapiens
agttcttttctcaccgttcccgggcgagcatccgatctgtccgtttataagcccctactctgcaccccaggaacatgcagggtctctgtggagcccgtctagacggtctcagttcccagctgcccaaaacagaggcccaaaggcccagagagaggtcctggtgcctgctttgcgttggacatggagggacgctgcccgagttgggggcactgtgggggaactgtggggctagggtggggaccgctgagttcggatcggagtggccccagggagaacggctgatggaaggcttgttggctgaggccaccaaatagggccccaggtacccgagggtggagtttggccccaggtcccgggtcagggctggcctggtgtggccatgtgtggcagagctgccttgctccctcctccagcacaaagtgggccactagactttggcctcattcttgctgctggaaaaccgcctgctctctggtcatatctttagggagggtaagggaggggggctcaggcagttttggggtcccaggagcttcctgagggtggtgtcagggagcagcaattttgggtggggggggccttgcttggagctgacaggtttgtgctgtgtcagttgtgtgacctggtgaaatcaccattccattctgagcttcaaatggattgagcagggtctcgctggggcccagcctgggtagtttgatgccagcccctccagagagaccccagctccaagtctagctcctgagaagcccccagtctggaggagacacagtgagacagatgccccaagtctgtgggatctggggtcccagggagagagcagaggctctgcctggaggtcagagagggctgcctggaggaggctaggggacatgagccttgaagcatggagttggcaggtggaagaaaggccacagggacatgccagaatgtggtccagacaaaacacttagtggcagactgggggagctgtgctgtaagagggggactgtgcagccatgggagaagtcagagctaggtgggcctgaaatgctggctgagggtaatggggagccatagagggtgtgtgagcaggagagggctctgatcaaattggactggaggccagaagcccagggaggaagctgagttgggccatggggttgggcaaaaaagcttgcactctttaggtgggataacaggaagaacttaactgtttccctccttggagggatggatctgtcccaattccacagctggggaagttgagactgaaggttcagggcctcccctgaggtcaggggcccctgagctgggcctctgcctgcctgcagggccgccccaggccaggccgtttccacccggctgccctggaccctcccaccacccagccgctgggctttgttctggttctgcctgagctccctctgccctagtggggcctcttcccaggggctcagtggctggtg

SEQ ID NO: 11431 - DNA, 1631 bp, Homo sapiens
ctttagattagaaactctaattagcgagttcagattagaaagggtctggggatccttagcacttagaatagccctggatactagcccggcgaggtggttcacgccaataatcgctgcaacttgggaggctgagtggggcggatcgcttgaacccaggagttcaaggctgtggtgagccatgctcgcaccactgcactccagcctgggcgacagagcaagaccccgtttcttaaagaaaaaaaaaaaaaaacaaaaaccattaaagtataactggactggtggttcttaactaaggaggattctgcccccaaggaacacgtggaaatgcatggagacatttttaggtgtcacgactgagggggagggggtactactggcatctagtgggtggaggccagggatgctgctcaacaccctacaaatgcacaggatagcagcccccaccccagctacccgccccttccccgcccacccccgcccccccagcaaagaatgatccagctcctaatgttggtagagttgaagttgacaaaatcctcctccaggccgggcgcggtggctcactcctgtaatcccagcactttgggagaccgaggcgggcagatcgcctgaggtcaggagttggagatcagcctgacaaacatggcgaaaccccgtctctactaaaaatacaaaaaattagccgggtgtagtggcgcgtgcctgtaatcccagctacttgggaggctgaggcaagagaatcgcttgaagccgggaggcagaggttggagtgagccgagattacgccactgcactccagcctgggtgacagagcaagactctgtctcaaaaaaaaaaaaaaagaaagaaaagaaaaaaagaagaaaatccttctcctggcatactgtagacacttaataaatgctggatgcctgaatactagttgggttccagcagggctacaggccatcctccagctcccccttgagtggaagtggagagatgcagggtagatgggaggagggacttttggatgctgtgggccatgtgtgtatggcggagtcccagggaagcctggcctctctccaccctcttgcccccgcctaccttgagccctgcgtcttctgcagatcctgctcctggcattcctgaagctcatcgacgagggcagccacatggtgatgctggaatgccctgagacggtcaacacgctgctccacgaattcctgctctgggagcccgagccctcgcccaaggctctaccggagccactgccggcgcctccagaagacaagaagtagccgctgggccggcggggcatcgcttggtgagcacagccgcagcaggaggaggcccgagcctgcgccaggtctgcagcgcagaccacctgggcgggccgttcgctccggtgggcggggccaggtcagggagacgcccccaggctgcctgggcggggcgtggcatccgagggagcccagcggacattccgctctccgcttccgtcccgcggggcccatcggcgttttggggccgcagccgggaccctcacggaagatgaccttgtacagaagctctccctcaccttccccccaacgccacggccaaggcaggccccccaccccgctgtcttccgtgtcagccgtgcttgatcc

SEQ ID NO: 11432 - DNA, 1194 bp, Homo sapiens
tggtcagtgaggagggggcggccccgggagggagaagaaagctggggaagcggggcggggaagcagaggctccgaagtctagagagagaggctgcaggggaagggactgggcgcagaggtgaggggccttggggaaggagggagaatccagtgagaaggatgccctggatcggggacgggctgatagctgtatggggcggggctatcaatgggggcgggtctatcgatggaggggaggggcttatggatgggtggggcgggtctagcgatgggggcggggcttggggccgggcttggagcggggccagtgtctgctgcctccagtctgccctgagtccctcttctggtcctttaggcacatcttggaaggtccgtcctgctcggcttttcgcttgaacattcccttgatctcatcagttctgagcgggtcatggggcaacacggttagcggggagagcacggggtagccggagaagggcctctggagcaggtctggaggggccatggggaagtcctgggtgtggggacacagtcgggttgacccagggctgtctccctccagagcctccctccggacaatgagtcccccctcttgtctcccaccctgagattgggcatggggtgcggtgtggggggcatgtgctgcctgttgttatgggttttttttgcggggggggttgcttttttctggggtctttgagctccaaaaaataaacacttcctttgagggagagcacacctgactctcgagttcctggagtatcatcgttttagtacccaagcgttggggccgcccctgcaggtgagagtggacaccccgttgacgatgacacctcccttccctgctccaggacgttttcaggagcccacggagttcggggaggcaccaccccagttcttcccagcccttgtctctgctgggatcaacataagaactatgcaccctcatcagggctcaccgtttcccaggtgttgtattctcatctcctccctagagcctctcctgattcctggggatccagtgaggaaactgaggctgtaactgagagtaaccttgtcttgcttcccttcccgcctgcagaaaatgctgggctgggatttaaactgggatctgtacacacacacaggccatgcattgtcagaatgtttccccctgcttcatcccccagattctctctctctctctcttttttt

SEQ ID NO: 11433 - DNA, 1681 bp, Homo sapiens
gctgaggcaagagaattgtttgaacctgggaggcggaggttggagtgagctgagattgcgccattgcactccagcctgggcgacagagtgagactctgtctcaaaaagaaaagaaaagaaaacagaccttgagccagatttggctcatgggtgctagttgtccaacctctataggattagagggctcatggaaagtaagttttgagggccacgatgggcacccagctctgtccgattccacagctagccaccccatgaatgcagcttcatatcaccaaagatcagcctactccagcggttcctaaaggctgcatggaatcccctccttcatctataccattcatgatttaaccactcctcccacccccatccccaatgttgtccatgtggctgccttaaacagcaccctggcgagcctcatcctagagtcatctttgggccttcccacccctgcctggcttccctctctcactcccctaccccccactcccagaggcctctgtgtccaagaagaaacgcatgtgtgtgaagctgttgcccctgggagccacggacacggctgtgtttgatgtccggctgagtgggaagaccaagacagtgcctggataccttcgaatagggtagggccaccccccagtgtctagccaccttccctgccctcccaactcatgatctcaccaatctgaccctcaaggacacccctgaggtctcctgttccttcttctaccttctgagcctcagattctgcatgttaaaaccgggacatatatatcatcttgtaggactgtcattaggagtcagtgacttggtgtctaaagtagacataacaggactgggcgcggtggctcacgcctgtaatcccagcactttgggaggctgaggcgggccgatcacaaggtcaggagatcgagaccatcctgactaacatgttgaaaccccatctctactgaaaatacaaaaaattagccgggtatggtggcacacgcctgtagtcccagctacttgggaggctgaggcaggaaaatcacttgaacctggaaggcggaggttgcagtgagttgagatcgcgccactgcactccagtctggggcgacagagcgagactccgtctcaaaaataaaataaaataaataaaaataaagtagacagaacggtgatttgaacccagcagtattagtttggtgtggtgcttcgggtgtgggtcaagatgctgaaacaaaaatcccccaaaagactgggcacggtggctcacgcctgtagtcccagcactttggaaggccaaggcgggcggatcacctgaggtcaggagttcgagaccagcctggccaacatggtgaaactccgtttctacttaaaaaaaaaaaaaaaaaaaaaaaattagctgggcatggttgcctgtaatcccagctaatccagaggctgaggcaggagaatcgtttgaacctgggaggtggagattgcagtgagtctagattgcgccattgcactccagcctgggcaacatgagcgaaactccgtccccaaaaaaaaaaaaaaaaaaaattcccccaaaagacagaggtcacctgcatgcccgggtcccccgccttctccaggggctatcctcaaccctggccccacaccgggccagcatccctcccaccttccctcctggtccagggacatgggcggctttgccatc

SEQ ID NO: 11434 - DNA, 1193 bp, Homo sapiens
gccagctgggcttcgcgccgggcgacgtggtggccatcttcctggagggccggccggagttcgtggggctgtggctgggcctggccaaggcgggcatggaggccgcgctgctcaacgtgaacctgcggcgcgagcccctggccttctgcctgggcacctcgggcgctaaggccctgatctttggaggagaaatggtggcgggtgaggccaggcgtgggcatcaggtgggcggggacccaggactggcccctgggcgggcggggagatgctgcgccccaggcctcggaaggcggccgccctggacgtgggcatgaggtgcacggtctgggtatgccccgggcagggagttggtgcatcccaggcctcgggagggggcctgtccggcggtgaccatgacccatgtgttggggaccacagcggtggccgaagtgagcgggcatctggggaaaagtttgatcaagttctgctctggagacttggggcccgagggcatcttgccggacacccacctcctggacccgctgctgaaggaggcctctactgcccccttggcacagatccccagcaagggcatggacggtgagtcaagggtgggacccctgctctatcaactggtttcctacccgcccaggccccgcccccaacttccaggccccaccccccaatgctcaggccccacccctaacacctgtatctcctgcagatcgtcttttctacatctacacgtcggggaccaccgggctgcccaaggctgccattgtcgtgcacagcaggtgaggggcccacaggcataatgccctcagccgctgagagtgacccaggctatcttgccagcctgacctgcccctcagctcctgtgggcatctccatgttaccctggggacagagagggcagctggtgtttcctgagcacttgctctgtgtccagaccagggccaagccctccacgtgtaaactcattgcaaccctcataactgcttggggctggacaaaggcatcacacccattttcacacccatcttgggacccggttgccctgtgcccactactctggggcccctctcatccccccacctgttcaccacatccatcccaccagcaaaacccgtcctctccatctgtctacttttttccatgccccccatctggacctgtgccagcccctcctcgggctcctcctgctccccccactc

SEQ ID NO: 11435 - DNA, 1200 bp, Homo sapiens
ccttaggagggagggtggggatggagaaggttacccttctccatggagggtggtgaggggctgagttttatcccaagggccgtgggaccctggaggctttgaaacaggacaatgggctggctagacaggtgcaggctatggccaggaaaccccccaaatacaacggaattgaaagactcctgttggaatgctggcccccgcaggaaccaccatgatcccgattcacccaggagggccaccctcccgtccagccccccaagagcagcagggctccctcttgcccttgaacctcctctgccctgacaggcggcgtcacccagggctcaggatcctggcttccagcattccagaggtgactcaccaaccaaagtgtcactcaccaaccgaaggaccttgcacaaatgcaccagcctccccatgcctcagtctccccatctgtaaatgagtgttatgacggtactgtcataaactccctggaggatccaggtggtcacgttactgttggtgacattgtccctctgttggctgcagacgcatcttctctccagactgccgatcccagaaagccaggtgatcaccattaaccccgagctgcctgtggaggaggcggctgaggactacgccaagaagctgagacaggtgagccccgaggagcggccgcaagggagtcacatccacgaagcggccacaccccgggcaacagagcggccttctgattgtcaccagcaggaactgccccagggatcactggcagatccctttgaggaatcccctcttcgaggccacagccctgccctggggagcctgaaggccactcggcctctgttgcccaggtaacaggcctgggtcctcacatcttggggaaatatgatgggtatggctatggctttgatcacaggctacattgagcactgtttcctgcgttacagctacttgtatttctttttttttttttttctttgagacggagtctcactctgtcgcccaggctggagtgcagtggcgtgatcatggctcactgcaagctccgcctcccgggttcacaccattctcctgcctcagcctcctgagtagctgggactacgggtgcccgccaccacgcctggttaatttttttgtatttttttagtagagacggggtttcaccatgttagccaggatggtctcgatctcctgacctcgtgatccgcccaccttggc

SEQ ID NO: 11436 - DNA, 2338 bp, Homo sapiens
tccgagtacaaggcccacttctccctccgcaacctgcatgccttctctgtggagccgctgctcatctaccccacacactacacaggagacgatggctatgtgagtgacaccgagacctcagtcgtatggaacaatgagcacgtcaagaccgactgggaccgcgccaagtcccagaagatgcgggagcagcaggcactgagccgtgaggccaagaactcggacgtgctccagtccccactggacagtgctgcccgggatgaactctgaggggtagcagccagaaagccaaagcagccatcggtggcccaggctccacgtgcttactgaggacatcaggtccacctctggaccccttggcaggccacagagggctctcgtgtggggtggtgtccagccagctcttgctaagcaatcacgtgcacacaggcagcattaatggagtgcctactgcatgccagcaacagggcttggccctggggaattgggaggaaccaagccctcttcatctgttcatgtgcccagcatttattaagcacctgctgtatgcaaggttcccatgttacggcagtgaatgaggcataattgttccctccatcagcgattgattcagtcatcaagcagttactgatcagattaagaatcaggcactagtgatacacattcatttttaaaattcattcaaggatttattgagtgcctactgtgtgttgggtgccattccaggctctgggatttttttttttttttttttaagagtagagtctgtctctgtcacccaggctggagtgcagtggtgtgacggctcactgcagcctgcgcctcccagcgtccagcaattcttgtttctcggcctcccaagtagctgggactataggtgcgtgccatcacatctggctagtttttgtatttttagtagagacggggtttcaccatgttggccaggctggtctcgaactcctgacctcaagtgatctgcccgccttggccacccaaagtgctagggttacaggcatgagccactgtgcccagcccaggctctgggaatattgagataaataagatgcttctatccatttattcaagcacatattggtcacctactgtgtgcctggcactcatgtcacaaagataagttcctgattcggtacacttactgagcacctgctgtgtgcagggagctgagctatgggatgggaatgggagtaaacaaggtactttttacttttttctttttttcctcactgctagacggtgtgggaacttctcactcattggcttctttcccacacacctgaagagcactgactgtgtgccgggcactagtgatacaaaagagtgtgacagttgttcagtctgcattttcgatcatgggctacatgccgagtgctggggcacagagatgaacaagatcggttccttcacttcttcatgccacaagtgtttattgagcacctgtgtgccaggcctcacagactcccagttgggttgaagaatggttgactgagtttgattcttcctgtaccctcggtcgtctgagctgtgtgcagacaacatccccccaccacccaagagggagggtagctcttccgccaccaggggcaagcacaggtcctggtggccccacgccacatgttagcccccctggagggggcgccagttggagacgggggctgggtgtccctggcccactcccggtcccctgtgctttacctccttgcccttgtgtctcaggtgtggtccctgcctgcttgatgaagttgctctgttcaagcctttggtgggatcatgtgtttgggggcttttaggggacccagctgcactggggcactgcccgtggcctgggtaggacatttcccagcaagggctggaggagttgccgtgccttcagcctgaatcgaatgtcagaaccagccagcggtgcttcaccctcttggggataacttgcttagttttttaataaatgttcctggttggttttcacagcagtttgtgggattttgctcggcaccaaaacactgcccacgttccccacccctggatggccgacaagatttgggaggaaaccagggcaggtgcagtagggaagctgcccagtggggcctggcatggtggctcatgcctgtaatcccggtgctttgggaggctaaggtgggcggatcacttgaggtcaggaattcaagaccagcctggccaacatggtgaaaccccctctctattaaaagtacaaaaattagcctagtgtagtggggcggggtggcggggggggggtacctgtaatcctcgctacttgggaggctgaggcaggagaatcgcttgaacctgggaggtggaggttgca

SEQ ID NO: 11437 - DNA, 1198 bp, Homo sapiens
ggattggtgggtgactggatcagttggtggatggatcttggtggactgcctgtctccttcaacccctatccatccaaccacaatctctttgctgttttccctttcaagtctgccctcctctgaccattcccctcctgttcctcttgggcatggccttctccctcatagtccctgatctccatccttcctgtttcggttcatcccccacactgttctttcaaacatgaaagtctggctgtgtctccctcttgaacactccatggctccccactacccccatcctgataaaacccaagccttcctcccagacattggggccccttcccatctggtccctgctgactagtccaaccaccactcactcttctcttcatgcatcagatatcatagccccatcaaaccacccaggggtccctgtacaggctgtgggccctctttcctatctgtggaatgccttgcccacctgttaagggaaggtgatctgtgggtgggggcgagctgggccctctctcagacctgcccctcgtccccagcctgaccctctttgccaaaatctgtgagaagactgtgctgaagcgagtgctgaaggagctgtggaagctggttatgaacaccatggagaaaaccatcgtcctgccgcccctcactgaccagacggtgagacctgcagggggcccgaggggacatttaggccacctccctggcgagagcccagaaaacttggtgcctagaggctggggggtaagaacaaaggcatccggtctcagagaggtcatccaggctcaagggccattcaagggtcatggaagccaccagaggtcagtggggggccattcagaggtcagagagttcacacaggggttaaagatcatcgaagagttaaagaggtcattcagagtccattgtattttctctggggtcaaagacatcaggtagagtcaagagaccactaaagtcatagaggtcacatgtaggtcaaaatagctttcaaaggtcagaggtcatctagaaaacaggtcaattttgggatcaaggttatccttgagccacggaaggcatagacattggccaggcaccgtggctcacgcctgcaatcccagcactttgggaggctcgaggcgggcagattgcttgaggtcaggagttcgagaccagcctgggcaacatggtgaaatctcgtctctactaaaaatacaaa

SEQ ID NO: 11438 - DNA, 1399 bp, Homo sapiens
ccaaaatgctgtgattacaggcataagccaccgcacccggcctccagcactcctttccatgccctccctgctcagaagtccaatcccctctgaccaggactgaggggctttttctctctgtgccccaggcaagttgcactcatggcacctccaagtgaagagacgcccctgatccctcagcgttcatgcagcctcttgtccacggaggctggtgccctgcatgtgctgctgcccgctcggggccccgggcccccccagcgcctatctttctcctttggggaccacttggctgaggacctgtgcgtgcaggctgccaaggccagcggtgagtgcatccctagtggatcgggccagagggaaggatggggctgtgtggggccaagattggaagctggaatagttgcctgcagaagtcagcatcggagctggggctttgggggatgagtaggagttttgtaatggagaagggtgtgcagggttggcttctgaggcagagggaatggcctgtgcagacggagaggtgtgacggcacatgaagggaacagctggtcataccttgaggtatggaaggatctggacggttgggtatgatgctggcactcctgaagggcacagatggggtgactcaggagggagctgatgggaccatcccctgtaggcatcctgcctgtgtaccactccctctttgctctggccacggaggacctgtcctgctggttccccccgagccacatcttctccgtggaggatgccagcacccaagtcctgctgtacaggattcggtaggaagtgccccccagcccccagggattgtacaattttatcatctccttgcatttcgaggtgcccacacccctgccccagggaggtatggtcactacccatttctcagatgaggaaacagaccagagagggtgggtcacttgcccaaggtcacacagcaagttaaaggtacaagctgggctctgtgaggcctccgcagaatctgtccctcgcccccaccataatgtcactcctactgaggctgggttgcactttcatcccagggttctctcctctcctcacagcttttacttccccaattggtttgggctggagaagtgccaccgcttcgggctacgcaaggatttggccagtgctatccttgacctgccagtcctggagcacctctttgcccaggtggggttctgcctggggtttgacccagggggttgggggtccaaggggcaacatgaggactggcatgcaatcaggtggggcctcgtctgaccctccctgtggcagtccaggggtgggggtcagcccaggattgggggggtctgcaggttaacaacagggcttgaagttgggtggcctcagctgatgctccctgtggcggccccccagcaccgcagtgacc

SEQ ID NO: 11439 - DNA, 1154 bp, Homo sapiens
agggctggggagagacctgaggtcttgtcctagttctgcctggaatgggctgtgagatcccatgctggtcactgggcctcagggtgaaagaagatgttggctggatgttttgaggtgcagagtggctgtttgacggcgactgcaaagcaattcaggactgcagcatgaagaaaggaggctgtgggtctaagccacagctttcctggtctgaaacccttagcccaggcaaaggagaggcaggcaactcaattaatcctccctggagacctccctctcctcagttcattttgtgtataaagttgtggtcgggagtgtgacctacagtcaccaagaatccacatggaggccctagggtggccctgcctcctgcttcccgaatctgtggtcactagatgtaggaaagggagtgaggtggatctccacagttgcctctgggtgctggccttaccctcactcctgtttcctttcagctacgagagtacaaggtagtgggtcgctgcctgcccacccccaaatgccacacgccgcccctctaccgcatgcgaatctttgcgcctaatcatgtcgtcgccaagtcccgcttctggtactttgtatctcagttaaagaagatgaagaagtcttcaggggagattgtctactgtgggcaggtatggagaggccggggctacgtggggtctggagtggatttgcgcctcttgggacatcgtgcatctcaagaattaatcagacatcgaacgggtgcggtagctcaacgcctgtaatcccatcacatcagacatcagagccccgggttgtgtttctgcctgggtcacgggactggagcagagcttatgtgccatttccctgattagaaagccagggacccagggagcgggtgggtggcatggtgggacaccttggttggtgctgtcttccctgggccctgtctgttaagtgaggagaggtgatggctatctggtcagtgggtggtagctaggttggcccagacaggttccaggagacttgagttcaggaactgcatctggggctgggttggtgtccgtggcagaagcctggacttcaggctgttgccatgggaagttcccttacctcacgctccctgaggatgcctgaaggtaggtggggctgggaaactgaggcacaagagtctg

SEQ ID NO: 11440 - DNA, 1163 bp, Homo sapiens
gggccaggcgcagtggcttacacctgtactcccagcactttgggaggccaaggcgggtggatcacctgtcaggagttcgagaccagcctgaccaacatggtgaaaccccccctttactaaacaaacacacacacacacacacacaattagcgggatgtggtggtgcacgcttctagttccagctactcaggaggctgaggcaggagaatcgcttgaacctgggaagtggaggttgcagtcagctgagattgtgccactgcactccagcctgggcgacagagcgagactccatctcaaaaaaaaaaaaaaaaaaaaaaagaatcgtcctacctcctggagttgttgggggtcgaatgagctaatgtgtgggacatggttccctctgacatttgatgaataggaaacgagtagacctgaagtcagtgagctcagcagatggaatccactcacactgctggctcagagaatggggaggctgcaatctgggcaggcttcctggaggagggagtgacctcaagacaggacgctgatgtgccccctctgccctgcacacagggagctggctgtaccgcgctcgtggtggctgtggtggctcggaagctggagctcaccaaggctgagaagcacgtgcacaacttcatgatggacactcagctcaccaagcgggtgaggaccgcggttcccatggaggccgcctcctggccttgtcagcgagcgtagaacttccctgctttccctctgtacgtgccgggcatgctcatgtgcccatgggttaccatgcagccccgtgtcaagactgtgctggctttgggaggccaaggcaggtggatcacctaaggccaggagttcgagaccagcctggccaacatggcaaaatcccatctctactaaaaatacaaaaattagcctggcatggtgacggacgcctgtagtcccatccacttgggagtctgaggcaggagaatcgcttgagcctgggaagcagaggctgcaataagccaagatggcaccactgcactcgaacctgggtgacagagcaagactccgtttaaaaaaaaaaaaaaaaggactgtgcttggctctgccaccacgcacccatctgtgagtaatgcacagagagacatcgtggcatcaacccttgtgcccagtcacgtccagccatg

SEQ ID NO: 11441 - DNA, 2220 bp, Homo sapiens
aggcacattacttaacctttctgggcctctgccacctcatctgtaaaatgggcatgatggtgaagccaggttgccagataaaatataggctactcagctaaatgtgaagttcagatcaatattgaatttggttttactgtaagtatatcccatgcaacatttgggatatacttatactaaaaaaaaattattcattgatgctatggtttgaatggtcccccaaagttcatatgtttgaaacttaatcctcaaagcagtcctttcaaccttgtcaacctgtcggcgcggcctctggtgcagtggcggcggctcctgttcctgccgcagctctctccccttcttacctccccaccagatcccggagatcgcccgccatggctttacttactgcggccgcccggctcttgggaaccaagaatgcatcttgtcttgttcttgcagcccagcatgccagtgcttcctccatgaatttgaaagacatattggctgacctcatacctaaggagcaggccagaattaagaccttcaggcagcaacatggcaagaaggtggtgggccaaatcactgtggacatgatgtatggtggcatgagaggcatgaagggattggtctatgaaacatcagttcttgatcctgatgagggcatccgtttctgaggctttagtatccctgaatgccagaaactgctacccaaggctaagggtggggaagaacccctgcctgagggcttattttggctgctggtaactggatgtatcccaacagaggaacaggtatcttggctctcaaaagagtgggcaaagagggcagctctgccttcccatgtggtcaccatgctggacaactttcccaccaatctacaccccatgtctcagctcagtgcagctgttacagccctcaacagtgaaagtaactttgcccaagcatatgcacggggtatcagccgaacccaagtactgggagttgatttatgaagactctgtggatctaatcacaaagctaccttgtgtcgcagcaaagatctaccgaaatctctatggagaaggcagtggtattggggccattgactctaacctggactggtctcacagtttcaccaacatgttaggctatactgatcatcagttccctgagctcatgcacctgtacctcactatccacagtgaccatgagggcggcaatgtaagtgcccataccagccacttggtgggcagtggcctttcagacccttacctgtcctttgcagcagccatgaacgggctggcagggcctctccatggactggcaaatcaggaagtgcttgtctggctaacacagctgcagaaggaagttggcaaagatgtgtcagatgagaagttatgagactacatctggaacacactcaactcaggacgggctgttccaggctatggccatgcagtactaaggaagactgatccacgatatacctgtcagcgagagtttgctctgaaacacctgcctaatgaccccatgtttaagttggttgctcagctatgcaagattgtgcccaatgtcctcttagagcagggtaaggccaagaatccttggcccaatgtagatgctcacagtggggtgctgctccagtattatggcatgatggagatgaattactacacagtcctgtttggggtgtcacgagcattgggtgtactggcacagctcatctggagccgagccttaggcttccctctagaaaggcccaagtccatgagcacagagggtctgatgaagtttgtggactctaagtcagggtaaaactggagactgggggaaagtgactaccagaaagtgaggaagcctaaataaaaagtatacttttgtttcagggggcctttaaagacttaagattaaattatatctgaggcactgataatatgtttgaggttaaaatataaattaagactttaaaagatgaaaaatggtcccttcttccctaatcagctcctttcccctgcctggtatgagttgcccatcacaggcatggtcctggaggatgaccaggactaatgcatgtggtatgagtaggtttggccccctcactatctctagagtgagaatctggctcctgtttccatggctcaaagccggttgcagagaatctgcagtcacttcggagctttagcttcttctctgccaagccctcaataagccagcaaaccaggactctgccccttctgtttccataggaatcatgttgga

SEQ ID NO: 11442 - DNA, 1164 bp, Homo sapiens
caagcgattgtcctgcctcagcttcccaagtggctgggattacaggcgcccaccactatgcccagctaattttttgtatttttagtacagacggggtttcaccatgttggtcaggctggtctcgaactcctgacctcatgatttgcctgcctttgcctcccaaagtgctgggattacaggcgtgagccactgggcccagcctaatttattactttttataagcgatagccgtactgagccgccccctgaaggcggctgccaggtcttgccccaggcacctgggactctgtttgcaggccctgccctctgggctgagaaggatgcactttggacaagtcatctgtgtttgtgttttccagtttttctgtactttttaagtgttttgtgttacctggtctcattcccctccccacacctacccatttgaggggatggagttgaagtcacctggtcacctgtaccggcccagttcggctacaacctggagtgtccgtaaacaattcctctcacccacaaaacaatgtaatcccagcgatggactggattctgaaggccacttcccaccatcatagctgccatgcccaggcagtgcctgctctatatatagagtctgcctccaatcctgctggcttcagcctggagaagggatatgggagctggagctttgatggatgaataggtgttcaccggatctgggcagaggggtcatccgctccccaggtgggcactgataaaggaaggtacaggcctcacctggaactgccaaggcagcctccagaaatgctcggctgtctcggggcacgctccagtatgccagtcctgcgggattacgtccagctacttccagaaacactcagtgtcccctcccctcaggctctgccttggcctggccttgtccagtctaccctggacaagatgccgtgtgtttgaggcccagcagagtaagcccttggccgtgatgtgtctgaaacacctgttaggggttccctccatatgtcagagcctctctgggatgaagttcaagccagaaaacccagtcgaggctcaagtttgaatttcagcttcactgtgtggctctgggaaaatggctttcccactctgtgcctcagtttccttgtgtttacaagactaatcccattgactgtttattaagcacctactgtg

SEQ ID NO: 11443 - DNA, 1270 bp, Homo sapiens
gggagtcgggtgttgcagtgagccgagatcgtgccgcagcacaccagcctagcgacagtgagactccatctcaaaaaaaaaaaaaaaagtctcaaagtcaagattccacctggcaagttctggaaggcgtgcaagatgaattgcgtatcacagccccctttctacaagactaccaagtggggttgagagaagtggggaactgcccagggctacacctgcctcccacgccttcctaatccacagacaggcaatctatacctgcgggggcccctgaagaagtccaatgcaccgcttgtcaatgtgaccctctactatgaagcactgtgcggtggctgccgagccttcctgatccgggagctcttcccaacatggctgttggtcatggagatcctcaatgtcacgctggtgccctacggaaacgcacaggtgtgtgggcgctggggaaactgaggcacgtgggcaggggagcaggggacccagcctaccagcaggctctcaccctgctgccttgcaggaacaaaatgtcagtggcaggtgggagttcaagtgccagcatggagaagaggagtgcaaattcaacaaggtggaggtgagcggccccagggccccacactggggtgggggaaaactgtcccacgtacaggaggcaaatacgaggatgccagctctgtcttctgcctcgtgtgctcccatttaatcacatctttattccctatctcctgggtgggtactggtgattattacgagagggtgtcagggtaccctaggccctcttcatgccctctcctgccccctctccaaaccccaggcctgcgtgttggatgaacttgacatggagctagccttcctgaccattgtctgcatggaagagtttgaggacatggagagaagtctgccactagtgagtgacgcccctcactccacccaaggagggggacatgggtggtaaccttccctgcatccaggcagacccaaattcaagtcctagccctgaccactgctgtctgtgcagcccaggaaaacaactacccttctttattttatttatttttttattttttcttgagacagagtctcgctctgtcgcccaggctggaatgcagtggcgcaatcccagctcactgcaacctccacctccagggttcaagtgattctccagcctcagcctcctgagtagctgggattacagttgtgtgccaccatgcccagctaatttttgtgtttttagtagagacagggtttcaccatgttggtcaggcttgtcttgaac

SEQ ID NO: 11444 - DNA, 1127 bp, Homo sapiens
gagaccagcctgggcaatacagtgagaccctgtctctcaaaaaaataacaaaaattagtcaagggtggtggcacacacctgtaatcccaactactcaggaggctgagatgggaggatcacttgaggccaggaggttgaggctgcagggaaccgtgattgcaccactgcactccagcctgggtgacagcaagaccctgtctctaaaaaagaaaaagaaaaaaaaaaaacattactgagtactcactgtcactggccatagggggtccatgaggagccttcccagtcttgggtaggcagagccaaacacagacaaccctagccctgcagtcagggaagcgccagggacctggatggtttcttacaggagggcatgctagagttgggccttcaacgcatgggtaggagtttgctaaggatttccaaaagctgcttttgggtagagtgggtggggcgggtggatcttggggctctcagtcccataccctcacagactcagagctggcgcttatgtacaacgacgcctcggtgctggagaaccatcacctggctgtgggcttcaagctgctgcaggcagagaactgcgatatcttccagaacctcagcgccaagcagcgactgagtctgcgcaggatggtcattgacatggtgaggccagggcagtaagcggggcgggaggggcagaggggagcggggcatccttctcatctgcagacagcagggtggggtgatattggcatggccggcggttcatccagacccaggcatgtcctcactctgtctgagcttcctcatctgtgaaatggaacagtggggccaggggcggtggctcatgcctgtaatcctaacactttgggaagcagaggcgggcgaatcacctgaggtcaggagttcgagaccagcctgaccaacatggtgaaacctcgtctctactaaaaatacaaaaattagctgggtgtggtggtgtgcacctgtcatcccagctacttgggagactgaggcaggagaattgctagaacccaggaggcggaggctgtagtgagctagtgagctagtgagctgagatcgcaccactgcactccagtctcagcaacagagtgagactccatctcaaaaaaaaaaaaaaaggg

SEQ ID NO: 11445 - DNA, 1154 bp, Homo sapiens
gcgagcacctggcttgtggggccgcagggcctgcagctgctggggcttcccttgtacccacagaccatgtccatcgtgagttacaaccacctgggcaacaacgatggggagaacctatcggcgccattgcagttccgctctaaggaggtgtccaagagcaacgtggtggacgacatggtgcagagcaacccagtgctctatacgcccggcgaagagcctgaccactgcgtgcgtggggcgcgggcgcgggcgcggggttgcccggcgaggggtggcagggacccgggcaaactcctgctgcactccaggtggtcatcaagtatgtgccgtacgtgggtgacagcaagcgcgcgctggatgagtatacctcggagctgatgctgggcggaaccaacacactggtgctgcacaacacgtgtgaggtgcggcgcggcttcaggggctgctatgggaggcagggcttggccaccgcccccatctcctgacccacccgccccgcaggactcgctgctggccgcacccatcatgctggacctagcgctgctgaccgagctgtgccagcgcgtgagcttctgcactgacatggaccccgagccgcagaccttccaccccgtgctgtccctgctcagcttcctcttcaaggcgccactagtgccgcccggcagcccggtggtcaatgcgcttttccgccagcgcagctgcatcgagaacatcctcaggtgcaccccagcctccaggttcccgcccggggcccagatacccccctggctaagctatgcacagggcttggggggctgtaggtggcagggataccccccctttctccctgtgggtgtctggctctgctaagctgtgtgacctctccagggcctgcgtggggctcccgccacagaaccacatgctcctggaacacaaaatggagcgcccagggcccagcctcaagcgagttggacccgtggctgccacctaccctatgttgaacaagaaaggaccggtacccgctgccaccaatggctgcaccggtgatgccaatgggcatctgcaagaggagcccccaatgcccaccacctgaggccccggtcacacagtttctcggctcttcctccccgctgccccccacgaccctaccttgaaggcccccacaaataaaggcg

SEQ ID NO: 11446 - DNA, 1098 bp, Homo sapiens
gtgggggcgggaggggcgtggtgggtagggaggcttggtgggagtccttgcgggcgggggcgggagcctgcagggggcggggctctgcgggaccaggggggctgtagggggtggggttccgcggggcgaggggctgcaggggcgagggacctgcccgggtctggaggcctgtagtgggcgagggacctgcagggggcgaagctctgtggggcgggagggcttgcagggggcggggcctggctgcaggcggaccccgtggaagggtttcgcgaggtagcggggactcctcgggagtcttacaggggcggagcttaaggtgccggaggtctcaggggaggggcctgggggcagcggcttccgtcctggctgtgagcctggaactgaaaaatgcccgaaagtggggcggggcttgagagtctaggtggggcccaggccgggtcgcggccctttcaccactcccacccgtcacctcgccgtgtctgctgacccccaggaggccaactactacggctcgctgactcaggcgggcaccgtgagcctgggcctggacgccgagggccaggaggtgttcgtacccttcagcgcggtgctgcccatggtggcgcccaacgacctcgtgttcgatggtgggcggagccctgggccggggtggggcgggatgggagatggggtctggaggggcccaggatccgggcagggccgagtgtgagggtccccccaggctgggacatctcgtcgctgaacctggccgaggcgatgcggcgcgcgaaggtgctggactgggggctgcaggagcaactgtggccgcacatggaggccctgcggccccggccttctgtttacatccccgaattcatcgcggccaaccagagcgcgcgcgcggacaacctcatcccaggctcgcgtgcgcagcaggtgctgtcccatcccgcatcccttgcttcctgccacctgttcttcgccacttggttccctctttttgccccaccccgcgaatccaggcctcacttgacacccggggaactgagtagcccaggcctctgtgagtccgagagtatgtacaaccaacttccctacaccctctccatcctccccaca

SEQ ID NO: 11447 - DNA, 1958 bp, Homo sapiens
cctcctgtctcgccagaagactcctaggcccttggggtggcgcgcctgccttttctagttttatacaaagacagccacttttagctactgctaatgagacttgagtctatttttgtacaaaagagaagcaaaatcttttttctaaacctgtgcctccctctcctcggacacccagggtctagccgctgccctgggtcctgcctgcagtattacagaggtcgtcgaaaggtgcagctgcgttctgagggcgtggggaatgggcaggtggcctctgctggtctctggctctacgtttaggcacccctttccccagcctctcctccttgggcagggtctctgctccagcaagcaaacagggtggcccaggtggctattttgagaactccagctggtgcccccagacagctgctcagagccaagggggcagagggctttcagcgcccccaggcctgccctgctatttcaggccctcagctgtcgggggccactgtgtttctgtgctccaagttgagactcggccgcagcggcgtcagacttttctttgcgatgtcctcggtttcccatttgttgctgctgctgctcattccacactgttgagaccttgtggtctcgatgctgctggcctccctccgtccctctgtccacttgtgggtcctggggtcgtcttagcagagccaccgccaaggtttgcactcagggaggggctgatggagggctgggcgccatggggtcagggaggccccagggacccatgggcagagctggggagccaggaggatgggtctgcctgctctgggggtgcaggctctgcagacaccccaattgctgctctgttgctgtgcctagtctagtgtcccccaaagcatcggggggccacgcaagtgtgggtgtgtgagtgtgcgtatgtggggaccccccagggcatggtggggtctgaggcgtgtgttcccatttagggctgaatgaagccatgacttggaaaggtggtggggggtggatggcggctgtgactcagggcccagggatcacatgggggtcactgctgccatcagcagtcaggcagggagaacagaaatgcaaaaatacagatgtctatttttctaaactggggggtggaggggtgcctcctgacagcttccaaagagctgactgtggagggcccacagtgtatcccacccctgcccgagagtctctctcctttgggacccccgggttcccagagctccgaggaaactgatccttcatgtttcaatagctgttgttgtttttctctttgggccgggccgggccggggaagggccgagcaggctccaggaggcctccagagtcagctggaccttgctgtgtcgcccgcaggcagccctgcagacaccggtgaggtgggatgatttcaggaggtcccagcccgggactgcccgcccctctgccctgggaaccagtccaaggggctgtcagttgaatttgcctttttgttgttgttgttgtttttgttgtttatttgttctccttttaaggaattatgaagctaagaaaagttttgtgttttgggggttggtggacaaagttctagctgattaaatatggtctaacttattgatactatttttttttcttttaatgttgtactgtggagaaaaactattttgagccatggggttggtgtttacaagaactttccacttttgccaaaatgttacaattgaaaggcatctatctgcgtcttcagtttcctgatattttcttaaaagatctagtgtcctttttgtacactaaacaggtgaatgctgacttttttcattctccaataaatttcactgaactgaacctggcagcccaggctgcctggctggtgtgtgtggtgtgtgggtgttggtgtatctgtgtgtgtggtgtatggtgtgtatgtgtgtgtggtgtgtgttggggtgtgtgggtgtgtagtatatctgtgtcggtgt

SEQ ID NO: 11448 - DNA, 1431 bp, Homo sapiens
ttgtaccggaaaatgctgggcaaccccagccggctgcctgctaagtgccctggcaagggtgcctgggtgagctggggcacagaatgggcaggggctgtgtgcagggcacgcctagcagagggattttattttgcatacatggatgtcctcggagactgggccgtcctgggcgatgcaggggacgtggagagagcccagccctgtgtgatcatgagtggagtcgaaggtggaactcaagctggagggctgggggtggactgtggagcctcttccagggcacgaggggcggtgtcctggaggaggggccatttgatttgggttttgctgcatgagtaggagtttgccaggaagtgggaaatacatagtcaggcaatgatttgttgggaggtctgtttgggctgtgctggcagctgaggccccagaggccagtcttgacctccctccacccttctctcccctcctttttatccacagtccatcccatggaagtggctgtttggggcgactgctgttgccttggggggtgtggcactctctgtggtcatcgctgccaggaactgaccacctaggtggctgccaccccctctgcacaccatggaccctgccctgcgctccccaactcccccaggctccctgtccactgccctccctggtctggccccctcctccgggttaggggagcaaggattgggggtcgtgcagcccagccagcaggagggactgaggccctctaggaggaaagcccagagggagggggccctcattccttcagacccagttttcccccaccctccttaccccgctgggctaggtctccgccagggctggcctcagtttctcctcaacaggcctgggggcagcccttcccctgcctagtccccgcctgagtgccagccccccaccccgcctgccgccccctgtccaggttccctccccgccacagtgaaataaagcatcccaccctgcagtttccacggactcctgagctttcttctcccgctgtctggggctgggccagagacagcctgtgatgcatctggagtcacacagcatggtggatgtggttgagccagctggagctgggggtctcctctccgggcacaacatactcactttacagaggagaaactgaggcatagagaagtggggtgatgtagcaggggcaagtgggttgagaggtctgactcagctggactctgggggtgttactgcccagctccactcgttaccccagcgttcactgtttactcacctgaaatccaggaccccagtgggccctaccttgaggctgctgcatgggttctgtggcatcattgctttacctagtggatgtactgaattcaaaagagacagatggtaggaggatgacttgagcacaggaatttgaggctttagtgagctatgattgcaccactgcactccagcctaggc

SEQ ID NO: 11449 - DNA, 1420 bp, Homo sapiens
agccgttaggggtcacatggacaataagtcctacatcacagagcttggcaaggtgacaaaaccaactcttgggcctccttcccccagatatcccagaggcatccttcctggaggaagaggatgaagaccccatcccacccagcaccacgaccaccattgccacctcagaacagagcacgggctcatgtgacaccagccccgacaccgtctcgccctccctgagccccggcttcgaggacctgtcccatgtccagcctggctccccagccatcaacggccgcagccagacagatgacgaggagatgacgggcgaatagccctgctgcccggtgccttgagggggtctcagggcagcagcatacaaggtggcagcgggtaaccctgccttgttctgtcatccagggctcctttgctgccccgttctgtcacccagggctcctagggggacaaggctctctcccgaggggtgtggaattcctgggggggtctttaattctggctccttccttcctcagaacatctctattctgcaagacccctctgccatgccagggcacgcccattccagctggagtcgtggggctgggcacaggggaatttttccagagctgagcctgacgtctgctctgaagaatgcttagaaggttcccagacaccagagccagatgtcccccaccaccggtcaggacctccttgaggtgcacaagcacggtctcctctgagttcaccccagcccacccccgcacccactaattctgcttttcctgccccttgctccgtaaaagtatcaaatactttctccttggtatctcaaggaggtttctgagataggtagaagtcttgagacggaggctggccatccattcagccctgagcgtgctgagttctgtgtttctctgaatagaggtgtggaacctgaggggccagcaggcctctctgaaggcctccatggagcaaacggagccacctcgggaaagagtttaatggaatatttttgtacccgatgtttacagatgctgttgggaagttatcaataaaaagacaccattactaaaaagggaaaagtacacctagctgtggcttcttcagtccttaagccaagcaacccaaaaggagggcaagtgctggatgtggggctgggggccctgctggagggaggtgcagacaatcaggcactacagggctagaaagagatgtggcccttttttggaaccccccctggtgggagctataacaacccaagttcccgtcaccagctaggtcttccctcacgctgctgtcactgctcacaatactagtgttcccatcctcatttcataattccttctccagatctcagccttcctccagataggggagccacactagatccattccccatcagacacactcccagggttacctcatcttctgagtactt

SEQ ID NO: 11450 - DNA, 1183 bp, Homo sapiens
gccagacttgggggctcaaggggcacagggaacagctctcaaggcaggagttgaggaaggttatacctgaccacagagggcttagacacctggcagggcagtggggccaggaaggccgtgagcagggagcccacagtcagggctgtgagctgatgaggcctctcctacgcgctgcacggagggcagcccagccaaggcaatggggctaagggggtctgtgtgagacccggacgcatccaagggaggctccatctctgtaagacaggagtaaaattcgcctctgcgactcggtcacgcagagatcagccagagtccccccctcccccccaactcagccgccccttggtgctcagccagccgggccccacaacaccagagtctgagcggcctcaggttgctcccgggatcccccggctctccagaacagagaagcttgttctccggttctcatttccgtgggctgggggagcttgaccagctgggccccagactgagcccttgggccccaggagccaccccgtcagcccaggatggagagtccagaccagggtcagctgaactcagactccacagcgtccccacaggccctactttcacagcccagaaccccctcccttggaaggggtgcagcccgcacgtgtgctcacggagcagagtgctgagtgctaggtggacagggctgtacccctggagagcccctggaacgggggctgcttgtagccaggcaggaaaggccggcaggaaacgccccccgccctactggtcccagctgtttgcaggcctcaggccgaccccagccagccagccggggcttcctgccctgggctgagagtgtgttgttggaggcggggtctcagccagtggcactgcccccttaactcacctcacgccgacagctgcccctatggcaccatgtacctctcaccacccgcggacaccagctggagaaggtcagtggctggacaccccccccccgcccccttcttgttggaaacaaaaccaaactctcatcatggttacatgtggaaaagcaggacacagtcgcttaaacaatgaccaaactaagatgcatccagaagtttctagaaattagccttcaccctgaaacacaggagttccagctttgggaggtcttctaacatttcccttccccccacttatgacaaaaaaaaagacaaaaaca

SEQ ID NO: 11451 - DNA, 1222 bp, Homo sapiens
ggtccagcggtattcgggggtcctctgtcacctcgccctgaaaacagcagctcccatcaccttcactgggtcccgatggagccgtctcagaggccgaggggccctctgtgtgggggtgggacgcaggggctctcagagcaagggccacaaagccgatggcacagatgtgcccctgggcctggcccgtcacccacatgtggtgccctgggccagggcgtgcgggcgccagagccttccctacacagcctaagagcaggggcaagactcggcccctcactcaccctgggaggcctgcctgggctacatggacacctgggtctctttctacccccattcaccatggaccaggggcctccatttcctgggggctcttgcggcatgtgatttgggggtccctgggacattctcccgtcagctccacctgagccaagtgtcctgttccctgcggcccttggccttccagggtcctggccaggcaggggtcaggcaccccatactcttccgtgtggcacaggtgtccacccacccccactggccacagacaccattctccccctgggagcaggaggtggagtaagttgtacccccaggcctgggtgctggggagttcctgagggcatgggtggggcaggagtgagtgcctcgtgatcccagcctcagtttctctcttgtcactttctcaaacctgcaggtctcagggccccgggctcctcctgggcaggatggggggcaggggctgggccttggggtggtgctggctctgatgattccagagcctgtatccaccttctgggctcctggccagcaccccacccccaggagccagggacaggtggcatgtgttggggtcgggggatggcccccatctcgaagtgttctggaatttgggggcaacccttgcccagcccagccatcaagaacttctgatctcctgcccaccaggaggggacttagccatggacttggccagtaggcctggggagggagggctttggcagccaaagtccactggccctgccgtgcccctgagtaggaaactgtcccctaggggctgggtggccccactgatatatgcaaacccgccggtccgagccctgttcctgcctgtgctcctctgtgcccaggctggctctcccccaaccctagcatgtatactctgccacggacgtcccgtgggccatgattgtgggcggccgcagcgggcgggggcaggcggctcagg

SEQ ID NO: 11452 - DNA, 1106 bp, Homo sapiens
catgaccactgggtctgaggctggattcctgaatttcaggccaaagaacggggactagaatggccctggaggagtgaggcctccttccagcaggactctccttggaggtggctttgctccttatcccctcggagcttctgccacataccccttccctgcattcttggatttgagaagccctggttaactggtttgatttggttactgggattgttggggttgagtatgtgtttaatgaagaacttaaaaatgttgtcagaggaaagaatttcacatcttgccaaatgaaaaccagagagcaagcttccagctgtaactgtcgctgttttgattttttagttactgtggaatacacgatcctgcctgcgtggtttactgtaataccagcaagaagtggttctgcaacggacgtggaaatacttctggcaggtagataatcagaccatgcatgtgtgtttaatcagtgctgtgctcagatttgtgtgtaaattatggaaatgttgaagcaaagcgtaatataaaatcacgctaacaaacctgggttttttcctcctctgtgactggtttaacttgaaacagatggtggtgtgtgaatgccttaatgtatttacccttgatttattctctgtggctctttttattatgcaagtagggttggcttaattctccttcccagtttttatttcgatttttctgcaagatgagctcttggcacacccgctgatcttcattaacgggaggatgttcccaaggcagtaacgggcatccaggggcgctggttcctgagcaagcttgctctggcctgagctcatcggagctgtccggaggctaattcaggccagatcctgaatcatcggcttcaattaagttcacttgaccgtcggcgctgggcttgccttcctgatgttgatcagctgcagctggactgtgtcgcttgttctgtgtttgggacaggacagtgttctcccagtgcccaaattccaaggggggagttcgatggtcttgcccgagtggtgggactctcgtcctggtgggtcccgtgctagcggctccccttcccctccaggttgctgtgtacaggtcactccactgctggagaggatgga

SEQ ID NO: 11453 - DNA, 1265 bp, Homo sapiens
ggtccccagatgtctcctgggggtgacctttaagctccagccgtctcctcacaagccttggcccagcccagcccagccgtggctctaactccagggagttgtcctccaaagatggtttttgctgaagggtgaggcatgagagcgtttaggcgctgaggcttgttaaggagtcggcagtgccgtgtaactcttttggggcgttctggctaagtcataaaaacaattctgtaaaaacaaagtctgttctgagttttaagagttcagagctcaagtgcacagggagatgcgatttattactaacagtttgaaggtaatgtgatcacataataaaatgcagggcatgcccctttgggtgaaaggtcagcatgggagggggccctccctgctccggggcttcagggacgggagctggtcctcacggccccctcccgctctgcaggcagccctgtgccagccagagcagcctcaaggacatcaactgggacagctcgcagtggcagccgctgatccaggaccgctgcttcctgtcctggctggtcaagatcccctccgagcaggagcagctgcgggcacgccagatcacggcacagcagatcaacaagctggaggagctgtggaaggtggggctgcccagcgggccgacccgtgccttcgtgtggtttctggttgcggggaggggagtgtcttcagagacggcttgacccagtgagaccgctggagattctctgaaaggaattcaggcagacctctgccacctctacgtggaatgacctcagggcaccttggtcaccttccatccaggcagccttacctgaccgagaagatcctggccttggggaaaggaaagctctggctgctggaatttttcttgtcttgccggggtgaggatgggtggtgggaggggaagaatggggctggctgtgggcagacttgtcctgcagagcctgaacctgcccagacaggtgggctgcgagaatgtcctggggaaataggttggtgtcgaggtcggcacagtcagctgagacagaggggagaggagagggtgccgggtcaagtagtgggtgcctggccctccttccacagacagccctcacttttccccacggaagcctttctgtgcttccagctgtttaggattttgtgataaagtagttctaataactaggctagaagttttcatttgcctcccattcagtcagaaatctcacataggaaatgaagtgcaagttaaaatatttttttaagcattgttcagccgggtacct

SEQ ID NO: 11454 - DNA, 1180 bp, Homo sapiens
tgtccctccctcccctcctctctctcttcctccctcccacagcagctgctccctggccacggaggcctctggtgtgcggtgaagcctccagacgggattggcctgtgtgtgttccggggactcctaatggcttctctttcagatgtgcccttggtggcatttggggctgcaggtgccactcacggcgcctgctctcacggcagaggcttgctgtagggcccgcctcatggggcctcgggcatgtggaggccaggcccgggcctgtgctggaggctaaccggggctcttgtttttcatgtgctcagactcaagataacatcactgtcaggtgggacctgggccttaacaagaagagaatcgcctacttcactttgcccaagactgactctggtaatgaggatttagtcataatttggttaagaggtgattttaagttttaaaatatttgtgaccataagtagcataaattcctagttccacccttgtaaagtgccccttaatttgaactctccctggtggaagcgacggcgtgggttaaaatggccacctctctcacttttttacctcaagacatgcggctcatgcagggggatgagatatgcctgcggtacaaaggggaccttgcgcccctgtggaaagggatcggccacgtcatcaaggtccctgatagtatccttcatgtgaagagggtgtggccggctggtgggagaggaaagtgggggcatcaggtggaggccactgtggatttgatgctcactgctgggccagcatctcatgctctgtggtgggtgctggttggcatcgccctccactgctcttaggagaatcacagggccttcaccttcaggggacagctggttgtatggttgcttcccctctgcccgaatggtgatgttggtgatgccacttgtgtggcgcgtccctgggctgactctggaagttaatgtatgccgcttgtgtggcacgtccctggactgactctggaggttaatgtggctgcaggagcgccttacctggacgctgactctgcacacggaggttccagaagccagtggtcacatgcagaccctctgagcacacacttgctcccaggccatgtttgggaatgtgcagtgacctcatggtgatgcagcctgccggccagagtggggcagctgtaaggcacaggtgcagtcagagg

SEQ ID NO: 11455 - DNA, 1093 bp, Homo sapiens
cggctgcaccccacctctcctgtccccctgctcttcgaaagtcagactgaggaagtcaaaagacccgtttattaagcacctcctgtatgcggcacccctggggggtgaccttgggttggggtcacaacctcccggtcatgttctttcttcccctgcagcctgaatcttggccagggctcagggaagggaccagccagtggtttcggggcagaggagcagggcccgcacaacacgagcgcccacgggttctgctgtggggcactgggtaggcccccgggaagggctgctgcccccaaggaaggttcctccgaccctcagctccatggacgagtcaaggactgggcagatggccgtgtggggctcagaccaggccctgggaggggactgggcctgagtgggacccagacggtgtcctgggtggacgccccttgtggccagccctgccagccttctgtcgcttcagcgtctcctccaccttctccttgaagcgccggttcttctgcttgatcttggccagctcagccttgcgcttggcctccaggtcagggtcctggcacagggaggaccaggggatggctgagctggcggcccccgccagggaacctggccacccaccccctacctgcgggctcggccctcaccttcccctccaggatcagctgcttccgtttgttgatctccttcttttcgtcaaagtgggccgcctccagtttctggtggagggaagtggggtaaggagatgctggtcacgggggccccacctggaagggagcacccccggccctggagagcactttagttcctgcccgcctctgacactcacgatctcacactctcttcgcaccacgttgacctgtgtgaggatctgtagcacctcggcctcttccacggagaactcctccagcttcttctctgtggggacagcaaagccgggggtgggggtggggaggagacgtgacatggagagggagttcagccaagtagtgagttccccatgctgtggggtatgcaaggccatctggggccatatcaggtaagggtcagctgagcaagatcagggatttctgaggtaaggaaggtatggaccgctgtc

SEQ ID NO: 11456 - DNA, 1344 bp, Homo sapiens
tccctgaaggggagaagctggggttaactcgagtcaccacagcatagggctagtcccaggccccgaccctgctcctggaacagtgcagtcaccgccctcctggattccagacattgcaggtgctgaaaatcccaaaggcaggtagttgagatctagaacaacttttcctctgtttgctgttgagcctttccttgctgataagcagccaccttccactgctcctgttcagcaccctgctgcctctggcccccaacagggcagggtgtagtttggctccaccaatgttcagccacacagtggaggctggggacacccccctcctgcctagccttcctcaaggcagtgatgaaatgtcctggggatgcttttctgggccctgcgtttgttgtacattcttttgccatccttcccatagggaggaaaacactgaaagcaacactgaaaagtctccaagaaggtggcaccttcattgcacccagttaaaatgttgtgtcttctcctccctcccaagttcagaatgaccgaagaagcatgccgaacacggagtcagaaacgagcgcttgaacgggacccaacagaggacgatgtggagagcaagaaaataaaaatggagagaggattgttggcttcagatttaaacactgacggagacatgagggtgacacctgagccgggagcaggtccaacccaaggattgctgagggcaacagaggccacggccatggccatgggcagaggcgaagggctggtgggcgatgggcccgtggacatgcgcacctcacacaggtgagtgggaggagccagcgggaggggctggaacctggagacaagcccagtgtgcccaggttggggctggccacactccaggcctgttggtaacagcttggcggggttgtggagagggctgtaggctcagctcgggcatcacccaccactggcagctgtgctgttgtggccattccagggccccaggtcccaactgcaagtggcacagagtgtgggtctcacaggagaaggagtggcacattccatcagctcccctgccatcagtaggcctttgccacccacgcacctgctgtctgtccaactcggtgcttttggtttgtagggacacttgagttattcatttggttatgcttccctgcttttcagatctagaggtcagagggccaggaatgctacacctaccttggtcacttggctagggatagagttgggagcccagcccagggcaccctcctcggagcgggtacgggatgctcactcgactccatgttcacttggtgctggtctttggcttgctctgttggtttgtccttagtcaacactgattacttcaagagt

SEQ ID NO: 11457 - DNA, 1304 bp, Homo sapiens
tggtgccaccttgtgagcaagctggcagcctgtggatacacccctcggtcttctggggacaggttggctgccaggtgtgagggctttggcctgcctgagtggagagaagaaaatctggttcacgcagggagctgggctccccttcaaggggtttccaccatggccaggggctgcgggctggtggcgaggcacacacatgccatcagacccagcatgctcaagcccccacaatggctaacactgagcagggccccaggatcccgagccgagtgtttacctgatccgaggcacacggtagagggagcagccatgttttccaaagtcaccatgtcatgctcaggggcatacgcaccctcagccctggcgacatggcggcaggcatgaagtccctaccatcagggtgcccacctgggcactgggattgggtgccctatgacgtgtgggtaagaagaaggaggcagcctgggagccatggggcagggcaggggatgtggaggatgcagggcagacagggaacagacggggaggtctcagctccctgccatgtgtccacaggggtgggcactgggtccagctgtcaagggcgctctggtcactactgtctccaccccacagtgacatgaagtccgagaggagacccccctcacctgacgtgattgtgctctccgacaacgagcagccctcgagcccgagagtgaatgggctgaccacggtggccttgaaggagactagcaccgaggccctcatggtgagccacgtgttggcgctgccgccggagccccactgtgcccttcctactcatgacaccctcaggtggagctagtgatggcagggcctctgctcctcaccaaggacgctccctctcaaccctgttcctctcgcccctgcagaaaagcagtcctgaagaacgagaaaggatgatcaagcagctgaaggaagaattgaggttagaagaagcaaaactcgtgttgttgaaaaagttgcggcagagtcaaatacaaaaggaagccaccgcccagaaggtgcgtgcctgtctcccctccttcctgggccagcaggagcgcctggccttgccttgatcccctcatcaatgtcagcggccagaaaggtgaaagggcttccttgagggagtatagggcaaggtcccactcccgcatttgtggactccagtgtgcattttggattcagcttacaagatgttaaagtgaatttcagtctagagtattctggttctgagggtctaaagctcacttttttttttttttttttgagatggaatctcactctgtcgccaggctggagtg

SEQ ID NO: 11458 - DNA, 2075 bp, Homo sapiens
agtgcgagccaggccccgtggaagacgggctccctcctcccccacctggcccctggtctagaaggacccactgcaccaccctccgctggctcgggaagacaccgtgcccgccccaagagcaagcaccggccatgctgcagaggcaagacctcaattcttggctgcaaagtttcatcagggctagggggctggtgccgcctcataggcagacgaggatcatcgctgggggacctttcccgtgggctttcttcctttctctctttgcctttagtttgcccgacaccagcagaaaagtggaccttgggggctggttctgctcctggcccccttgttcagcccctgccggcacacgggcggctcaccctggacactgtgatgcgcatgggcaaggccagcgcccggggcttctgaaccgagcggggtgtttcatttttttgcttttccctgtcttaggctcccagtctttgactgccttcccatggcgatctataagttgaaagattttttttttttttaatcacctcatgatgatggagttaaaagtaaaccgtgcagaccctggggtccctgttgtacgctgcatcatcccgctggccctgtgccctggagggtgggcggctcatggtgccacagcccctggcagggacggccggcccgcccccgtgactgactgacagatgcagggatggccgaggcagccctcgctccagctgaacgcctccattgctgcttgttctggagacccccgcccccgcaccttccagacttagcagaagaacaaactgaagaacagacccagccagagaagcagggattccagaagctgcccattaagggagaaggagaggatccggtcggcagcagccctgagcagaaagctggaggggggactgtcgcggggtttttctgttgtggtttattttattaaattttttccttttttctattcatttcgatggacgcaatcttaagccaccctggccttgctcctgggaggtgagcgtgcacaggtgtgtgcaggtcaggaggtgccgtccaggtgtgcggcgagccgctgcgcacagatgtcaggatttccgtttgggtctagtttagaacctgtccttaaacctaggggttgctgtcaggatttgctttcagactttttttttttttgtaattccctttagagtctacaaaaatgtttttaaaaggatcaggtctgcttttagtttcatttttgtttctttcccgtcccactctttaaaaactggttccgtgaggaaaggcagaagccgttccgtgtctcttgcaggctgggccggcttcatgccagtgcgagggcgtcccgtgcccacgtacatacgtatgtctccatgagttctgggctccactggttccaattgagctccagccctggttttcctacccatgcagttagggactttaatttaattttttttttgtagggccaccgccttcaaacacaactgctacaacattctaataaaggctcatttaacccccaggctcctgtcgtgtgaatatcctcagtctgtaggaaactttttttgacacagcatagaagacctagttttggaaaacattatctaattttttgttgtgcaaatccccaaatttctcactaatttttgtttttttgtgcataacttggatgggctgaaggaggtgaggacagattggggaagggtggctttcattccaagatccagggatttggggaaaaggaaggaatttgatgttttttggggtgggaggggagggtgtgttttttacaccaaaaaaaaaaaaaaaaatcaagagtatgcaagcatttctattcctcgcatttttctgtgtgcctggcaaataaatacctgtctcctacgaccctgagctgttagccctctctgttccatgacaggggccagatcttccagctcctcccagaaggagcacccaggctggcttcttcccactgaaagccctccccagcgaaccaacctcagttctatgcagtggctggggatcaggcatccagaccgaagtcacctctgcctgctccagcttgggtcagctgggtctgaccagggggc

SEQ ID NO: 11459 - DNA, 1183 bp, Homo sapiens
tcataatcatcctgaatggtcagtttccgatgagaggccactagcaagggatacccatcaccaccagggagcagaatccgttccagggattggggtgagtccgacttcgagcagcagctgccccccaacatcatgtacccagcccgtgactacgtggagccctgggcttcgcgtagagtccctagacggggcgaaaacgggaaaaggggccttaactggggcacctggctcctttgagagctcggagtttctgactggcctgcgcaacaccccagaggcaaggtgaacgcgagggcctataatgcaagaaccaaggcgagtcacgccctgtctgggcaaaagaggagtaaagacccctcagctgcagcccggcagcgcattcctacccagggtccgccgccagagctttcccgcgcggtcggatagttacactactgtccgggacttcctagccgtgccgcggaccatctcaagtgcttccgccacactcatcatggcggtggcagtaagtcacttccgcccgggaccggaagtgtgggatactgcgagtatggcggcgtcaaaggtgaagcaggacatgcctccgccggggggctatgggcccatcgactacaaacggaacttgccgcgtcgaggactgtcgggtcagtatcactctgcgccggggtctcagagtctgggcactcggggctcgggggcggggttccggggacacaggcgggcctcagttttcccggcggtgtgaccggaggcggagcccggggatccatcatagcttctgtaataacgctaagtgctgcagtttgttgaggtctttcccagctcctcttccttctcgtaacagcccaggaaatcggtccctctagttatttacgttttacagtgggttaaactgagtcatagcctgtgctctggccctcagccacccttggatttctaagatggggaaactgaggcccaaagaaggccgcggctccccaaggcaaagctgaggccgcaacccggaacctggagggaatttacaagatgttctatgcagtggttccctgctggcagcccccgcctgcatggtgtcacaggaatccatattctttaaattttcaattttttttttttgagacggagttttgctcttgttgcccaggctggagtgcaatggcgccatctcggctcaccgcaacct

SEQ ID NO: 11460 - DNA, 1109 bp, Homo sapiens
tgcttaaaatctttcagtgggttatttcatcttttctggcactttctttatcaggcttttcctatccagttttataacagcacccccaccccaacacacacacaccccacccaccagccacaacaggcctacagctgcacagtcctgggcccaggccagccacgctgccaatgccagcctgccacttgcctttatcagtatgcagcatcttgggtgccccctcttccccagcacttcttgagactcggttcaggggttcaggtgaccccagcaacaggcgcctgcctggccctgctgcgtgcacacagctgtgaccaaggtttgccctcacaggctatgccaaactgcgacctgtgtctccccgttcctccccagactgcgctctaaggatggcacttggacccatgtcttagcggggtgctcagtgtccatcatccaatttggtgataaagtggagtattcctttctcccgaagggttctatgcaaaaatcttcagacataacaccagtgctcacattttctcatggtttgttttctctccagaaaatgaattgtgacttgtcccggtctctcttatctagtggtaagcatccgtggcattcaagacgaagatccccctgacgcccagctcctgaggctggataacatgctgctggctgagggcgtgtgcaggcccgagaagagaggaagaggaggagcggtggccagggccggcacagcaacaccaggtggctgtccaaatgacaatagcattgagcactctgactacagggccaagctgtcccagatccgacagatttaccactctgagctagagaaatatgaacaggtgatctttctgcatggaagagtttctgtcatgtgaatgcgcatttgtcaaagcgaaacacggaacgctaaccacctttctttcgtggcgcagaacagggagtccatgcagttggtcgctgcagaggtggtccattgttactgaaagccctttccatttacttaacagtcacccgccggtgtgtgaactacagggggtggcaggcggctgctccgctgtggaacctgctgccctgtgccaccctgctgcctagtcacaggccggcgtgtctgtgctccc

SEQ ID NO: 11461 - DNA, 1113 bp, Homo sapiens
agtgtgggaaagcctttatatgttaccaatcttttcaaagacacaaaaggactcacactggagagaaaccctatgaatgtaagcaatgtggtaaggctttcagttgtcccacatactttcgaactcatgaaagaactcacactggagaaaaaccctacaaatgtaaagaatgtggtaaagccttcagttttctcagttcttttcgaaggcataaaaggactcatagtggagagaaaccctatgaatgtaaagaatgtggaaaagccttcttttattctgcaagctttcgagcacatgtaataatacacactggggctcgaccttataaatgtaaagaatgtgggaaagccttcaactcttctaattcctgtcgagtgcatgaaagaactcatattggagaaaaaccatatgaatgtaaacgatgtggcaaatcattcagttggtccatttctcttcgattgcatgaaagaactcatactggagagaaaccttatgagtgtaaacagtgtcataaaaccttcagtttttcaagttcccttcgagaacacgaaacaactcacactggagagaaaccctatgaatgtaaacaatgtggtaaaaccttcagtttttcaagttcccttcaaagacatgaaaggactcacaatgcagagaaaccctatgaatgtaaacagtgtgggaaagccttcaggtgttcaagttattttcgaattcatgaaaggtcacacactggagagaaaccctatgaatgtaaacagtgtggaaaagttttcattcgttccagttcctttcgactgcatgaaagaacacacactggagagaaaccctatgaatgtaaactatgcggtaaaaccttcagtttttcaagttcccttcgagaacatgaaaaaattcacactggaaataagccttttgagtgtaagcaatgtggtaaggccttccttcgttccagtcaaattcgattgcatgaaaggactcacactggagagaaaccgtatcaatgtaaacaatgtggaaaagccttcatttcttccagtaaatttcgaatgcatgagagaactcacacgggagagaaaccctatcgatgtaaacaatgtgggaaagccttcagat

SEQ ID NO: 11462 - DNA, 1416 bp, Homo sapiens
cagtgtttgacacgagtcgcaccgaaacaaatgctcttcacgatcattgttaaagtagcaatagcgccacgtgctttcctgggaactgctggcctgttttccactcatacaaagtggagaaggctttgaaatagcaaaggagggtgacataaattgaatacttatatgaaatttttaattaaaaatagcatttgatgttatacaactataagtgagactattagtgtgatgtcatattcttaattatattgacaaaataaccattcacagtattcctatttaaaataacatgttttgtcggctgtatatttgctagcttttggttaaatagtaccagagctcaatagcaatcaacaaaatgaatctttattttaccgcaagcattagtgatgcatatgcctgtttttcttaaagttcattagctttttgccttttccggttgcagcgccgcgcggtgaggttctctagtccacgctcgcagccatgccgtccaagggcccgctgcaatcggtgcaagtcttcggacgcaagaagacagccacagctgtggcgcactgcagacgcggcaatggtctcatcaaggtgaacgggcagcccctggagatgactgagccgcgcatgctacaatacgagctgctggagccagttctgcttcttggcaaggagcgatttgctggtgtggacatccgtgtccgtgtgaagggtggtgctcatgtggcccagatttatgctatccgtcagtccacctccaaagccctggtggcctattaccagaaatatgtggatgaggcttccaagaaggagatcaaagacatcctcatccagtatgaccggaccctgctggtagctgatccccgtcgctgcaagtccaaaaagtttggaggtcctggtgcccgtgcttgctaccagaaatcctaccgataagcccatcatgactatcaaaattcacctgtataataaacagtttttgagggattttaaagtttccaggaaaaaaaaagttcattagctttttatgaaggatttatccttttttttcagtgtgctgtttattgctgagaagtggctgccctgccagaaaactgctattctcagctgtaaccacattgactaatagtgagtggaagtgcagtggataaaaagcaaatgtgtcttctctgtatcttttttcatttattggctgaagaacaggaggatgcggaagatggaagaaaatataatctctgaaagataatgaagaagctctcctaaatagaagaaaacctcataggggatttttttttcatcattttactctctgcttctatgcgtttaaattttttttttttttttttgagacagtctcgctctgttgaccaggccagagtgcagcggcatgatcccgactaactgctccctccacctcctgggttcaag

SEQ ID NO: 11463 - DNA, 1185 bp, Homo sapiens
acataagagaattcatactggagagaaaccctacaaatgtgaagaatgtggcaaaagctttagtacgttctcaatccttactaaacataaggtaattcatactggagagaaaccctacaaatgtgaagaatgtggcaaagcctataagtggtcctcaacccttagttatcataagaaaattcatactgtagagaaaccctacaaatgtgaagaatgtggcaaaggctttgttatgttctcaatccttgcaaaacataaggtaattcatactggagagaaactctacaaatgtgaagaatgtggcaaagcctataagtggccctcaacccttagatatcacaagaaaattcatactggagagaaaccctacaaatgtgaagaatgtggcaaagcctttagtacgttctcaatcctcactaaacataaggtaattcatactggagagaaaccctacaaatgtgaagaatgtggcaaagccttcagctggttatcagtcttcagtaaacataagaaaattcatactggagagaaactctagaaatgtgaagaatgtggcaaagcctataagtggccctcaacccttagttatcataagaaaattcatactggagagaaaccctacaaatgtgaagaatgtggtgaggctttcaactggtcctcaaaccttatggaacataagagaattcatactggagagacaccctacaaatgtgaagaatgtggtaaaggctttagtatgttctcaatccttactaaacataaggtaattcatactggagagaaaccatacaaatgcaaagaatgtggcaaagcctataagtggtcctcaaccctcagttatcatagaaaattcatactggagagaaaccctacaaatgtgaagaaagtggcaaagccttcagctggttctcagtctttagtaaacataagaaaattcatgctggagagaaattctaaaaatgtgaagaatttggcaaagcttttaaacagttcccaaccctcctacacataagaaaattcatgctggagagaaactctacaaatgagaagaatgtggcaaaggcttcaaccagtcctcaaaccttatggaacataagagaattcatactggtgagaagccctacaaatgtgaagaatgtgataaagacttcaactggtcctcacaccttactactcataaaagaa

SEQ ID NO: 11464 - DNA, 1587 bp, Homo sapiens
aatgtgaagaatgtggcaaagctttcaactggtcctcaaaccttatggaacataagaaaattcacactggagagacaccctacaaatgtgaagaatgtggcaaaggctttagtatgttctcaatccttactaaacataaggtaattcataatggagagaaaccctacaaatgtgaagaatgtgataaggcaactcatgctggagagaaaccctacaaatgtgaagaatgtggcaaagctttcaactggtcctcaaaccttatggaacataagagaattcatactggagagaaaccctacaaatgtgaagaatgtggcaaaagcttcagtacattctcaatccttactaaacataaggtaattcatactggagagaaaccctacaaatgtgaagaatgtggcaaagcctataagtggtcctcaacccttagttatcataagaaaattcatactgtagagaaaccctacaaatgtgaagaatgtggcaaagcttttaaccaatctgcaattcttattaaacataagagaattcatactggtgagaaaccctacaaatgtgaagaatgtggcaaaacctttagtaaggtctcaacccttactacacataaggcaattcatgctggagagaagccctacaaatgtaaagaatgtggcaaaacctttattaaggtctcaacccttactacacataaggcaattcatgctggagagaagccctacaaatgtaaagaatgtggcaaagcctttagtaagttctcaatccttactaaacataaggtaattcatactggagagaaaccctacaaatgtgaagaatgtggcaaagctttcaactggtcctcaaaccttatggaacataagagaattcatactggagagaaaccctacaaatgtgaagaatgtggcaaaagctttagtacattctcagtccttactaaacataaggtaattcatactggagagaaaccctacaaatgtgaagaatgtggcaaagcctataagtggtcctcaacccttagttatcataagaaaattcatactgtagagaaaccctacaaatgtgaagaatgtggcaaagcttttaaccgatctgcaatccttattaaacataagagaattcatactgatgagaaaccctacaaatgtgaagaatgtggcaaaacctttagtaaggtctcaacccttactacacataaggcaattcatgctggagaaaagccctacaaatgtaaagaatgtggcaaagcctttagtaagttctcaatccttactaaacataaggtaattcatactggagagaaaccctacaaatgtgaagaatgtggcaaagcctataaatggccctcaacccttagttatcataagaaaattcatactggagagaaaccctacaaatgtgaagaatgtggcaaaggttttagtatgttctccatccttactaaacatgaggtaattcatactggagagaaaccctacaaatgtgaagaatgtggcaaagccttcagctggttgtcagtctttagtaaacataagaaaactcatgctggagagaaattctacaaatgtgaagcatgtggcaaagcctata

SEQ ID NO: 11465 - DNA, 1711 bp, Homo sapiens
agatgtgaagaatgtggcaaagcttttaaccagtcctcaaatcttactgaccataagagaattcatactggagagaaaacctacaaatgtgaagaatgtggcaaagcttttaaggggtcctcaaattttaatgcacataaggtaattcatactgcagagaaaccctacaaatgtgaagattgtggcaaaacttttaaccatttctcagcccttagaaaacataagataattcatactggaaagaaaccctacaagcgtgaagaatgtggcaaagcttttagccagtcctcaacccttagaaaacatgagataattcatactggagagaaaccctacaaatgtgaagaatgtggtaaagcttttaagtggtcttcaaaacttactgtacataaggtagttcatactggagagaaaccctacaaatgtgaagaatgtggcaaagcttttagccagttctcaacccttaaaaaacataagataattcatactggaaagaaaccctacaaatgtgaagaatgtggcaaagcttttaacagttcctcaacccttatgaaacataagataattcatactggggagaaaccatacaaatgtgaagaatgtggcaaagcttttaggcaatcctcacaccttactagacataaagcaattcatactggagagaaaccctacaaatgtgaagaatgtggcaaagcttttaaccatttctcagaccttagaagacataagataattcatactggaaagaaaccctacaaatgtgaagaatgtgggaaagcttttagccagtcctcaacccttagaaaccatcagataattcatactggagagaaaccctacaaatgtgaagaatgtggtaaagcttttaagtggtcatcaaaacttactgtacataaggtaattcatactggagagaaaccctgcaaatgtgaagaatgtggcaaagcttttaagcatttctcagccctcagaaaacataaggtaattcatactagggagaaattgtacaaatgtgaagaatgtggcaaagcttttaacaattcctcaatccttgctaaacataagataattcatactgggaagaaaccgtacaaatgtgaagaatgtggcaaagcttttaggcaatcctcacaccttactagacataaagcaattcatactggagagaaaccttacaaatgtgaagaatgtggcaaagcttttagccatttctcagcccttagaagacataagataattcatactggaaagaaaccgtacaaatgtgaagaatgtggcaaagcttttagccatttctcagcccttagaagacataagataattcatactggagagaaaccctacaaatgtgaagaatgtggtaaagcttttaagtggtcatcaaaacttactgtacataaggtaattcatactgcagagaaaccctgcaaatgtgaagaatgtggcaaatcttttaagcatttctcagcccttagaaaacataaggtaattcatactagggagaaattgtacaaatgtgaagaatgtgtcaaagcttttaacagtttctcagcccttatgaaacataaggtaattcatactggagagaaaccctacaagtgtgaagaatgtggtaaagcttttaagtggtcctcaaagcttactgtacataaggtaattcatactggagagaaaccctgcaaatgtgaagaatgtggcaaagcttttaagc

SEQ ID NO: 11466 - DNA, 2336 bp, Homo sapiens
aatgtgaagaatgtggcaaagcttttaacaattcctcaacccttatgaaacataagataattcatactgggaagaaaccatacaaatgtgaagaatgtggcaaagcttttaagcaatcttcacatcttactagacataaagcaattcatactggggagaaaccctacaaatgtgaagaatgtggcaaagcttttaaccacttctcagcccttagaaaacatcagataattcatactggaaagaaaccctacaaatgtgaagaatgtggcaaagcttttagccagtcctcaacccttagaaaacatgagataattcatactggagagaaaccctacaaatgtgaagaatgtggtaaagcttttaagtggtcctcacaccttactagacataaagtaattcatactgaagagaaaccctacaaatgtgaagaatgtggcaaggcttttaaccatttctcagcccttaggaaacataagataattcatactggaaagaaaccctacaaatgtgaagaatgtggcaaagcttttagccagtcctcaactcttagaaaacatgagataattcatactggagagaaaccctacaaatgtgaagaatgtggtaaagcttttaagtggtcctcaaaacttactgtacataaggtaattcatactgcagagaaaccctgcaaatgtgaagaatgtggcaaagcttttaagcatttctcagcccttagaaaacataagataattcatactggaaagaaaccctataaatgtgaagaatgtggcaaagcttttaacaattcctcaacccttagaaaacatgagataattcatactggagagaaatcctacaaatgtgaagaatgtggtaaagcttttcagtggtcctcaaaacttactttacataaggtaattcatatggagagaaaccctgcaaatgtgaagaatgtggcaaagcttttaaacatttctcagcccttagaaaacatgagataattcatactggaaagaaaccctacaaatgtgaagaatgtggcaaagcttttaacaattcctcaacccttaggaaacataagataatttatactgggaagaaaccatacaaatgtgaagaatgtggcaaagcttttaagcagtcctcacaccttactagacataaagcagttcatactggggagaagccctacaaatgtggagaatgtggaaaagcttttaacaattcctcaacccttaagaaacataagctaattcatactagggagaaatcgtacaaatgtgaagaatgtggcaaagcttttagcaatttctcagcccttaggaaacataagataattcatactggggagaaaccatacaaatgtgaagaatgtggtaaagcttttaagtggtctcaaaacttatggaacataaggtaattcatactgtagagaaaccctacaaatgtgaagaatgtggcaaagcttttaagcatttctcagcccttagaaaacatgagataattatactggaaagaaaccctacaaatgtgaagaatgtggcaaagcttttaacaattcctcaacccttatgaaacataagataattcatactggggagaaaccgtacaaatgtgaagaatgtggcaaaggttttaacaatttctcgacccttatgaaacataagataattcatactggggagaaaccgtacaaatgtgaagaatgtggcaaagcttttaagcaatcctcacaccttactaaacataaatcaattcatactggagagaaaccctacaaatgtgaagaacgtggcaaagcttttagccatttctcacgccttactaaacataggataattcatactggaaagaaaccctacaaatgtgaagagtgtggtaaagcatttagtcctcaaaccttactaaacataagataattcattctggagagaaaccctacaaatgtgaagaatgtggcaaagcctttaaccagtcctcacaccttactcaacataaaacaattcatactggagggaaaacctacaaatgtgaagaatgtggcaaagcttttaaccatctttcagcccttactaaacataagataattcatactggggagaagccctaaaaatgtgaagaatgtgtcaaagctttcaaccattttacaaaccttaatacacataagataatttatactagagacagaccctccatatgtgaagaatgtggcaaagcttttaaccagtcctcaagccttaataggcagaaaacaattcatgctggagagaaaccccacaaatgtaaagaatgtggcaaagcctttaaccagtcctcacaccttaaatacacataaaataattgatactggagga

SEQ ID NO: 11467 - DNA, 1172 bp, Homo sapiens
atttcagtgtaacaaatatgtgaaagtctttcataaatattcaaattcaaatagatataagattagacacactaaaaagaaaactttcaaatgtatgaaatgtagcaaatcatttttcatgctttcacacttaattcaacataagagaattcatactagagagaatatctacaaatgtgaagaacgtggcaaagcctttaaatggttctcaacccttattaaacataagataattcatactgaagacaaaccctacaaatataagaaatgtggcaaagcttttaacatctcttcaatgttcactaaatgtaagataattcatactggaaagaaaccctgcaaatgtgaagaatgtggcaaagtttttaacaattcctcaacccttatgaaacataagataattcatactgggaagaaaccatataaatgtgaagaatgtggcaaagcttttaagcaatcctcacaccttactagacataaagcaattcatactggagagaaaccctacaaatgcgaagaatgtggcaaagcttttaaccatttctcagcccttagaaaacatcagataattcatactggaaagaaaccctacaaatgtgaagaatgtggcaaagcttttagccagtcctcaacccttagaaaacatgagataattcatactgaagagaaaccctacaaatatgaagaatgcggcaaagcttttagcaatttgtcagcccttagaaaacatgagataattcatactggacagaaaccctacaaatgtgaagaatgtggtaaagcttttaagtggtcctcaaaacttactgtacataaggtaattcatactgcagagaaaccctgcaaatgtgaagaatgtggcaaagcttttaagcgtttctcagcccttagaaaacataagataattcatactggaaagcaaccctacaaatgtgaagaatgcagcaaagcttttagcaatttttcagcccttagaaaacatgagataattcatactggagagaaaccctacaaatgtgaagaatgtggtaaagcttttaagtggtcctcaaaacttactgtacataaggtaattcatatggaagagaaaccttgcaaatgtgaagaatgtggcaaagcttttaagcatttctcagcccttagaaaacataagataattcatactggaaaga

SEQ ID NO: 11468 - DNA, 1889 bp, Homo sapiens
tattttatgaattaacagttttttccgagaacatagattggactataaggggcagacatttgccttaataaggtgatcacacgtcaacttactgtgtggactagatgagttttagggtgtccttctaatccagagagtatgggaggtatttagcatgatttatatagtaagtcttggcagttgaattttcggaaactttgagttattactgtttattttgctgtttaacgtttttagcatgatgcactgaggtgttgtgaatcctgaatcagcaatgttcaaccaactagggggagctcaatttacaaatagtatcttgtgatttcataccagtatgataggtggtggttcacttcatttcatttttaagattttatatgctagcaccgccaatttgactatttctgagacccagtgagtgccatatttcacatttttagaatttgattttttacctgtgaatccataaagggctatttcctgatatatactcccttcgggatactcatctaattgtgttttttaaccttctgtttgtcttgcagtccctgcttctgtttgttattcccacacagacatcaaggtgcctgacttctctgaataccgccgccttgaagttttagatagtacgaagtcttcaagagaaagcagcgaggctaggaaaggtttctcctatttggtaactggagtaactactgtgggtgtcgcatatgctgccaagaatgccgtcacccagttcgtttccagcatgagtgcttctgctgatgtgttggccctggcgaaaatcgaaatcaagttatccgatattccagaaggcaagaacatggctttcaaatggagaggcaaacccctgtttgtgcgtcatagaacccagaaggaaattgagcaggaagctgcagttgaattatcacagttgagggacccacagcatgatctagatcgagtaaagaaacctgaatgggttatcctgataggtgtttgcactcatcttggctgtgtacccattgcaaatgcaggagattttggtggttattactgcccttgccatgggtcacactatgatgcatctggcaggatcagattgggtcctgctcctctcaaccttgaagtccccacgtatgagttcaccagtgacgatatggtgattgttggttaagagacttggactcaagtcataggcttctttcagtctttatgtcacctcaggagacttatttgagaggaagccttctgtacttgaagttgatttgaaatatgtaagaattgatgatgtatttgcaaacattaatgtgaaataaattgaatttaatgttgaatactttcaggcattcacttaataaagacactgttaagcactgttatgctcagtcatacacgcgaaaggtacaatgtcttttagctaattctaattaaaaattacagactggtgtacaagatacttgtgaaatctgtaactgactttattttcttgcccaaatatttgcttcctgctttgcgtcagggacgcagattctgcacggtcattgttgggatgaagtaaaattaacgggtcatctaagtgtctatggcattgacagaaacagtagtatctaggtattccttatttaccggacttggtaagagtcctggctatgcatttcctccctactgtgtaagccgtgtgataatctcaacactaatctgtgggaaagagtcctgaatgaggcattagtagctctgagggtttatcttcacgtctggtctgctggtttttctccttaagtgacaggccaggaaattttattagtcccttatgagtgtaaattagtacttaatcctttagtcttaataggcagtgatgggatattacctgagagaaactttccaaaatgagagtgctctgccatttc

SEQ ID NO: 11469 - DNA, 1208 bp, Homo sapiens
attttggatgcattataaattgagactgttagagattggctttggtgctagtgccatcttttatttcctttcaggaaatctatcctccaaagttgcaccagtttgcgtatgtgacagatggagcttgttcaggagatgaaattctcaccatggaattaatgattatgaaggtgggttccagtgaattttccggccattttttaaatgcgtacggcagatcttttccacctgaagtgtgagtgcctctgggaggtgttctccagctggacacattgtggcatggaacatggctgcattttgaacttcttttctcaatcatcggtctcttttctctctgttttcctttaggcccttaagtggcgtttaagtcccctgactattgtgtcctggctgaatgtatacatgcaggttgcatatctaaatgacttacatgaagtgctactgccgcagtatccccagcaaatctttatacagattgcagaggtaagtggctccatcacgtccgtggggccaccttccctgcagctggagtgaggaactctagaataggcgtgtggtggcatccatctcagcgttcttttcttctccgtagctgttggatctctgtgtcctggatgttgactgccttgaatttccttatggtatacttgctgcttcggccttgtatcatttctcgtcatctgaattgatgcaaaaggtttcaggtaagttggctttccagtgcatgcacaaacaaggtgtactaagcttacatccagttgtcagcctcagattaagcccacgatgtcttcactgcagggtatcagtggtgcgacatagagaactgtgtcaagtggatggttccatttgccatggttataagggagacggggagctcaaaactgaagcacttcaggggcgtcgctgatgaagatgcacacaacatacagacccacagagacagcttggatttgctggtcagtgctgctccttctttcagtccttcttggccaaattcttaaaactgcctaaataggccagccgcggtggttcaggcctgtaaacccagcactttgggaggccgaggtgggccgatcacttgaggccaggagttcaagaccagcctggccaacatggtgaaaccttgtctctactaaaaataaaaaaattagccggctatggtggtgggcacctgtagtcccagctactcgagaggctaaggcaggaga

SEQ ID NO: 11470 - DNA, 1310 bp, Homo sapiens
ctacttgggaggctgaggcgggagaatcggttgaaccctggaagtggaagttgcagtaagccgagatcccaccactgtactacagtctggatgagaaagcaagtctccatcttgagaaaaaaaaaaaatttaaaaattaaaaaagaaaaagcctatggtaattgaagcccaaggatatgttctactctaatgtgttgtcccttttattcttaccaacaggacaaagcccgagcaaagaaagccatgttgtctgaacaaaatagggcttctcctctccccagtgggctcctcaccccgccacagagcggtaagaagcagagcagcgggccggaaatggcgtgaccaccccatccttctccaccaaagacagttgcgcgcctgctccacgttctcttctgtctgttgcagcggaggcgtgcgtttgcttttacagatatctgaatggaagagtgtttcttccacaacagaagtatttctgtggatggcatcaaacagggcaaagtgttttttattgaatgcttataggttttttttaaataagtgggtcaagtacaccagccacctccagacaccagtgcgtgctcccgatgctgctatggaaggtgctacttgacctaagggactcccacaacaacaaaagcttgaagctgtggagggccacggtggcgtggctctcctcgcaggtgttctgggctccgttgtaccaagtggagcaggtggttgcgggcaagcgttgtgcagagcccatagccagctgggcagggggctgccctctccacattatcagttgacagtgtacaatgcctttgatgaactgttttgtaagtgctgctatatctatccattttttaataaagataatactgtttttgagacagctggttttatgagctatgtctggtaacttaaggtagcagtcagctttaattgtggttatatcaacttctgttttttgacttcatacttcttgaggctcaagtctttcttttttttttttttttttttttttttttttgagacagggacagggtctcgctctgtcaccaaggctggagtgcaggggcacaatcttggctcactgcagcctctgcctcccgggtttaagcgattctcctgcctcagcctcctaagtagctgggactacaggcgtgtgccaccacacccagctaatttttgtatttttagtggagatggggttttgccatgttggccaggctggtctcaaactcctgacctcaggtgatctgcccatctcagccttccaaagtgctgggattacaggtgtgagccaccacacccagccttgagtc

SEQ ID NO: 11471 - DNA, 1258 bp, Homo sapiens
cctggagtttaaagtatcctgtcacaaggcttttgcacgttactgtagtaactagatttccttgagtaaggatggtaaatggaaatttatcatttatgtgttgcatttcgccttataaccagggtgcattgtggccatttcttatgcatttttgaagctcttctcacaaccttgaatgtgtatgcaggttctctggggctcttgttgaaatacagattctgattcagtgggtctagggtgtccttagagcttacacttctgaagtgttccccaaggacgccagtgctgttgatccatggaccacactttgagtagcaaggctgtaagagacattcatccttggagttctgtttggcttaaaaattgtgacccctctgtttcaatatttcccttgccccaaaagaaagtctcattaagtctgggtttgtgccttttttatgttggctattaacagccacgtcttttcctttttctaaatagcaaaacaccgaattgctcataaaccgcattccaaaccaaaaacttcagatatttttgaagcagatattgcaaatgatgtgaaatccaaggatttgctagctgataaagaactgtgggctcgacttgaagaactagagagacaggaagaattgctgggtgaacttgataggtacttgatgacaaattatctttccaagataatttgtttctatacacatttcctcattaatctttttcttcattaataaaataatatgtgttcattgaagaaaatgcagggaagcataatatattatcaataatcctttcacctcaagatgaacattaattctctggaatattttcttataggattgtgtgtttgtgcatattcccatgcatgtacatgtacttaaatacttaagatcaacatcttcattttttattatggcctattttatataattaattataccagatagttgacttttaataatcatggatttaatatatataatgttaaattttaaatgaagtatttttatgccacacccaggatagtgctctatctttgaatgtgttgtgaaaaacaaaaatacactttgaatttaaatttgatacagtaaaatgtttattcttgctttccttttataaactttggagcaggtaatttgtaatctggtcagatagctatatgtatgagaaactttacgaaattgctgtttgaaatacacattagcacacacttagaattgttaaaatgctaaatgaaatctgctactcgagaagttctatatta

SEQ ID NO: 11472 - DNA, 3225 bp, Homo sapiens
tttgtttcagtggtggggcaaggtagaagaaggtggctttttaaattatttaggtgttacgttgttttaactaattttgagcacttggtagacagaggagaacaaaatgtacattaaagttcacctgtcaaattttcatttgtagagggaaggatggaggttctaaataccagcaatcttaaaaaaaaaaaaaaaattaactccttgtgtcttacctatttttgtataaaacgacatgtacagatatttccagcaatttatgcacattctttaattctgttccagttgaacatatagttgaccagattaaatgcagcaaacatccaggtgaaattgagtcatttctttttttgtggaacttctgatttctgtcattgagttaattatattaaaattttgaaacctgtacttattcctactagtatcagcacttttatttttcaacttccactgatcttttaaaattgaggcaatatgcagtaaaatatttaaataattgcataaacaccaccaaagagatatcagttagaaatgtcagtactggtgaaactaagctattggctagcaggcagcaaggccatcataggatagctcattcatcaactgatgtacaaaagtcagagtttgacaccctaatagcatttttattttaatacattatttttcacagcatgggctggacatgaatggaatgtatgaaagtttgaagaccttttatttatccatttcttttttttcccagataaaatttacattttacattttgttttcttgcatgtatactgtaaaaattacttctgtttggtggtgaaattaaaacttaatggtgttggtttctctgaacaattagtattttggtgtagtagtgttgtctagccaaaaatctcgtgaatttacttttaatgaaaagaattgccaaatgagtgaatgggaagattttgtgggtgtcttatttgcattttattaccataacctgacttttgttttctaggctttttctggaactgttatagaaaaagaatttgtatcaccttccttaacaccacccccagccattgctcatcccgcactacccactattccagaacgaaaggaagttctgttggaagcatctgaagaaactggaaagagggtttcaaagtttaaagctgccagattgcaacagaaagactaggccctgtctaggaaatgggaatttacatcctaaaacctagttgttcatttgtttagagtatctatagcaaaataggttacatgtagtttgaaataaggtatcctgagttactttggcaacaagttcttttacccttacccgtggtatttgaaaaaaatcaaggtaactgtctgaatactttaatatcagcttgttttgtgaattctctgaatactgtcaacactcttatctaagtttgcctttatgatgcagtggcagcattttgaattacttttcaaagaatactgttcatatgcattgtttttgtgtttcaaactaaatacaggcagttttgtgccagctgtgatattgtgcataccatatggaccattttaaagaaaattttaaaatttcaaatagattcaacaattacattacttgctttcacattttaaaggcactttaaaaaaatctacttctcttgtaggttttgcggctagttggctattcaagaaacctcgcccctctgaatgtcatactgtaatctttaaggaagaaagctacatgaattaattgtactctatgggaaaatttctttggaaagatattttgtaaaacttttttttccaagtaaaaactttatgaaacttggtctcaaaaatgttgtgaactttatgattcaaaattgagtacagatatgtccttgattcatatgtatgctacatgtatcacacaacagatctggaattctttcagttcctcagatacttctcccttagtttttgcagtttcactgggattatgttttgggaaacaaggaaaggtctagatgcttaaacattttaaataaaaattccttacagtttcatcttcccaacattttcattctttaaggctactttcctactaactgaaataacacatttacttttaccacaattcctcaaaataaatttattctaacattgaaaataacattacaagttaatcattagcttgatgcatgctaaaatgtagcttttaaaaagcattctgcattagtactaaaataagccatcaatgccagtccaccctctctattcatggctaaatatttaaaggttatttatagcttctttaatgaattcttcttaaacaaagtgaaattatgtcctagaaaagtagaagctattcgtaactagagcagtgcaactttaaagttttatgaatatgtattttaatgacaagggggcgagcttgcatccccactagttaatggataattcaaaccgaggactgattttgaaagatcacctaaaaatgtagatttgttctttagtaaatttagatcaactatgcatatattttgtaggtaaatctttcagtccatgccccaaccctcaccaaaaccaaagcagaaattacacacacaaagatgctcccgttaggaattgctattcacatgaggctttctgtgctagatttttttctcagaaacaaactttactgtaggactattgtggtgttcttaacagatttgtaatttcaagatgcgtgtcattaaataatttttcatgttcacagacttgattttgagcctgtctatgttacatctttcagataggttttccctcatagaacaagatggtagtagaagcagataaagtgtttgataacacatttttgcgtgttctgctctggagaccatgaaatagtgttgccccatttcatagcttcagtcttataacagagtattaaattgtaatttaaaattatagcttttttatattaaagtttgggacaaaatgaagctgtcttacctgttctgttttaaaccattataaaacagaacagcagaccaagagattctcttttaaactttctattttgaaatataataactttagtctttcagaaaattgcactaaatagtaccaagagttcccatataccctcatttcattcagcctccctcaatattgtaatatagaaccgtaatataattatccaaatcaggaaatttatgttggtgcaatagcgttagacctaaattacagatcttacttgaatttcaccaacttttccaccaaatt

SEQ ID NO: 11473 - DNA, 1218 bp, Homo sapiens
gactctacaaggaagaaatgatcagttttggataattttctttcctgtcccaaaatagccatatgtctgcatgtcttagggactcagctgacacacattttttttaatttgttgcttgctataatgcaaatatgatttcagtcccatagtgaactctacagtgagtccatattataaattaatcagattcaacaaacaccaacatttttaaacttttgaaaaaaatatttaataggaactaagcaaaagaagaaatcaaaccagctgctgacacagctgtttcttttcttgtttaattcagttcaatataaaggtaccatatgctgcttaaaatggtgataggaaagatgaaataatttaagagaataacaagaaaatacatgaattgtcagcattctgtcagatttaaagaatgaaatagacaggtgtagtattgacatgtttaactttgtgtggtgttagcagttttggtgcgaacaactcctgacatgtgctgaagtgatgtgagaacgtttctccttcgctgcagacattggcgaggaggctgggagatctgccggcgtccagcaaccagcgctgcttcgcgacagaagcctgggctcggccatgaaggactgcccgtactgtgggaaaactttccggacatcccatcaccttaaggtgcacctgaggatacacacaggtgagaagtctgagtgcatccaggggcacagcccagagaaggaggaggtccccgtcctgcctgctttctggcccaggtccacagctgtgtgggtcactaactctggaaggttctccctgggcctgtctagccaccattgtatggctcagaagcggccctcatttcctgattcgtcacttaactaacattcacctcgcaaatgactcagggactcgtaaatgtagacttggatggtcctggcctgggataactgggtcgcgtctgagcctctagggcgttttgctaatggtttccttctgctgtattgaaggagtccctccccaggcgcctgtatgaaccaggagtctcccaggtgtcagtgatggggtctcagctcaaaccttcctaagtgcagaagggaatgaagccacttccccaagcatccaggtagaataggctttagcccagcctgtgttacatgcccagacctgggacagggcagctggagtccatcctcgtcactccatgtggcgtggtggaaaagtgactcttccctg

SEQ ID NO: 11474 - DNA, 1149 bp, Homo sapiens
ttcacaatttcaaagatttggggagaaaaaaaacaaatttgtgattttagtaataaaactgcagctatatttggtataagaaatactctcaagaattgtatcagtcattggctttacagagtgatgtttcacagtaactggaggggtttcacatgccttgagaatggctgtgctcctttaatcaaggaataggagtctttttttttttttcttggcattgtgcaaaagggagggagtacttttggtcctgctggatgctgaaggcaaagaaagtgaagaaaaatggagaaaaagatcatcatttccgaagaaataagtgatagaggggagtatcttcatcattagtcttgatagaagattgcattgtaaagagaaattctaaccaatttaaatctatactggggatcgccgggtgtgtggacatggagcttccagcttagaaaatacttagatgagattacagacactaacattctcttatattttccaaattacatgcctgtaattatcctgtaacctggtatttttctgttttacattatcctttttagatatggaagaaagtagcagtgttgccatgttggtgccagatattggggaacaggaagctatactgactgctgaaagtatcatcagtccttcattggaaattgatgaacaaagaaaaactaaaccagatccattaatccatgttatccagaagttaagcaagatagtggaaaatgaaaagtcacaaaaatgtcttttaattgggaagaaacgcccacgttcaagtgctgcaacacactctcttgaaacccaagaactttgtgagattccggctaaagtaatccagtcacctgctgctgatactagaagggctgagatgtcacaaacaaattttacccctgacactcttgcccagaatgaagggaaggctatgtcttatcagtgtagcctttgtaagtttctatcatcatccttttccgtgttaaaagatcatattaagcaacatggtcagcaaaatgaagtgatactgatgtgctcagagtgccatattacatctagaagccaggaggaacttgaagcccacgtggtgaatgaccatgacaatgatgccaatatccacacccaatccaaagcccaacagtgcgtaagcccctccagctc

SEQ ID NO: 11475 - DNA, 1677 bp, Homo sapiens
cttcccattatcattttgtggcaagccttaagttaacaatgtgtctaccaagaacaattgagttttctaaaagtaataatgaagattatgcaattctaactgtagaagagatagctattaaaataatcagtagcctgggcatagtggctcacacctgtaatcccaatactttagaaggccaaggctggaggactgcttgagtccagaagtttaagaccagcctgggcaacacggggagaccctgtctctacaagaaattaaaaattagccaggcatagttggcacgtgcctgtagcaccagctacttgggaggttaaggtgggaggatcacttgagcctgggagatagaggcttgcagtgagccgtgatggcaccattgcactccaaccggggtgacagatgaggtcctctgtttacctccccccccaaaaaaaaaattcagtaggaattccttcatagaataacatgttatttattggtattgacttcttattagacagagctcatagtatttgttttctgctccgaacacttaaaaaatactaagacgtgatagtgaaaatagctttgaaaagaaactacatatggcaaaggtggggaggggggaagatgatgcattctgatcattataaagaatacttttcagggctctatcattttctccctttctctaatcatccagaatatggcgggtgtcccagtgttcaacagtatcatgctaatattccatttgatcggtagtccaagttctttggccagatagtgcaatgttgtgacaccgaccgaagcctttgttctggatctttcttcctattgaaggtggctgctggtggcttcataattttctgttttttttctcacaaagtaaatggtgggcatccatgtttacattgcaccttcccgtgctgtaattggcttgacaaagacaagcaggcttctctgttgagacttattgtgtttttagttttcatagacacttatttaatctttttaaattgtacagcaaggtgctctaagtaatattcgataaaatatatttaatagaaatttgcgtttgatattcatgaacatgaatacatgtatttttttaagaaataagtattgtgtaacactatggcattgcttctatagccaaagtataaaaatttctggaatactgacatgtaaagactacagttaattctgacactgtatcttattaaaataggatgatttgcattttgtaaaattatcctgcacatcaagctgcatgccttaaagcggaaactctaggactgtgttcatgggagagcagttcatctgttcagaacagtgaggcaaggtctgtagtgcttctttaactacctttggaaatactgtacaatgttagaataatttattttgctttacaggagtttgtcatgtattgactttaatattgtattttggtaataaattttttgttaaaaaaaacttggctccaagttctattaaccacaggttgtgttcattcttttcctggaaatgatgactttattgcttagaaagttgtaaataattaaaagcttcccaagagttaaatgaaggttatgatgactcttgataacttgttaatctgttgctgactagcattagactgttacacgaagataaactgaataagcatttagctttttaaatcattttaaaaattaagtc

SEQ ID NO: 11476 - DNA, 1127 bp, Homo sapiens
gctgagattacaggcgtgagccatcgcgcctggccttttattatttttaaatagagacagggccttgctatgttgcccaggctagtcttgaacacctgggctcaagcaatcctcccacctcagtctcccaaagtggtgggattgcacgcgtgagccaccgtgcccagttaattaatgtgtttcaatgagtacttactatatgggggccctcaacagcctcatgataagcatatgatagtagatcttattatggttgagctggttgcatggagtggttgaatccccagcgtggagtccacagagagggcagagcttttacccagtggtaaaagcagagccgggctccccatgcaggcctgcttttaccactgggctttatggcctccaagctccatttgtaattatttctgagctttttctgcccagtcacactaatactgacatttagatcaaaaacaaataataacctattaaaaaagaataaaaacattactgttccttttccctttcaaattgcagaattcaaaaataatggaattgcttcaggtggtaccaagctgtgttgcttcattagatgatgtggctgaaactgaccgcaaggagtatgtcactgttaagatcaggaaaaaatgtaagagtttacgttctttctgtcacgctcaagttgggtatatttagacattcatgagtagttgctggtgttcatttaattgtatatgtaaagtgtaattataatcatgcctggaggagatacaggcaccaaagaaatgtatgttacctcccaatttatcagactatgggtaagctttttttgttactagttttctggttgatggtaatgatgtttcctgaggaaataggatagaaactgtcaacactaccttgaaggttcaggtgtctgcctatggagatggggaacagtctctgggatagtttctttcatgcctcatgttccaaagtcaggtgttctgggcatttcctggacatccagggtaaatgctacctttcaagattttttttttttttttttttttgagacagagtctcgctctgtcacccaggctggagtgcagtagtgtgatctcagctcactgccagctctgcctcctgggttcacgccattctcc

SEQ ID NO: 11477 - DNA, 1162 bp, Homo sapiens
acatttttggtttcccattatccttgtcaggctattttgctgggtgtggaggcctaaagggttggtgggggagagactccagggccaggtgcctctgttcctcatgctgggtgagcactgggacagtgccggagacacacatctcttgggtggcatcctgtgagccgccttctgtctgtggtacctgcctatctacctggtcagggagaggctttgctgtgccattcccctgtgtagttttctatctctttctgtattttaggaggttgaatgatccctcagttgtcactccattctccagagacgacagggggcacacccctctccatgtggctgctgtctgtggtatgtggtcctgggctggcccctaggggctgtcacagcaaagggatggtgcccaaggtgacccagcagagaggcctggctgatgggctgggtgggggttggcagttggggctgcatcgtgggtccaccctccaagggccggaaggagaagaggagcaaacgttccacaggcctcgacggccaccctgctgcctcctgcgctggctgagcccccctgcgtgggtcccacggcatggaaacactgcctaacgctcccgcaggctgggggcccagcaagggaaggcttgaatctgaactatgagaacggtctcagaatcgtcagctcgcagttcttgtggccctgcctttaaaaaaatattattattgtcttttaaagtatacatttggctgggcatggtggctcatgcctgtaatcccagcactttgggaggccgaggcaggcaaatcacttgaggtcagacatttgagaccaacctggccgacatggagaaactctgtctctacaaaacatacaaaaatgagcctgttgtggtggtcacgcctataatcccagcttcttgggaggctgagtcagaagaattgcttgaacctagaaggtggaggttgtagtgagctgagatagcaccaccgcactccagcctgggtggctgagtgagactctgtctcaaaaaataaataaataaataaataaataaataaataaataaataaataaataaaataaagtgcacattcaagatagaaaacataaggtcctccagagtccccggccatccctgtctcccagagatcgttgtgattgatgagtgtctggggt

SEQ ID NO: 11478 - DNA, 1523 bp, Homo sapiens
aggctggtcttgaactcctgaccttgtgatccacccgcctcgctcggcctcccaaagtgctgggattacaggtgtgagccaccgcgcccagcctgtgttttcttattagtaattataaagggaatcttatttgacagttctttgacaaataattcagtttgcagaggggatcctgccccagaggccctggcttggagtggaatgcagggccgtgtgcaggagagcctgctcaagtgccgcctggcttttccctccttaggtggagaccatccatggaaaagaacccccctgatgatacgggccccgtgcacgtgcctttggggcatattgtggccaatgagaaatggcgcgggtcacagctggcgcaggagatgcaaggtcggtggcctgccctctgccagccctttcctcccctgacatattaaaaaaaaaaaatctgcctattattgccatcttttcatccaaagcttatggaactcattttcttctctgtattttaagggaaaattaagctcattttcgaggatggcttgacaccagacttttatctgtcgaacagatgctgcattctttatgtcaccgaagctgatttggtggcaggaaatggctacagaaagaggcttgttcgggttagaaatgtaagtattaggctgggtgctgtggctcacgccagtaatcccagcactttgggaggccaaggcgggtggatcacctgaggtcagtagttggagaccagcctggccaacatggtgaaaccctgtctctgctaaaaatacaaaaattagctgagtatggtggcgcacgcctgtaatcccagctactagggaggctgagacgggagaattgcttgagcctgggaggcagaggctgtagtgagccgagatcacgccactgcactccagcctgggcgacagagtgagattccaactcaaaaaacaaaaaacaaaaacaaaaaagaaatgtaagcattggattaaagaaactcgaacattgatttgtctcaccccacccttccctccatcccttggtatcatttatttaaaatcattggccaggtcaggcacgaagtgatagcattcttaacctgaaaagcaatttggttgcaaaatgacttactgtcttttttcctttcaagtccaataatcttaaaggaattgtagtcgttgaaaaaacccggatgagtgaacaatacttcccagccctacagaagtttactgtgctggaccttggaatggtgctgcttccagtggccagccagatggaagcatcctgcctcgtcatccagttggtgagtaccgattcctacaccttcgtggtagtcctgtcctcatggacactcagctgctctccagaagcaaccatcaatccaatctatgtcattctctgacttggtttataaaatctcttcgaggaatttaaatgcggaagctgcctctgcagccagctcagcttgtcacacactccaggcaagtgtatcacaaagtatacaagttggagacctgattttagattctcagggtgtg

SEQ ID NO: 11479 - DNA, 1180 bp, Homo sapiens
taatattaaagcactgcctagccaaaatagttttttccttttttttgagacggagtctctctctgtcgcccaggctagagtgcagtggtgtgatctcggctcactgcagcctccgcttcctgggttcaagcgattctcctgcctcagccttccaagtagctgggattacaggcgctcgccacaacagccatctaatttttgtatttttagtagagatggggtttcaccatattggccaggctggtcttgaactcctgacctcaggtgatccacccgcctcggcctctcaaagtactaggattacaggcatgagccaccatgcccggccgagccaaatatttttaatcccttggtgagaagatcaaaatatacatgtataggagaataggaaaccattttatgccttagtttccaatgtactggagcataaatgttatagcacaaacttttttcacagttctagaagattgcttgaaaattttaaatgggagagcagtcaggtcagtggtgcggccacttgatggaacagaatgcatgtctttttccagaatgatgtcggggataagcagtcggctgtgaagatgaagatgtttgggaagctcacccgagacacgtttgagtggcaccctgacaagcttctatgtaagagatttaatgtccctgacccttatccagagtaagttggataaacctttacatcagtacaaaatgtattcttgatattaaagctaattttccccttacatactcatataaattcttattttttctacatgaacttatttgcatatcactggatatacaaatctacacattttatagatttgctttgataaattacttctataatttgttactaaaacaaaatctggatagcaaactttattccatattgaagctatgaaactcagatatgtcaagttacaaaagcattatgcctctctcatttgccaccttcttgttgctgctcatgtggtttacatttataatgttacttatgtttttaaattatcattataaaagttaaacactttcttatttgattaataacacttcaagaggtggggtgtggtggtgcacacttgtaatcctagcttgggaggccaaggcaggaggatcgcttgagcccaggagttcgaggccagcccgggtaacatagtaagaccccatctctaaaaaa

SEQ ID NO: 11480 - DNA, 2287 bp, Homo sapiens
aaagcataggaattatgtttttgagatacctttgggcttagattggcattgttttattctaaaaacccaactcagtggtgtagagaaacttgtgtaccaaaattttagtttctgcagatgctagtgtttttttggatacaattttgacaaccaagttagtaaacaaaatatcttaacagtttgatgacacaagctactgatgagggtttggaatattaattcagaaggtagtttctcttgtgttcaaaatagctgccatggggctgttacttttaaagtcaaaattttcttctgaaggctcattttggtatttgatcttaaccaagtgattattagagaaatgtatcaactccatgccatctcccaaaataattgtctaagaaaacttgaaagtgtaaggttttaacctttaatttatttctcttaaatacatcttttgatattgttgttgtgacatttctttttctggttagtgggctttccagactttgtaccactgcttctgtttattcatttatatgcttttgtgtcccataaattatttcagaaaatgctgataaaactcaggatattgacatttttgttgagactaaaaaatggcagtcgctaaagtagggactctagagtctggcttacgtcagtgttggtagtttagattgtctttgtcaacgttttttcttctctcttttgctttcttttctttctctttttttcttagcacagttctagctcaaatttgtgtattttttgtgtgcctgggctggagatgagagactgagtcataactgatttaaaagtttgtgttatcaggtatcttatttgaacatggtcatttttggccacattgctgtttcatactaggacttgggatgatgtagccagaataaaactcaagttgcaccctccggttggtggaagattgctgaccgtgccgtttctgggcaggagaagacatcatggtgtccagcaactcagcaaagccattcttaagagtcgtgaggtccttctgaatgtaaaactggagcccaggagaagctgtcccaggagggctgttaactccctatagagccaggagacaggataggggtttctagggtccaacaccagcttaccttggagtatgaatctacccatgaaggatgagagatgttttgaaaaactagccaggacacacccacaggatcctactggctccttagcagctgattggtgttacataattaacttaattggagatgcattaggtcacttgaatgtataagcaagcacctatggtaggcgctacagacatttaaatctcttgggaattcgatgctcccatggaatttataccagttatatgaattgacttaagtatcttgaaaaagaaactttagagaaagcatcaggggtgtgtactcagtatttcaaatcagaacacaagattggaacttttggaaaaatgggttcaagctttcctattagccatggaaatgcaaagtttagcagaagcaagcaattaggcagagaacaaaaatgttaagcatggtgttgtctatcttattgaagtggttggaaatgaaagcttttaatttgatagatttatcagtataaaattagggaaaccacgtgtggggaatgaatcaatttagagcttcgggaattgtgaggtgacttttgtaacttttgttctgtgtgtgacctgtgaaccactaggatgtgatctgcccttgtgggcaggtccagcatagttaggagttaggctttagcataaatttctagctgcatctgagtctcctgggatgggtgctctttggctggttttggctgcggatggtgagatcagagcagctcttcctgctgctggcccctgcaatcagttgttgggatgccagtgcagatcactaagtagtaagattttaatcaaacacgaccaggtccgaaatgcaggtcatgagtgtgaaattctcaaatttacataaaaagtagaagtatagacagtttaacatttggtattaaaggagaggaaattgtagcagcttttcacgtttcccagtccccattagagggcttgagaccttgtacctgaacaacccattttgcactcagtgctttctgatgccttaggagaattgttttgtttcacaaaagctgggaaggaagaagtccattctgcagctgttagatctgcctctcaggaaaaagtactaacttgttctttttgttcctggctttcatcagtttgtgagatttctctattttttttaaatataattttatttctttcaacaaatataaaataaaaaac

SEQ ID NO: 11481 - DNA, 2062 bp, Homo sapiens
aggaagtatgcctgtattttggggtggggttcaccactgcattaacctctactgactggaagatgcagtcaacaatgaggtactactgagtatggaagttatagaaggagtttcgtggaaatgagtgagacaggtttttctatgaaagtaaaagtgggggagtatatttaaagataatttaaaataaacttgagcaaagtaaaaagaaaataatacaccaataatttggaacatgagctaaatttttttttcttttttagaaagacaacaaagttgctgcatagtctacaaacaagtctctgaaaataggtgaatttctagctcttcatggtcctgaacattgatttcagtctttgcaaagaatgaagaagtgaattcgctgtacatttgtcaccagcactgggtttttgttttttgtttgtttttccgcttaatttcaaagataaaatgcagttacttttgggggtggaaggctcatcttaaaacatgagcattaaatatatttggaatagcagaaggttaagtaatttcttatgtatagttaaactaaagcagtacttcagtgggacttaacaagtattttttcatcactgaaaggttttttttttttatcactaaattgtatttggcaattgcaagttgcctgcagatagggccgtgatactgtgttttgagccacagaaggttgtgtgtgtgtgtgtgtgtgtgtgtgtgtgtgtgtgtgtatgtgtgtgtctttttcctcctttcttttggggaatcctgtaatatgaggtagcttatttcgtcaattaattagggtgctggatggtagagaattttgtcagtcaactatgtacacacagtaaatactgtttcttaggcaaaggtaacttttttatatagttgtaaaattccattatattccattgccaaagaaacattaagaactttgtatagctgtataaaaagcaactaattttttaaagaataaacattttaaagtcagcaaacatactgtgtccttgcagaagttgatgtgctgagcagcagccttatgggtgggtctttttttcttagttttccaggcttaacatttttgattttgttttttaatgtttggaacataaatgaagatttgatacattatttcattatctaaaaaggattaattattcatgctcattgtaagaacttcattttgtagcaaatggcatatcacaggatctgtccagataatcgatattttcagtatacaaatgtaaataatcacagatgagaatgtacttagctgtattttcaaataagtaatcttccccccttttgtaggactttaaaactaggcatcaatgaacctgtttttcctattatgcctggaatttagtcatgataccttgactcattccatcatatttcaagaggattcagagtgctagaaattattttggtagcctgtaacacacggcaacactggtccttgggcctatgatgacccacagatgactcagtatagagttcattgctaattataaattactagtgaatctttttgatattttaagctctagtgggaaaaatctggccacttttgtgtttttatgaaggccatggaataaaaggatccaaagatttaaatatttttatctaatattttgattgttttcttaactttctccttaaaacattcagtagtgataaagatatagaaactgcactgtaggagaattggaatatttaaggctggttgacattttttattttcattttatatcttttgtatagctctacaaggcagtgttttgtaatttggtttcattatgaagatccagtacttggcagccatagtttagacaatattgttcagtgctgtttgcttgcatgttaacaacaaaaccttttagaggacccacaaatcatgatattgaacacagttccgaggcattcagagcatcagagcaagtaccatggcaatacatgtgtagactgttggagatgtcccgggccaatttcaagaaagaaaactgtaaatactagttctacttgctctgaaattatgagtttatgcgttttcccagccctccga

SEQ ID NO: 11482 - DNA, 1623 bp, Homo sapiens
cccagcactttgggaggccgaggcaggtggatcacctaaggtcaggagttcgagaccagcctggccaatatggtgaaaccccatctctactaaaaatacaaaaattagccgggtgtggtggcgtgcgcctgtagtcccagctactcgggaggctgaagcagaagaatcgcttgaacccgggaggcggaggttacagtgagctgagattgtgccactgcactccagcctgggtgacagagtgagattccgtctcaacaagaaaaaaaaaaaagaatatatatatatgtatgtatgtatgtatgtaaacacacacactaatttgagaggacccgtagggtgtctgagcccagccacctgagtttttagtactgtgttgtcaggctcttcccaggcctcaggtgttgtcttttgtgctgtgtggggatgcattgctgcctgtatttatgatcttttgccgtggttctgagcattcacctcaccatgtttacaaagaactgttttgtatatagacattttcaggcacgtgctttgcaccaaccctgcgtggctcttgtctgtgttagctgtcacggtgtgcacactaatctctgttaaagttgtctatggctgttctacttgtaagatagttttctatttccttcagtaatgtgtccacagtaccctgtatttcgagttccattatactgaagtactcatgttttaatagtgcctctccaaaggcctcaccttggacagaggtcaatccttgatgctccagcacaggtgacgtcactaattgtcactttccagtttgtttttctctattaaggaagacattttctaattgcatctccatgggctgtgagactgtgtgaagccgtttgtgtggtctccatgtaggtgctgtgttcccggcaccgccttgctctgaacactggtaattccaggtgctgcgcttggcagaggggtctcgccaaagcgcatgtgtgtgcatgtgtgaacgtgtgtgtcctttgcatggttgggcgtgggtgccttgctagggcatcagcaggacattgtgtgtatagttacaatgcttccaaactggaactctacattttgtatcttttaaagctcctataagtaaaataactattggctttattaaaaatatacatttaataatactttgtatccttgtttaaaatgaactgcagaggacattatgtcaaaagccctgcctgactcattgctttgaaaagctgcatactgagttggtttttaggtcagcctgtcctctgattctagcaaggggaagaccacttgggatattacggtgagctgaagtggatgggcaggagggagaacaagcagctacgcctcccctattggcttccctaaggcccaagctggtttaggcccctgtgcagggggagccagtgcagtagtgaaggagacgtcctctgcaagggtgcaagctctctgggttggggtctaccaacacccatgttccaccaaatgtggatgctgtgacttgcccagccagcttgtccaatgacgagacccaagaatgagggcttgttttaccctcttcccaaaccagggacccaatctatggcagagatactgtgccttacagggataagaaggacctgtctctgc

SEQ ID NO: 11483 - DNA, 2459 bp, Homo sapiens
tatagagttttgtcgaatgaatgaatgaagccgactagtgcacagggagtgcagcggcgcgatggtagctctctgcagcctccaacacctgggctccagtgatccccgggctctgcccaccctccccactgccacttccgggcagaggccagcaaagcggcggcgcaagaggtagggagagaggagctgaggccccagatcagcggccgcgggcaaggtcgctcagcgggcacccggcctgggtatcggggcgcgggtcgggggcggggccggggctcaggggtggggccgggccgggccgggccgggcgcctgcgccataaaggccgccgcgcgcccacgcgcctcgcttgctgcgcgctgccggcgctccttcctcctcggctcgcgtctcactcagtgtaccttctagtcccgccatggccgctctcacccgggacccccagttccagaagctgcagcaatggtaccgcgagcaccgctccgagctgaacctgcgccgcctcttcgatgccaacaaggaccgcttcaaccacttcaggtgcgggcgggccggaggcgggggctgccacgcgcggcgcccggaaccgggcacgcgggcctggggtctggaggcgggggcagcggtgcccggggaccccagtccccgacctccaggccacggactggggcccaggccgagtccgcacttcgtccttggagtctccttggagtgcgttcctgggggcttgcagcctcgccgggagtctcggccccgggtctgcttcgttacgaggaaaaacgggcccctccgtggggacatttcccctcctcctccccgtgcagctctggccatttgagcaggggctcctttcgcagttgtgaagagaggccttggctgacgcagcaagcgggaaagggctgtccctttccatccgctcctggccacatgagcttgggagcgtctgcagggcgggcagcccgggcgggggtgtttgagggagctgggtggaaggatggagacgtcgggcgtgattcctgcagaagacacctgtgcacgaccgggaagtgggaaggagtgtttgagcaaatcatgggcgggagtgcggccaagggagctctgatcactgatactggtggaggcgggggaggggagcgactgtggctccgggctagacgtcccgatggccatccctgtcatctggatgggtgcctgagtaacttacggcagaaagtggaagccctgggaaggggtggtcccccacttcagtccgggctcctcatccagggtctgcctgcatctacggtctgtgaggatggcttctttctctgggctgctgttgcagatcatcctggtgggccagcaggtgacagacaccaccactgtgctgggtggccgcggcccttgtggggcgtgggtcagggaggatgtttcttctgggaacagctcctgcttagggcatggctccccgctagggagaccagggtgtggtcagcagcatctccatctttctgcagcttgaccctcaacaccaaccatgggcatatcctggtggattactccaagaacctggtgacggaggacgtgatgcggatgctggtggacttggtaatgttctgcttggggaggcataactggtaaccgacagagtggtgggtgagctgggctcctgggagtccccaggaccttgagtatcttgagttcttcctctcattagacctcagtcacctcctctgtgctggtgaggcacctgtccctggcttaggttctaagcagcatcccagggaccccagtgtctgatgtctgagtagacccttcccagacagcaggggagggaaccagacagcagccgtctgtctgtctcattggggacagcaccaagccttgtgtttgggggctgacacttggggtggccagtgtgggtgggaccaggcctcagtatcgtctcttcctaggccaagtccaggggcgtggaggccgcccgggagcggatgttcaatggtgagaagatcaactacaccgaggtgagcaggccccacataccctctggggcctccttccttccctttggggtttatctgactgttagccgcatcaccctgtgtcttcaccccttctcttgggcaatgcttttgcttaatgaggggcctgaaggcctttttcctcctgcttgtagcagggctttggggtgtgccttccacaagattggtttggtgagctccttggaatggttcccagtgtctgcctgggaggagcatatctcatacccacagggagagtttctcaaggctgacattttcttggagaagttaactctaatatatcctcaatgcaagttttagtagcgacaagaagaatcttagatcaccaaagacttcagcctactcaagcagtaggagtcaataggaagcagtggtgaggccaggcctgggggcccctgttcctgactcagtatgggagcccagcctggaggtataatg

SEQ ID NO: 11484 - DNA, 1289 bp, Homo sapiens
agaacccagaaagtggagactctgtctcaaaaaaaaaattaaaaataaatagctgggtgcggtggctcaagccagtaatcccagcactttgggaggctgaggcgggcagatcacagggtcaggagatcgagaccatcctggctaacacggtgaaaccctgtctctactaaaaatacaaaaaactagctgggtgtggtggcgggcgcctgtagtcccagctactcaggaggctgaggcaggagaatgacgtgaacctgggaggcagagattgcagggagccgagatcatgccactgcactccagcctgggcaacagagcaaggcttcatctcaaaaaaaaaaaaaaaaaaaaaaaaaaaaaaaaaaaatatatatatatatatatatatggtaaattaaaaacaaaaaaatagaggcacctgcgagggcctgaaagctgggactgaggtaccaggacacggcagtaatgatgtttttgagcagcggattatgcctgggggtttgggctgatggcatcttcgcccctgtgccagcgtgtccggagcggtgactggaaggggtacacaggcaagaccatcacggacgtcatcaacattggcattggcggctccgacctggtgaggagaaaactgccttggggtagggtgggagtctgggcactgttggtcccactcaggtctttactttctccagggatgggacctggctgtctccacttttcgtgggccctgaattcttattctctgatgctatgtctccccgcagggacccctcatggtgactgaagcccttaagccatactcttcaggaggtccccgcgtctggtatgtctccaacattgatggaactcacattgccaaaaccctggcccagctgaaccccgagtcctccctgttcatcattgcctccaaggtatgagtgccgaaaactgcccggcccctggccctgtgtgtgttggggtggggagggacagctgtcttgccatccccctggccattggtcccttttggtgggttccgagtgaaccatggtttgtggatcaggtcagtacagctgccctagactgtttccatgcctagcagcaaataaggttgactgatgaaatcctgaacacatcagtttgaacctttgtgtcctgaccacacccgctcgccttgcggcatctctgctcagcctgggactgctcgccactttcttacaaacctgtcctttatgcctgctccttttcttgttgttgtttttgagacagagtctggctctgtcacccaggctggagtgtagtggcgtgat

SEQ ID NO: 11485 - DNA, 1176 bp, Homo sapiens
catcatgctgtcctcacaggctgctggcctctctgcagctggctgggatatttatttcatgtccagaaggaaggtctgggtttttttgcgtgtgcaagttggcccccgtctttgcccctcacaactgcagtcctgtttctctcctatcctaggcagagtcagatccctgcactcagggccacctctcactggaggggctttgtctaggtccgagtcctcccatgtcgtatcttctggctctccatgcagccttccttcgttgcagaaggagctgtgcccactgcccacaggacgcagggtgtggccacttctgttgactctgcttttgtgtcacaggttttgacaacttcgagcagctgctctcgggggctcactggatggtgagtgctgaggctggttctctgccaagtgctggccagaggcgcgtgtgttggtcctggtcccccgctttctcccccactgtcctgtccctcccctccccgtgcagctgctcagctcccactcatcctgctcctgtttcaggaccagcacttccgcacgacgcccctggagaagaacgcccccgtcttgctggccctgctgggtatctggtacatcaactgctttgggtgtgagacacacgccatgctgccctatgaccagtacctgcaccgctttgctgcgtacttccagcaggtaccagctgccaagccaggccttggagtcagcaagatttgtggggggtctgggaggtctaggaacctgggtttcagctcctccaggagctctttgccccattgcccttgggcctggccaaggtccatctgtgctccttgtctcaggatgaatctttgtaactgaggttggttccatttgagtgtcatctgagtttgatcaccatgggaggggcatgactggtgatcatggtgccctggctagggaggtcctggcttgactcaggggatgtttctcagctggggtcacttctttcttgcacatcactatgcatgcctaccatagtgtctgaggacgtaggatctagccctggtatgaggccctaggtctgttagtatctggggaggaaggatctggtacaggtatgaggacctgggtctgtccatgtctgaggaggtgggatttggccatagggtggggctgcaagctggaatcccttatagcctgcactgcctttatccc

SEQ ID NO: 11486 - DNA, 4641 bp, Homo sapiens
atgcgccatcacacctggctaattttgtatttttagtagagacagggtttctccatgttaatcaggctggtctcaaacttccaacctcaggtgatccgcctgccttggcctcccaaagtgctggaattacaggcttgagccactgcgctcagcctctttctttctttttaaatgttctttcattttgccaagaactgggtttctgttccttttccagggcgacatggagtccaatgggaaatacatcaccaaatctggaacccgtgtggaccaccagacaggccccattgtgtggggggagccagggaccaatggccagcatgctttttaccagctcatccaccaaggtaggcccctgtggcctgggaagggtgatgttgggggagggaaaggatcttccagaagagatatctcacttaggtcagtgccctcctctaggccatatggctagctcccatgggctggggtcatgtgggtgaccacagtgcccttcacaggcaccaagatgataccctgtgacttcctcatcccggtccagacccagcaccccatacggaagggtctgcatcacaaggtaagagcccccatctggccccatctggggggtctggctcacattgcacccagacctctgaaaacctggtgcattggttggcaatcacgttagttttctattcctgccgtaacaaatgataacaaacatggaggcttaaaacaacactcttcttttgtggggtggggaggggggacagagtcttgctctgtcgcccaggctggagtgcagtggcacgatcttggctcactgcaaccttcccctcccggcctcaagtgattcttatgcctcagcctcccaagtagctgggactactggcactcaccaccatggccagctaatttttgtagttttggtaaagggggggtttcactatgttggccaggctggtcttgaactcatgacctcaagtaatctacctgcctcggcctccctaagtgctgggattataggcatgagccaccttcctgggctatctgaagagtttctgaagctcaaatatccagcaggccctgatgtgtctctgcttagagtcttgcaggctgaaatcaaggtgtcatcaggactgtgtttctttctggagaccttaggggaaaagcctttgacctgcttgtcaggtggttggcagaattcatttctctatggttgtggaactgaagtccagcttccttgctgtgggctgaaggtcgttctcagattctcagaggtcacctgcatcctctagcttgtgggcctcttcactgcagaaccagcaatggcaggttaaatccttctctgaagctttgattctgtcttgccacttctgttgcatctctctgacttgtttaccttcctcttctacattttgcttttgttccctaagtgacagtgtcatgctgtgttgtctaggctggacttacagtggcatgatcacagttcactgtattctcaacgtcccaggctcaagcagtcttcctgcctcggcccctcaaatagctgagacttacaggcactaacaggcacttacaggcacttacaggcactaacagcctggctaactgttaaactttttgtagaggccagatttcactatgttgcctaggctggtctccaactcctgggctcaagtgattctcctgcctcggcctcccaaagttttgggattacaggcatgagctaccgtgcctggccctcttttacttttaagggccagtgtgattagattggggctactagataatccaggaaaatctccccttttgtttattttatttatttattttattttagagatagcatgtcactctgttgctgaggctggagtgcactggcccaatcatagctcactacagccttgaactcctgggctcaagcaatccttttatctcagcctcctgagtagctgggaccacagatgtacaacatgcctggctaagtttttttttttttttaaagagacagagtcttgctctgttgcccaggctggggtgcagtggcacaatcaggctctctgcagcctcaccctcctgggctcaagcaatcctcctacctcagcctcctgagtagctgggaacaggcacacgccaccacacccagctgatttttttatttttattttttgtagagatggagtctcagtatgttgcccaagctgccctcgaactccttcagagaatttactgtgctttgtctcaggtgtgcagagcagcacagggttacggtagcacaatcttgggagtcagtgagctggattgaattctgattgttcctgtctatagttctgtgatccagcactgtggacttgtggaacccaaggctctactagaacagggcgatgatgcctttcctccttaggatcttagtattatttttttttcgagacaccgtttcactttgttgccccggctggagtgcagtagtgtgaccttgactcactgcaacctcagcctcctgggttcaagtgattctcgtgcttaagcctccggagtagctggaattacagttgcacaccaccacgcccagctaccttcttaggatcttaaaagatagatgttggtaaaattgtgagcaggacccctagcaagtggtgtgtagttctttttttttttttgagatggagtctaggtctgtcgcccaggctggagtgcagtggcgtgatcttggctcactgcaccctctgcctcccaggttcaggtgattctcctgcctcagcctcctgcctgatgacaggcatgcgccaccatgcccagctaaatttttttttggtatttttagtagagacgggtttcaccatgttggtcaggctggtctcgagctcctgacctcgtggtccatccgcctcggcctcccaaagtgtcgggattacaggcgtgagccaccgcgcctggccactggtgtgtagttcttaaagagcagttatcactgttccctgccttgtggtgtcatcggatgtgtccccctcgctccaactgagctgtacagcgagtgacccaggctgggactgacccctgctgagaagtaccaggcggtcttgtccctctgcctgaagcccagacagtgctctcaagcataactgatgtctcgctcatcagatcctcctggccaacttcttggcccagacagaggccctgatgaggggaaaatcgacggaggaggcccgaaaggagctccaggctgcgggcaagagtccagaggaccttgagaggctgctgccacataaggtcagcacttctgcatttggctttggggtgcatgctggagttggaggtgtgaagctatggcaccaggcaggggcttggggcgtgcctggcttgtcctacagaatgggagggcctgtcctcacagacctgcacgtctcagcctctggggcagggtgtgcttcccttcaaggggtttagggatcaggactctcttggagacattccttggtgttttctgcaggtctttgaaggaaatcgcccaaccaactctattgtgttcaccaagctcacaccattcatgcttggagccttggtcggtgagtgagtaggggaaaggtcctggcttggggtaggttggaatgggcttgtggagccctgatgtgccctgtctgtcacttctgcagccatgtatgagcacaagatcttcgttcagggcatcatctgggacatcaacagctttgaccagtgggggtgagttgctcacttaggggagggccgggaatacctttgtgtcggctcagggatttcagtagcaacgttagagccttcctcataccactcttcccttcccttcccttcttggcagagtggagctgggaaagcagctggctaagaaaatagagcctgagcttgatggcagtgctcaagtgacctctcacgacgcttctaccaatgggctcatcaacttcatcaagcagcagcgcgaggccagagtccaataaactcgtgctcatctgcagcctcctctgtgactcccctttctcttctcgtccctcctccccggagccggcactgcatgttcctggacaccacccagagcaccctctggttgtgggcttggaccacgagcccttagcagggaaggctggtctcccccagcctaacccccagcccctccatgtctatgctccctctgtgttagaattggctgaagtgtttttgtgcagctgacttttctgacccatgttcacgttgttcacatcccatgtagaaaaataaagatgccacggaggaggttgtaggctcagcctctgattttttttttcctgtgatggtgctttatgtagcagagggcaggagcgctcagcaggacgcaggctgtgcctctgcggacacttaacactaagtggtgagcgggtctagagtggagcaaggtgccctgagaagacaatagtggggtgggggcacaatcagtcaggacggcaacttggcctgtgtcaccaaatcccaagactgttttccactcctcacctctgtgactgcagaaattggatactctgttcactcgatggttctaaaaactgcattgagattatgtttgtttcgggtgaattcctggacaagaccgaggatgactgccatctcctggcaagacgctcaggtagttcttttgctttaaaaggcagatat

SEQ ID NO: 11487 - DNA, 1182 bp, Homo sapiens
tcctggcttcaagcagtcctcccacctcagcctcccagaatgctgagattatgggcatgagccagtgctcctggcgtgaaattactctcttaacctgactcatcttttttccctagccttaaactactttaatagttccaagttgatattccacattctgccttcatttctatcatgtattatctgctagttatattagaatagtggtgagtttaggaacaccttgaaacagtgttttgtgtaaggtacagcaatagaagagaaatatggcacgttggatttttaagattatgtgtttctgtgggtacttctcctggagtaaatttgtgatataaattctatttgatattttgctaagtgaatgtctcttaaatgtctgtaattaacagttgtattattctggccatagctataagaaaattgtacaaaaaatgaagccagtaagatagttttgagtctgtgtcatcctaattaaagataactaattttttttttcccaaaaactcatactgtttgttttacttccagctgcccgaaaccatgttaatagaatgtgcctggcagctgatgttcctcttattgaaagtggaacagctgggtatcttggacaagtaactactatcaaaaaggtaaagaaaagttttatttttttaacttcccaaatatttatttgagaccttggagcaggaggaaataaactttgtatttatataaaatgaacaggtgaacatccaaaatgtaaggacttttatgcttatataaaacttaaaatgcggggccaggtgcagtggctcatacctgtaatcccagcacttcgggaggccgaggtgggcggatcacctgaggtcaggagtttgagaccagcctggcaagcatggtgaaaccccatctctactaaaaatacaaaaattagctggacatggtggccggcgcctgtaatcccagctacttgggaggctgagccaggcgaatcacttgaacctgagaggcagaggttgcagtaagctgagattgcaccactgccctccagcctgggctacagatcaagcctctgtctcaaaaaacaaacttaaaatgctataaacgtgctcaaaagactatgggcaaggaaatctttcagctctgccattttgtttcatttgacttttgtattaaaatccttagagtggtaagcatgatata

SEQ ID NO: 11488 - DNA, 1249 bp, Homo sapiens
gccaaaaagaaacgtatatcaataaaatgaagagtatttggtttagtaacacctaagatttttctgtgtagggagatatatcttgaaattaatcttgtagtttacttaatttcaggagattataaggatatggctgtattccccagacccacttagttttgctcaaaaaaaaaaaaaaaacacatataagaaaatggctgcgaataatatttagataacatttacaactttgagaaataatttcttggaaagctgctgtttgtctttccagtagtttttctgtttagtgtgatcaaggtaaactcatatttgacactcaggtgtagtaatttttatttgggcttgtaagtcatgttcactgaaccaggagtcggcgtcctggcacagccttagctatgactggtagattcagttagcttttgtgttagtttatcataaagtaagcattttggagtcactaatattttaaaatttccttgacaacgtaaaacgtagttggaatatagatgaatgaagtgtttatattaccttataatgttgagaaactgccatcatggagtaaatttttctcatatcctgacttcatagggtgtgaccgagtgttatgagtgtcatcctaagccgacccagagaacctttcctggctgtacaattcgtaacacaccttcagaacctatacattgcatcgtttgggcaaagtacttgttcaagtaagagtgtatatttcttggcatgcttttcggtactgatgatggaaaatggagtcatttttatttaattaccttgaagagattgaactcaggatgtttaaatatggtgaagggatgctttagtagctttcttgcagtatttcttaggttaaatgtagctggccgggtgcggtggctcacacctgtaatcccggcactttgggaaactgaggtggtcggatcacctgagcgcaggagtttgagaccagcgtggccagcatggtgaaacacatctctactaaaaatacaaaaattagttggccgtgatggcgagtgcctgtaatcccagctactcgggaggctgaggcaagagaattgcttgaacccaggaggtggaggttggagtgagccgagatcgcgccactgcactccagcttggcaacagagtgagaatttgtctcaaaaaaaaaaaaaaaaaatgtggccatgactgttcaggaaacttagtcttatattggagacagccatgtaactaagcgataaaaatctttatatttgga

SEQ ID NO: 11489 - DNA, 1182 bp, Homo sapiens
tgttcatgtttctgtgggttatttttggaggggagggcacattttaaagatatcgcagttcagaagttctgttgtgaagcactttagtttaaaaatctgtatactttgtgtgcatgtccccatgagcttggaggcattgctgactggcatccctaggctcagtgattgtctgtagttgtacatttatttacaactacataatgtacatttatttgtatgattgtgcttcagactgatctttggagctaaatttagggaagcttttggagaggtgacttaggaaggcaggggcagtcggcagttcagggctcctttactctgcattcctcagagcacttctgcatttcgctgttttcaatgtagagattctgttagaacttccttttacaaatgtttttccttttgaaaattgttatgctgctggtatatgacatgtatctttaaatcagatttcatagtgtaatatagatcagcaatgacgttttcttgtatcttatcaattagggattatggggttcatgggatctgtctttcttttgtaagctttttaaagatgacatcaggtatctgttgacaatggacaaactatggcggaaaaggaaacctccagttccgttggactgggctgaagtacaaagtcaaggtaaagaatacattttagtcttggaacacctaagctggaaatatcctcgcgtaaagtctttgtatagccctgttgttgcttgaaaatgatatgtcttcatatattcaaacagtgcaaaaaaatatgaagaacaaaagtcactgaagtcccacacttcagaaatagccactaataacattttcaggagtgttctggtggtccgccctatgtacacagatgcaggcattcgttatacactgcgtaaatggaatcatactattgataaactctcacttgcttttgtcagtcagtatagttaactagtctcttattaacatgtagtgtttttgtattttccctgaaataaagttttgaaattgctatatatttatgtatatcttttttttttttttttttttttttgagaccgtgtctcgctctgttgccaaggctggagcgcagtggcacgatctcagctcaccgcaacctgggttcaagcgattctcccgcctcagcctcccgagtagctgggataacaggtgtgagccactgcgcctagc

SEQ ID NO: 11490 - DNA, 1112 bp, Homo sapiens
agaggatgtagaaatctttttttggcattgtagctaaagaaataatgtccaagagttgctttaggccaccaagctttggacccagttttatgcttcagcaataaaagttatttactgttttaaagaaacaaaaaaccaaaaccttgccctgatttgaaagtgcatgtagagtttttgattatcacagaaatttgttgtgtaccgtcttttttattataagttcagtgctttgaaaattagaatccaaggtgggtatggttggctcacgcctgtaatcccagcactttaggagaccaaggtgggaggatggcttgagcccaagatttcaagaccagcctgggcaacattatgagaccctatctctcatttttttttaaataaaaattaaaaaaaaaattagaatccacatatttggtgtatacatagtgtatgctttgaggaacaacaggatttctctggtgctcctttgctttctaaatagtcatagcagtgacctgtgtgattctcctacagtgaagacctaggaaaggacgttgaatttgaagttgttggtgatgccccggaaaaagtggggcccaaacaagctgaagatgctgccaaaagcataaccaatggcagtgatgatggagctcagccctccacctccacaggtgagtatggccccagccagcaggttgttaaatacccacaaagcagaagtaaaaacaaactgattattaggaacattgaccataaatccataaaactactagaggtgtgtattggtttggtattgattgttgtaatggagctttgaatttatgaaccatgaagacatttaaggctgggtgtggtggcttacacctgtaatcccagcactttgagaggccaagatgggagtattacttgaggccaggagttggagaacagcctgggcaacacaatgagagacccccatctctacaaagaaaaaaaaaaattaaccacgcatggtagcgtgtacctgtagtctccgctactcaggaggctgaagtggttcacttgaacccaggagttcgacactgcagtgagccatgattgcaccactgcactgcagcctgggcaacagcaagaccatgtctcaaaaaaaaaaa

SEQ ID NO: 11491 - DNA, 1480 bp, Homo sapiens
cctctgcttttctattggagaatgtggaggtagaatcaaggatgtgtaatgagtactttgagttacataatgcttgtcacaattttttgttttgattagaaaataaataggttcttatataaaacatttaaaacagtatggaaatacgtaatgtgtaaagtgaaaatgcagccattcttaagtctggtgtgtattagaagagtcagctttcaattatagaaaatacaggtgagcacaggtaactcccacgcttttacccattttctttttcccttttttctgaaataagctcaagagcaagatgacgttctcatagttgattcagatgaagaagattcttcaaataatgccgacgtcagtgaagaagagagaagccgcaagaggaaattagatgagaaagagaatctcagtgcaaagaggtcacgtatagaacagaaggaagagcttgatgatgtcatagcattagattgaacagaaatgcctctaaacagaaccctcttactatttagtttatctgggcagaaccagattgttatgtcctttgttccaaagggaaaaaattgacagcagtgacttgaaaatgattctgctccctttgaaagcattcattttgctagaactgttagacacattgcagtatgctgtattgaaagtaggaatatagttttaaaaaccctttgaacaaagtgtgtgcataaccagtcatgagataaaacaacacaatgcatgttgcctttttaatgtaaatacccgtaggtatcattaatagtttcaaaatattgtggtttagtaaagttgatacctggttataaatattatgcctttatttttggctagaagaagaattatttttagcctagatctaaccattttcatactcttaactgattgaaacagattcaaagaagtatcgagtgctatgcattgaaacttgtttttaaatgttagatggcactatgtatattaatgtaaaacaatgttaatttactcaagttttcagtttgtaccgcctggtatgtctgtgtaagaagccaatttttgtgtattgttacagtttcaggttatttatattcgatgttttgtaaaactcaaataacgactatacttatggaccaaataaatggcatctgcattcttgttacacatgcctgcacagttcctgtttctgctgccttatatctactgcaggaatgtcaaattcttttcattaaaaaaagaactcggtcgggcacggtggctcatgcctgtaatcccagcactttggaaggctgaggcaggtggatcacctgaggtcagtagttcaagaccaacctggtcaacatggtgaaaccccatctctactaaaaaaaaaaaaaaaaattagccgggcctggtggcaggcacctgtaattccagctactcaggaggctaaggcagcagaattgcttgaacccgggaggcagaggttgcagtgagccaagattgtgctattgctactcca

SEQ ID NO: 11492 - DNA, 1185 bp, Homo sapiens
agcgccgtgggttccaagctgagctgggtcggccctgcagcgccggagagcaaggcggcgcagggaagggagatggggcgggatgtggggaaagctgtcgactgcttggatctctccggcccggatggcgccagctgcctccagctcagcctgcggaaatccgagctcttcccagcggcccgacggcccgggcgccccgcagaccctgggctctccccgcggtgcctccgccgcccgcccctgcgtcctggcccggcctccacgcccctccgaggtcccggcgcagcgcggccgccgccactccccccacattccagaggccgcagcgccgtctccttcctcgcattcctgcccccgcaaaggagtccctccgccccgcgcgaggccgcggcgaggagggggcgcggcccggcgcctgggagcttacattcctccgccgcgcgcgccgccgagcagggcgccgcgtcccccggcccgcgcgtggccgccggaacgaccccggcccggcgccggccccgccccgccccgcgcccaggggtcccggggcgggctccgggcttcgggcggacgatgcggcggcccggccggagcggcggcgggaagcggaggcggaggtgacgcgccagggccggcgggccgggccatgcagcgctccagggcgggcgcggacgaggcggccctactcctggccgggctggccctgcgggagctggagcccgggtgcggctctcccggtcgggggcggcgggggccgcggcctgggcctggagacgaggcggcgcccgcgctgggccgcagagggaagggcagcggcggccccgaggccggggcggacggactgagccgcggggagcggggtccccggcgcgcggcggttccggagctcagcgcgcagcctgcgggcagcccacgggccagcctggcggggtccgacggcggcggcggtggcggcagcgcccgatccagcggcatcagcctgggctacgaccagcgccacggcagcccgcgctccggtcgctcggacccgcgtcccggtcccgggccgccttcggtgggcagcgcccgctccagcgtttccagcctcggctcccggggctcggccggcgcctacgctgacttcctcccgcccggcgcctgccccgcgcccgctcgctccccggagcctgcggggccggctcccttccc

SEQ ID NO: 11493 - DNA, 1580 bp, Homo sapiens
aaaaattagccaggcacctgtagtcccagctacttgggagggtgaggcaggagaatcgcttgaacccgggagtcagaggttgcagtgagccaagatcacgccactgcactccagcctgggcgacacagtgatactctgtatcaaaaaaaaaaaaaaaaaaagattcattcccgaaaatttgctgtgaattcaactgatcttcaagtgaatgtgtttattaaccaacacatgtatttacatgagcaaaatatttattcatatatttgttttggcaacctttttaaataactctgtcgacaatgtgttctgtttaatttttttctgaaattttgttattataacaataacaacataatattaaagggaaatttagaaaaccacccataacccagtgtctcatctgttggaggagggtgctgagagctggaagcacggctccatccctggtccccagcgttccagggacccctctcaaccctcacccttgcagggagacgactccgtgggaaggcgttctacaacgtgggtgagaaagtgtactgccaggaggacttcctggtgagtccaagctgtgccctggcagtgccaggggtgggaggtggggcagggaccctcattctgactcgagtggagacctgaggccaggaggcaggtgctagctgggccgcgagtgcccctttgtcacacaatgtcctggatcctgtgtcccctcccagtactccgggttccagcagacggccgacaaatgcagcgtgtgtggacatctcatcatggaaatggtgagcccctgccccagcctcctggagcccctctgacgtgggtggagtctgaggactctaccgtctcccctgctccagacctgccaggggttcagggccagagcctctcccagggcggtgctgagcctcctgcccgcgctgacccctcagtgtgccccgcccacagatcctgcaggccctgggcaagtcctaccacccaggctgcttccggtgctccgtgtgcaatgagtgcctggacggggttcccttcaccgtggacgtggagaacaacatctactgcgtgcgagactatcacacgtgagttgctggtgctgtggagcaggcgggactcgggccgtcctccctggctcctctggaagcatttttttcctgctggactgactgccctttgttcttggccttttgccttccgcctccccttgtacacctgggcttggggcaggcatgtgtctctgcctgcatcccctctcctggtggtccggccaccagctgtcttttgcctcttctctccctatcgtggcctgcatgcttctctactcctggcacaggggaccctcctggctgcagtacccaccatctttccccctcctcccctccatcccctgccaggccaggcctctttcagctggggcaggggcttgggatctctgcagcccccttctcctgcctgtctgatccctgatctgtttcctcctaccgtgactccaggtttattcctgggagctctggttctgagcagggccttccgtgggattggagtcctgggcagaggtccctggtactcagggtgaagccaggtct

SEQ ID NO: 11494 - DNA, 1163 bp, Homo sapiens
tgtctgagatcatgatgtatgtgctcattgtggtgttgaccatatggctcgtggcagagatgatttactgctacaagaagatcgctgccgccacggagactgctgcacaggagaatgcgtgagtagggtggctgggaggtgggagggcacccagggcaccgtcacacttgccagagaggaactccggagcccgggcagggaggaggcagcggagcggcccagggcgccatctctcagtactacccagaggggagtgctccctgtcagacacaggataggggtcgtcagacccagccccttcctccctccaactcaggagcccaggctcccagccagattcctcaaagaccctgaggagtccacccatagactccttctctctctaactaaggagccctgtgtacctggggtggagaccgctaccttcccccatcccccgggggttgggtcggtctgatgatggggtcactgtatacctggcctttcccccacagctcggaatacctggccatcacctctgaaagcaaagagaactgcacgggcgtccaggtggccgaatagccctggtaaggcggatgggctggcagaggggaaggggattgggaggggccgaagtcccccaggtccctaattccccctctcttgctccccttcaggccctgggccccgcctcaaggaagagccagccgtaatggggactctccaggcaccgcctgcccccagcgtgggggtggccactcctgggccccagaaagcctcagagtcctgccgacggagccactggggtgggagggggcagggggcttggctcgcacccccactttcgcctcctccagctcctgccccgccggccgcgcaccgccatgcatgatgggtaaagcaatactgccgctgcccccaccctgcttctgctgcctgtttggggaggggggcggtgaggtgggggcagcggccccgcacccctcctccttgctgatttgcacacattggccgcttcagacacgcacttctggggccagcccctccccgcctcctccctgcctggcggcaggggtcgcgatgatgggctggagcagtttggggcagggggttctgggacccactccgactccccctccccggcatcatttcccctcccgcttcctccggctggacctggggtc

SEQ ID NO: 11495 - DNA, 1100 bp, Homo sapiens
gaatgatgtgtcttaagaggaaagtttcttagagtgcgaaacggatttgctcagcaagtgatcgctgacctcccgccatgttccagggctgtttgaaacacaggacagaatgctacacgcagaaggagtccccactcctgttaattgcagagaatgcagtaaaccccaagcacagcaatgaggggacgggatggaggaacagagaaagctaagggtagcctctgccctcctactccccaggctgtgatccaaaatcccttcagcaatggtggcagtccggcggccgaggctgtcagcggggaggcacgatttgcctatttcccagcgtccagtgtgggagatactacggctgtgtccgtacagaccacagaccagagcttgcaggctggaggtgaggagtagaagtcagattggcaggtgggggaggcaacgggcccagcagggagggaagcccccccagccagttctgacttcaccctgccttgccactaaccccccactctccctgcaggccagttctacgtcatgatgacgccccaggatgtgcttcagacaggaacacagaggacgatcgccccccggacacacccttactctccgtatgtgcaggggacacctggagggcctggtgttgaaatggaaggaagaggggtttctggagtagaagctgggcagttagcatgaagtgggcacatggtgtaatgttttttttctttgcctgtttctgctgctctagtgcacataaagtatcatgtcttttgtttttgcagatggatttaccttgcaaagataattttcaaatctaatacttagcagatgcttgggcaaacagctctgcgataatacatgccccctttttttttcctcctcttgtagaaaaattgatggaaccagaacaccccgagatgagaggagaagagcccagcacaacgaaggtgaggacaaggtgtggctccgggtccccctgaccaccaccctcacaggctcagccagccctggagtgtggagtgacagagagagaagccactcctgggcaggccacaagtgctccagagggctttgctggacgctgtaaaggtagaaagtgagcaacgagggga

SEQ ID NO: 11496 - DNA, 1913 bp, Homo sapiens
cgagctcctgaggcagcaggtgggtgcggggcctggagcgggtcagggcccaggagccccagatgcaaggcgctggccctcagctcccttgacctccgtcgtgtccgccagatcgaggagctgaagaatgagaacgccctgcttcgagcccagctgcagcagcacaacctggagatggtgggcgagggcacccggcagtgacgcccgccaccaccacgcagccgccgccgcccacgccggcctctgctgcccccttccccagcccttagcacagagagggacacatgcccctcccccagctgcgtttttttatagtagatttttaacaaaaaacggggagaaataatgcatttctgtggatacagtgcccaccgccctcctccacttggaaacggtatcctccctgcccatccgtctgtctgtcgcccttctcccggccctcactaagccccggcacttctagtggtctcacctggaggcaagagggaggggacagaggccctgccacgtcccgctgcctcctgctctctggaggtactgagacagggtgctgatgggaaggaggggagcctttggggggccacccggggcctggacctatgcagggaggccacgtcccaccccacctcttgtttctgggtccctgctcccctttgggggtgtgtgtgtgtgttttaattttctttatggaaaaattgacaaaaaaaaaatagagagagaggtatttaactgcaataaactggccccatgtggcccccgccttgtctgcttgtgtgtttgtccatctcaggagtggggagggggcctggggtctgcagagctccacgaggcatggttctgctgttgtgcacatggctgtgcatggtccctgccagctgcaccacccattacccagtggttggttggatggatggaggaattaaggaatgaatgtcccctttgaggccctagacgtgcatgagggtgtggggagctggggtcaaggacatgtcccatgttggaggagaggcaggggtctccgtgtcaacagttcctgaaaacacaaccagcccctggccctgccctgctgggccaaagccctcccctctgcaccagccaatagtggggcctggccttgagcccctcacccccagggagggcagatggccagggcgccaagcttggcccgtcagcctgtcgccttgcaccaaggctctggcgcctgtgctgtgacccctgcccctgctgatgatgaaacctgtcctcagctgagatgcagcgatgcctggtagggctgggggctgctcctgtgtctccccaggtgagcacacccctattcactgggccctgcttcagcctgcagcacccttcaactcccaggagctgggcttgccactctgctcaccttgtggagctccatctgcctttcctccccaattcccccactccctgcactcgtctcttcccacaagagccctgtctccttttcctagctattcccatctgaggccatctttattcatttagtttttagagacagggtttcactctcacccaggctggggtgcagtggcacacaatcacggctcactgcagccttgaccaactacaggtgcgtagcaccacagccaagtttttgtatagatggggtctcgctttgttacccaggctgtgacaagaggagcctcccacgtggtgtggatgaggaggcagatggcagggcctgtgcatttctgtgcttgagtgggccttgaaagtggttcagcaaccaggaagaagtgttcattcctcgacaacaacatccccgggctctggtgacttggctgacactggatggccctggaatgaaaaaggcaaagaggcaaaatgtgcaagggcccatctggaaccaaggtttgttgatcccctgggccgtgtgcaccctgagctgggcc

SEQ ID NO: 11497 - DNA, 1220 bp, Homo sapiens
gacgctgtctgtcctatggagttgttcacccagcagctgtaactcccagcatcttctggggagatggagtcaaaattcagctggctttctttccccagaagcctgccatttttctcccagaagaactggacttctttggggtggctgcttgagaagtcacattggaggctgaccgagtttccagagtgaatctcggaaaggggcttgattttccggaccctcacgtctcggggggcatctggagggcaagggtcccaagctgacctctccgctccctgtcccttttgctgtccccaggcctcccctccccttggccctgacgccaggctcctgtccctcaattctgttgaagacactggcccaggctccggcctcgttgccttcatcccctcatcccagccgggccacctcccagatccccctgcctagcccagggactcacactggacattcagggcgacaggggaggcccacgagcaccaactattacaagctgcgcaggcgatggttgtgttgtcccagccaacgttttggatcttcagcaccccaagcgatggctcctcccaggcgccatggggtttccattcataccgggtaacactggggttactggaattgtagttacaggaaagggtcactgtgtctccttctcgaatcggcatggggttttgaatcactgtggtcaccttcttgggaggatctggaagaaaaccagagaggtgagtaaagaaaagccagctgtccacagtaccccttccctcctgcttcctcttctcccgctacctgtcccgggcatctgcacaggtcctaaattaatcaaaggggggcttgtgcgtccttcctgcatctgtgtgagaacagaaaccctgccctggctctctggcctggctgtggtttggtgcaggggttcagggcacagcgctgaagccagacggctgctgagaggcgcacgggcatgggctgcaggtctcagtttacacgtctgtcaaatggggtcctgaggccgggcatggtggctcacgcttgtaatttcagcactttgggaggctgaggtgggcagatcacctgaggtcaggagttcgagacctggccaacacagcaaaaccctgtctctactaaaaattttaaaaattagctatgcatgctggtgcatgtctgtagtcccagctactcaggtggtcgaggcaagagaatcgcttgaacccgggaggtggaggttg

SEQ ID NO: 11498 - DNA, 1189 bp, Homo sapiens
gagccaagattgcaccattgcactccagcctgggcgacaacaagaccctgtctcaaaaaaaaaaaaaaaaaaaaaaaaacaacttaatcttcatttctacctccatcccccagacaaccacgagtctactttctgactctataactttgcctattctggacatatcatataaataaatgaaatctgacaatatatgtacatggtcttttacgtctggcttgtttcactcaacataaggctgtagtgtgtatgggtagctcattccttttctttgccaaatagaattccagtatatggatgtgccacttttttattcactcaccagctgatgggctgccaggtaacatttccactgttggtgactatgaccaacactgctgtgaacatttaggactgagtctttaagtagacctgagtttccacttctcttaagtaaatacctacggtggaattgttggatcgcatggtgaatttatgtttaactttttaagcaactgccacctgctttccaaagcagggacaccacctcccattattctcaccagcagtgaatgaggcccctatctctctacattctcgccgaccataggcattgtctgactttttgcttgtggccattctagtggatgtgaaatcatatctcattgtgccctgtgattgtttgaatgaactaatagatcacctgtgaaactggacagcacttgggtttgaaccctagtggtgacatttcacaagctgtatcacctggagcaagtcacttccctacggtgaaggacaaggattttatgacataaaagcgttgccctagaagcagtgtctgctatggattatgtgcccatgaaaaggcagctgctgtcatcatcgccaccaccattattattgttattattattacattgtcaccccagagataatcctgcaccagtgacagggaaaatagcagctggcatccgctgcctgctcacgaccacacgccaggcttccgtcaaaccactcaacatgtattagtaatcttttaatcgacctacatattgttttaatttgcatgtgttaatgcgttgatctatgagatgggtattatgatgagctctgttctgcaggggagaaagcagaaacatggagaatttaagtcatttcccccaaatcacaaagtcaggaagaaacagacctcacggagctcgctctctgt

SEQ ID NO: 11499 - DNA, 1102 bp, Homo sapiens
cgagtcaccacacccagcctccatcattgtttatactgagcatcgcctgtggtcagtggtgggattgcactgtgtattgtttggcaccttttttgcacttgactatgtatcttgaagatccatccattcatgccagaacataaatcagcctcgttttttttcacagctgcctgctattccatctcccctgtttggacaaacagcatagtgttgacttgaggttttcaaagcagggcccacccttggagctctgtacagtgacacatctccccatcgacagctctgcagtgggcctggggttttcctgcccattactctcctcccagcatgtcagcttgttcagaacagtgatttctgtcttttggggtcactgctgattccccggcctctagaatagaggttggcacacagcaggtacctgtggatattggttgaacaaacaggtgggcaaagtgaggaagataagaagtccatccgttcagtttccccactgcggagggaataacactgtctttccacaggtcacagactgggatgagcaacgggctgaaggcacgtttcccgggaagatctgaactggctgcatctccctttcctctgtcctccatccttctcccaggatggtgaagggggacctggtacccagtgatccccaccccaggatcctaaatcatgacttacctgctaataaaaactcattggaaaagtgagactatgcgtgtgaacgggccaggcagtggcaagaagctgggctggaatcagtgccctgaccagggaggggcttgaatgagtattttctctgttttgtttttatttatttaatttaatttaattttttttttttttatgatggagtctcgttcttcacgcaggctggagtgcaatggcacgatctctgctcactgcaacctccacctccagtgttcaagcgattctcctgcctcagcctcccgactagctgggactacaggcacaccccaccacacctggctaatttttgtatttttagtagagatggggttttaccatgtcggccaggctggtctcaaactcctgacctcagatgatccacctgcctcggcctcccaaagtgctgggatta

SEQ ID NO: 11500 - DNA, 1232 bp, Homo sapiens
ctcctgtggtcccagctacgtgctccaggaagaggggccggcctcccctgactcccagccagcgggcggagcgggaagctgctcgggcagggccagagggcacctctcctcccactccaacccccagcaccgccacgggaggccctccggaagacagtcccaccgtggcccccaaaagcaccaccttcctgaagaatatccggcagtttattatgcctgtggtgagtgcccgctcctcccgtgtcatcaagacaccccggcgatttatggatgaagacccccccaaacccccaaaggtggaggtctcacctgtcctgcgacctcccattaccacctccccacctgttccccaggagccagcaccagtcccctctccaccacgtgccccaactcctccatctaccccagttccactccctgagaagagacggtccatcctaagggaacccacatttcgctggacctcactgacccgggagctgccccctcctcccccagcccctccacctcccccggccccctccccaccccctgctcctgccacctcctcccggaggcccctactccttcgggcccctcagtttaccccaagcgaagcccacctgaagatctacgaatcggtgcttactcctcctcctcttggggctcctgaagcccctgagccagagcctcctcctgccgatgactctccagctgagcctgagcctcgggcagtgggccgcaccaaccacctcagcctgcctcgattcgcccctgtggtcaccactcctgttaaggccgaggtgtcccctcacggggctccagctctgagcaacgggccacagacacaggctcagctactgcagcccctgcaggccttgcaaacccagctcctgccccaggcactaccgccaccacagccacagctgcagccaccgccgtcaccacagcagatgcctcccctggaaaaagcccggattgcgggcgtgggttccttgccgctgtctggggtagaggagaagatgttcagcctcctcaagagagccaaagtgcagctattcaagatcgatcagcagcagcagcagaaggtggcagcttccatgccggtgagtgtggtccctgggcccagcggcacacccagccatccagcctccattctttgcaaccccctaaccttccgcctccttggacactttccagcattgcggggaaccctcagaacctgcctttctgtgatcccccaccttcctttg

SEQ ID NO: 11501 - DNA, 1142 bp, Homo sapiens
aagagagagcggccctcagtatgcatcgggaggagggccctgaagaagactggcgggaggagtggggctgcgggagcgcaagctgcccacacacactccgatttctcccccagggtcccgagtcccctgtgcaaggtccccgcatcaaacatgtctgccgtcatgctgctgtggccctgggtcaggcccgggccatggtgcctgaagatgtccctcgcctcagtgccctccctctccgggatcggcaggacctcgccacagagggtaggtggggagactggacagccatgtcaggtttggggatgaccccacacttgggtgacatgcaccaagagcctaggagagagggagccaagtcaggtgctcaggggttaggtggcaagtgggctggagtgctaggtcctagagcaacttcatttgggggcaccaggaacctggcgctgtgagaaagcgagagccaggttgtgggaaagcagggaagtgaggtagaagcctggtggctttgtggctccatcccctcctccctgcctgctgcaatagatacatcatcggcgtccgagactgagagtgtcccgtcacggtcccggcggggaaaggtggaggcagcaggccctgggggagaatcagagcccacaggttctggagggaccctggcccacacaccccggcgctcactgccctcccatcacggcaagaagatgcgcatggctcgatgtggacactgtcggggctgcctacgtgtgcaggactgtgggtcctgtgtcaactgcctagacaagcccaagtttgggggccctaacaccaagaagcagtgctgtgtgtgagtagctggggcgtgacctcattcccgtggttgttggtcccctaggcttcctacctcactcctcttctgcctggccagagcagtggggttggcattcttgtggagagcttcctctcttcccccagaccaccagtcccctaccctggtgacgtgctgctcccctccccagataccggaagtgtgacaaaatagaggctcggaagatggaacgactggctaaaaaaggtgacgagctttaaggagcatttcttctcaaaaccgtgttagagtttgtgctgtggagggagctgtttttctttgctctcctcccttgcagctc

SEQ ID NO: 11502 - DNA, 1208 bp, Homo sapiens
gggggccacctgtgatgaggaagaggatgaggtgcagctcaggtcaaccaggtatggagtgtgagctggggggcgggtggtggtctggaagggtcttagagagtgagcaggggtgagagaggtcattctgagcaccagcctgggtgacactgctgtccctcaccagacgtgccaccagcctggagctgcccatggccatgcgttttcgtcaccttaagaagacgtccaaagaagctgtgggtgtctacaggtgagtggggttgggggggaggatgccccttgggtggacggacaggtgcactgggtagggggtactgtctggtttctgtccccctcccccctgagttccctgttcatcctgccctgcagatcagccatccacgggcgaggcctgttctgtaagcgcaacatcgacgcgggggagatggtcatcgagtactctggcattgtcatccgctcggtgttgactgacaagcgggagaagttctacgatgggaaggtgggctcccagtggctgtgggaagacagtgggtgaagcgagcctgtccgcggggacagagcacctgatctccccacctcatccctgcagggcatcgggtgctatatgttccgcatggatgactttgatgtagtggacgccacgatgcatggcaatgccgcccgcttcatcaaccactcctgtgagcccaactgcttctctcgggtcatccacgtggagggccagaaacacattgttatcttcgccctgcgccgcatcctgcgtggtgaggagctcacctacgactacaagttccccatcgaggatgccagcaacaagctgccctgcaactgtggcgccaagcgctgccgtcggttccttaactgaggccgtggctgcccaccacgacccctcacacctcctgctgccgtcgctgccatcttgcccctagcctgggggctccctagcccctcccagagcatctcacccccaccctcatgttcagggtggatgtgggcatgcaggtgacaagggccctgcctccacccctccagcccatccagcaatcgccccctttctgccctgggggcccaggatgtagatattgtacaaaggtttctaaatcccttcttttctatgcacttttttatttaagaggtggggtcccaggtgggaacccccccacaataaagtctgtcaatgtttggagaggtggtcttcccatttgtag

SEQ ID NO: 11503 - DNA, 1114 bp, Homo sapiens
agaagtgaggaaacctctgaaggacccagtggctatctccaaacggtcaggggtccctgagaggatcagggtgcttccagccactgtggaatccctaatgggggatctattgctataggggggccctcaggaccccattgccttccccaggtgggcttcctcatccccgagggatggttcctgagcggctgcccccatggctccagcgctacgtggacaaagtgtcaaacctcagcctctttggaggcctcccagctaaccatgtcctcgtgaaccagtatctgcctggggagggcatcatggtaaccacacaccctcggcccgtgtccccccactcagacttctgagctgtgctggggcaggggactctgtacccaccctcactcattaggcagccacatctcccaaacaggcattcacctccctgtccctggcttgggaagcccccctttgacccagagggtgggggttgtggactcctgccctgcccagccctggtgcccactccctagccccacgaggacggaccactgtactacccgactgtcagcaccatcagcctgggctcccacaccgtgctggacttctacgagccgcggcggccagaggacgatgaccctacagaacaggtgggcccccagacactgccccagctgcttgtaggcacttcaacctcgcacatcctccaagatgacctggtcccacatgccttcggggtactcctggcactctcccagataccttcccttgtcccctcatggggtgtacccacttcctcccagacacccaacccatctgcttacagggtgtctgtcccacatgccatgattttcacaggctccccgatgccccaacctgctgaatggatacccctgactccccagcagacactgatatccttagataccccaccgccattaactcggggggcctcacctcctcccagatgctctatctgcccctgctcagggtgccccagacgtcctgctactccaggaatgtgatttggggtgcaggacacccccagattctccttgaccccttgacacaatttctctgagtgatgcatttctagcaccccagtgttcacagaaacgcccctgaacacgccgac

SEQ ID NO: 11504 - DNA, 1203 bp, Homo sapiens
acctttattactcccctcattccctacccagtgctaccatcgtctcctctgtacctgtgacatacatgctgtttttggctgcacacaatagaaaaactcaaaacaagaggtaaaagttaggtttctgactcatgaaagtagtctgaaggtaaccagtttagaccgttctgcaggaagcccttagggatccaagggccttccagctctctactctgtcatttgagggagcaggctatgtcctcatgacccagtgtggctatgggggctcctgctatcatatctgagttccaggctgcaggatggagaaaagacagcagaagaatacgtgcttgctttatatttaatagttcagaatttattcacatattcttatctagctgcaggggaggcaaggaaataattattctgattggtgaaactcccagctcaaaattagagttgtattactaacgaagaagagactggctatggagggacacgatttcagaggtgcttctgagctgctcgtgctgacctcagccctgtccttcctgcagaccctgctgaaggtcgtgtacgtggagaatgacatccagcacctgcaggacatgtcacacttcccagaccgggggagcgagaatgggacacccatggacgtgaaagccggggtgcgggtcatgcaggtcagtcctgacggccagcatttggcttcaggcgaccgaagtggaaatctgaggcaagtgggccctggcagtgtccagtgtacacctcccagctccagctcaggttctcagggcagtgggcagaagccctggccttggcacctcctgctgcccattgggaatgaggggctgtgaatagtaatcccatgaacagctcccattgggaacttaagctcgtaagaggcttccagaagggctgagagcagagtaactaccaggacctcagcagctagggtgtgcagattttgcctatagagtgtacaggcaagctcacatgactctagggcagcgtgacactttcaccagccacatggtaccagtgctgaactgtcaccgaagatgccagctggaggagggtcctggtggctctgggagaggggctatgagggtgggatagctgagagttcaggctgcttatgtgccctgttgaggtttggcaggatgttaccaacccagtaggtgctagtgggacataggccctgttgctgggaccaggtttaag

SEQ ID NO: 11505 - DNA, 1100 bp, Homo sapiens
taggccgtggatgtttgctccgcgcccatgacctgccaaggacctctacattcaggctgggctctggatctcacattctagcgcccagacatgtcgggaacgccttacgccaacttggggtccccaccaagagaacccccaccagatctgcaccctccccttcacgcgtgcacccagtccaggctccctcaagccccacgggtgccttttagacctgaggaggttgcaaacctgatcccccatacctgccccacccatccgcggacaacccgccctcgcaaactcagacccccacccggaggcttcagattcctcccaggtccagctgccggaaatgcgtgtttgaagggagggtgtgggctcaggggcgaagcacccactggtccccttttttccccccagcagtgagtcgcagccatgttcctggttaactcgttcttgaagggcggcggcggcggcggcgggggaggcgggggcctgggtgggggcctgggaaatgtgcttggaggcctgatcagcggggccgggggcggcggcggcggcggcggcggcggcggcggtggtggaggcggcggtggcggtggaacggccatgcgcatcctaggcggagtcatcagcgccatcaggtaaggcggagactatcagaggggcggggcctgggaatgggaggagcctcagtgaggcgtggtctgggaggggcgtggtctaaaaatagaataggattaacctggaggctaacctgggtacatgaattaggccggggaggcctggtttgagagttctgctgtaagggggtggaccccagtgaggcggatatcagtcattgggggcggtgcttgatatgggagtagtctgattgtgtgggaccaggacaatgtggtcctgaggggactgatgtggagttttggcgggtggggcttatgggtctgggctcagcctgcattggctaacctggagatgaacgttaaaggtgcggagccaatgcgtctgagtgacattttacggaaggggcttgacttatgagtgtggtcagaggttttaggtgggttaatgaggaggtgagcccaggaggaagcaagacctaatggggtagggtaaat

SEQ ID NO: 11506 - DNA, 1729 bp, Homo sapiens
agcaattcaaaacttaaatactatgatgtttaataagtattatagtgtaaagaaaacccgtacccccaaaactcccacaacaagcattatcaatgctgtacttctaggagtatactcattaaagttaggatctagtcatggacactacttaatgtgttcctggaaggcctacagatgcattaagaaatagatatgagatgtatgaggatttgaaattaagagacaaaattatcatttttgtgatgttttgctacatatatgaattgtaaaactagaatcatcaaaattatttgttgttgaagcagtcataaaactgagactgagacagaatattgaattcagaaatgtgtgcatgaatatatggggaattggtaattgatagaggcggtatcccagattggtggggaaatcatggattacttaaaaattaattgactcttcatatggaaaaataatatctcccatcataatataaaatatttttcttatgaattcttaaagtactaaagactaaaatgcaaaaagcaatacttaataatataacagttttataagaagatgtttttaaaaccttagggcaggaaagaacttctaaaacattccagaatacccggtagttccactcttgagtatggtagtcccctattttctgcaagagatggactctaagacccccagtggatacctaaaacccagataggaccaaactctatgtctatgtttttttcttatatatacatacctatgataaaatttagtttacagattagacacagcaagagatttaaaacaataataaacataatatggaacaattataacaatatactgtaatcataaaagttatgtgaatatgatctttctctcagaataccttattgtactgttctcaactatttatgaactgtggtgactacaggtaactgaaaccatggaaagcaaagctgtggataagggggaactactatatatatgcatctacccaagaaacatgaacacagggagtcatgtactggtctatagctgtatagttcattgcaccatgagttatagtagccagaagttgggaaacaaatgctgtctcttgtgaaatagatgaataaaatgtgatagtaacatagtagagtactctctagcagttaagtgacaaattaagtctatatattaacagaaatatttttaaaaaattagagtgaagaaaaatgatgaacatattgtaatgatgcttctgtgaatttgaataaaatcaacactaaccagccctagtactaagaattggttatggataaattatgtaaaactaaagaatggattgaaaggatatgtatatactcagttcccaaaagtggagtggttacctctaggaagaaaggaggtggaagggaaatgttaccaagcatggtagttaaaggatacttcaattttgtatctatttcttattaaaaagaaacattctaagtaaacataacgaaatattaattctgggtggtggtaatatttgtgttcattctatcattcgtgctatttatttccttaaacttctgaaagttaaaaagtccagataggagtgaggaagctgtacatgaaacataatggacttacattcctagtcagatactaatattctgtagaagatatttctaaaatcttatctttaaaatatgaaataatttttaattggggtggcaacttaaattcaattaaaataactcatgtgtcacaagagtaa

SEQ ID NO: 11507 - DNA, 1179 bp, Homo sapiens
tacagaacggacagccccccaccagcaccccggcttcctcagggtccaaagccttccaccgactctccaggagaaggtccaaagacgtggagttccaggacgggtggccccggtcccccggcagggccttcctcccccttcggcaccgcagcagcagcgagatcaccctcagcgagtgtgacgcggaggacgcgggggagccgcggggggcccggcacacgggggcgctgcccctcttccgcgagtacgggagcacctcgtccatcgacgtgcagggcatgcccgagcagagcttcttcgacatcctgaacgagttccgcagcgagcagcccgacgcccgagggtgccaggccctcaccgagctcctccgggcagatcctggcccacacctcatggggggcggcggcggagccaagggggactcccacaacgggcagcccgccaaggacagcctcctgccactgcagcccacgaaggagaaggagaaggcccggaagaaacctgcgcggggcctcggcggcggggacacggtggactcgtccatctttcggaagctaaggagcagcaaacccgagggggaggctgggcgttccccgggggaggccgacgagggccggagccccccggaagccagcaggccgtgggtgtgtcagaagagcttcgcccacttcgacgtgcagagcatgctgttcgacctcaacgaggcggccgccaacagggtgtcggtgtcgcagcggcggaacaccaccacgggtgcttcggccgcttccgccgcctcggccatggcctccctcacggcctcgcgggcccacagcctcggaggcctggacccggccttcaccagcacagaggacctaaactgcaaggagaacttggagcaggacctcggcgatgacaacagcaacgacctgctgctcagctgcccgcacttccgcaatgagatcgggggcgagtgtgagcgcaacgtgagcttctcccgggcttccgtgggctccccgagcagcggcgagggccacctggcagagcccgccctgagcgcctaccgcaccaacgccagcatctcggtgttggaagttcccaaggagcagcagcggacgcagagtcggccccggcagtacagcatcgagcatgtggacctgggcgcccgctactaccaggattacttcgtgggcaaaggtg

SEQ ID NO: 11508 - DNA, 1999 bp, Homo sapiens
tttaaattattttcttgggggcctgaggatagagagaggcaaggctagcctccagagccgatttatttgagagagaaactctatttggatctccaggacggtttatacgatctttttctatcagctcctcttccgccagaggccactgcacctgggctaggggtccacaggcccctccaccttccagctaaccaggccaggccggggcggtggagccaccacacagccgactctctcctcctcctcccggcacgacctggccctgaccagcagcctcggcctcttctgggttccaggaggggctcccgaagccctcaggacagggctggaggagaacagccttcatctcctcctctggtttttttttcctttgcaagtctcccagcccatctctccgagcagcggccaccagaccccctcaccatgctccccggggagcactgcaccccgcgaaccccactggacgctggttctctaaaggcaataaggggcggccatgccggtgtggtaccacgctgttcctccaggaaaccgtttctttttttccttctttaaaagcaaacagaaaaagatatatatatatatatatatatatttattttttcatgtagagttggcgccagaacaagcctgtatggccacagtctgtggattcatccccccaacctcaagctgaggaccaaggcgtgtcccctgtgggctgggggtcagtgggaggaccagagggatgaagtcagggcaggccggtgccctttttgggaggcaccaggcggggaggagttggcggagcaggtctggctgtgagccagcaccaggcaacccggcccttgtccagggacctctgctgccttctctctggggtcaggaacctcagaggagggggctctggggactgcataggacgcaggcactcggaggtgccggtgtggatgggtgggggtgagagaagagggttcttatcgcgtctcctgtgatcagcctctggccccctggaggaggaaacctcagcgctgcccctgcccccaccctcacccccaacaccaagagtgaggtgggcgtgccccaggcagcgtcctcagccctggccagctactgtgatgccatcttctcccccatccccttctctggggggcccacccgtcccccacccccaccccttagaccctcatcgggtccctttttttttttttttttcagttgtctcctcccatcttcagatcattcgaatcattttggggacttaatcatgtacatggacaagtgtaaattatgatttttggttttgttttctgttattttttaaggatttctgcaaaaacagatctatttaatttgaggttgatgttctatccaatggccgaagatagcagcaggttttttttttcatatgttgatttgtttcatttggattttttttttattattctttattgtcttttttttttccccatccctgtcttgagattttctggcatgtttctggaggtttcaaaggaaataaaggtttcatagaaatggcttgtgtgttcacttttggggcagctgcctggagttgctgaccagagggtgtggtccagcatcggcccctcctcctgctcctgtccccaaatcccccacaccatgaccaccacacacatgtcctaagaaccaggggcacctgccttgctaacttcttttccttggaatccaaaggacagaaatccaacactcagaatgtgaaatgtccttaagttcaaaagagtgagattctgcctcagaggtcatatactggaggcctgaaggccagccccagcccagagggttgtgttgggtcttagaaatagtggccaacttttaatctggacattcagccaggtgcagtggctcatgcctgtaatcccagcactttttgagaggctgaggcaggaggattgcttgagcctaggaattcaaaaccagcctggacaacatagcaagatcctacctctaaaaaaacctttttttttttttttttaacttt

SEQ ID NO: 11509 - DNA, 1181 bp, Homo sapiens
ggggtagggcagtgactgagatgccctgggcctgccctcaatggagctcccaggccagtgggagagacagacctatctccagacaaggacagcccagtggggtcagggctgggcaggaggaaggccaggagagtggttgggctggggaggagggacatttggaggcgctgtaggagtctgggggggtgggggtgcagtagcattccaacttagcccgcaggtagcctcaggaagagagcggttggggtggatgtagagggaggcactgtcctctgtcctcttagccatggcatccccccggcccatcttcctctcccagggacagacgccccagctgtggtcaactgtcttcacatcctggcccgctccctggatgccaggtagggccataggcagtggcgcccactcccaccatcatcgggcccccaccccaacccctggtctcctagactctccgattccagagctgatgttcccccgctgcccttctaggacagtgatgaagtcaggccctgagatcgtgaaggctggcctccgctccttcttcgagagtgcctcggaggacatcgagaagatggtggagaacctgcggctgggcaaggtgtcgcaggcgcgcacccaggtgaaaggcgtgggccagaacctcacctacaccactgtggcactgctgccggtcctcaccaccctcttccagcacatcgcccagcaccagttcggagatgacgtcatccgtaagggcgcctgacccaagggcaggttgcggggagtcagtgtggccaacaccacccatccgggtgcctgtgagagtccctgggtgtttgaatgtgtggatttcttgctgtaagcaaagcatgcagtcagtaccttggcaggtggcaaatgagttaatgaggacgcgagctcagcagctctaacaaaagaccctaagtggactggcgcagtgactcacacctgtaattccagcactttgggaggctgaggcaggaggaccgcttgagctcaggagttcaagaccagcttgggcaacatagcgagaccctgtctctactaaaaaaaaaaagaaaaatttaaagattagccaggcatggaggcacatgcctgtaatcccagctactggggaggctgacaagggaggatcacttgagtccaagagttggaggctgcaatgagctatgatcata

SEQ ID NO: 11510 - DNA, 1151 bp, Homo sapiens
aggtactttgattgcaggtaaatgatgggatgaattctccagggaagaggctgatctgtgagcgctttctctctttttctcttctctctcagaactacctgtcccggaacttttacaccctgcggttccttgccctcttcttggcatttgccatcaacttcatcttgctgttttataaggtgctggtcctgaagggctgggagggtcaggcccttttccatgctgtgggatgggaggctcagcccctatcagaatttcagggttcctccactgaagggataaggtattgggctttgggtcgttaggagggttcaggctggacacctggatcctgggacccccctccatgggggtgagtaggggatatctggatccatctgggacagaagcctgagtgtctgtgggagttagagcaggagcaggagctgagttctctgctcagctcggccacatgccagtcctgtgcgcctgggtgcaggccctcagctcttggcaacacccactgattctgttaagcatctttggtttcacataagctaaacagaagtttgcagggaggaagaaatgggccactcacagaatggaaggaatgggttaagaaccaggcctcctgaaggacaaagggacccttggggtcttgccaggggtctagataacaggacagtaaggtagactagagagatcgaagcatggcttctgtgggacccagaagtcccacagtgggactgcccactggcgcatgacgataggcaaggtgcttaccatccctgtgcctcaactccctcatctgtaaaatggaatacctcttagagctgtggggattgaaagaggataaggcaccaggcacagtggctcacgcctgtaatcccagcactttgggaggccgaggtaggtggattacctgaagtccggaattcaagaccagcctggccacatggtgaaaccccgtctctactaaaaatacaaaaaaaaattagccaggcctggtggcgggcacctgtaatccaagctatgcaggaggctgaggcagtagaatcccttgaacccaggaggcaaaggttgcagtgagccgagattgcaccactacactccagcctaggtgacaagagtgaaactccgtccaccccaccaaaaaaaagaggatgagtgtg

SEQ ID NO: 11511 - DNA, 1189 bp, Homo sapiens
aatctgatctttcttttccccacacattactgataagaacgttgttgataggtaagattaccagtgtaggctgggagtggtggctcacccctgtaatcccaacgctttgagaggccagcgtgggcagatcacttgagcccaggagtttgagatcagcctgggcaatatagtgagacctcgtctatgtaacaacagcagcaacaaaatcttagcactttggggggctgaggcaggaagatcacttgagcccagaaattcaagaccagcctgggcaacgtagtgagaccccatctctataaataaataaaaataaaagcaaataatttaaaagaataaacattgtgaacatcaattcccatcacagcaagccctggatgaaaacatggacctcttggaaggtataactggctttgaagactctgtccgaaagtgtaagtccctctctgaggctgggctccccaaggggaaggggtagggagtggcagccaggtccggggggacagctgctcaccggttttgtctctgacctccacagttatctgccatgttgtgggtatcacttaccagcacattgaccgctggctgctggccgagatgctcggggatctgtcgggtaacgccctctgggtcctggtgcacatctgggaggttgggggtggctagggcagtggacctcagtcagctcctccaacaggcctgtctgggtctcatcaggtcagcatggaaggcccagcccaaggaggaaataagaacttggtataagacagtctctgccttgagggagatcctatgccatttgctcatttattttgcattaattgagtgcctaccgtgtgtcagtgtgctaaactgggcgtgcagcagtaaacaaagtgggatggctccaattcattctcatggaggtagcaaagcacatggcgacatggaggtgtccagtggtgattcctgtcatgaaggaaagcaagacagctcacagaccagcggcatctgagcccttacctccgtagagagaggcccgtggcctgaggtagtgcagaggaggatagtagagcagggccctgacttgtaacgttcatgggtagccagggtgtatgtggccagagcagagtaagcatgggcgaaagtagagagctgggggttggaggggcatttccaggtcatgtggggcctcgggaggaccttgtccttt

SEQ ID NO: 11512 - DNA, 1205 bp, Homo sapiens
catggagaaaccccatctctactaaaaatacaaaattagccaggcgtggtggcgcatgcctataatcccagctactcgggaggctgaggcaggagaattgcttgaacctgggaggtggaggttgcagtgagccgagattgcgccattgcactccagcctgagcaacaagagcaaaaactccgtctcaaaaaaaaaaaagtgtattgtttctggtaatggtcatgttataattttgcaaccgtttcatataggttgtgggaaaaggtagataaatacgctgctcttgttaggaaccaaaatttgcccagggagagaaaacagaggaatagaaattaaggcagaagccccacgatgaggctgaaagagctcacaggctccctctggcggccattcagagaatgacccgtggaagggcaggggcggaagcaaggagaccaggccagctgctgctgtccaggagatgtcagtgggcaaggggggctgccctggcttcctgagccatgactctgttgcctctcagtcccctggaactgtgggatcaggctgactgaagccccttgctgcccctgtcacctgcagacagccagctaaaggtgtggatgagcaaatacggctggagtgccgacgagtcggggcagatcttcatctgtagccaagaagagagcattaaacccaagaacattgtggagaagattgactttgacagtgagtggtgacccacggcctcgggctttggggctaagggggtgcccctcaagggaggccgaggcaggggcccagaggacctgggtagatctgctcgtgttctgggctgggaagtctgcacctgccagattccattcaccttgtgtcttggggctcccgcccaggaggaatagcggggagctgggtgatcttccctggaacttctaggccctgtgtcctgccccatagcactcagcaagacttcctggggcccagcggggcctcacagggggtctctgcacccttatttgtccctgaggcctgtctcgttggccatcttttattcttggggtgcccaagcctcatgtgcagacttggaatccggtgaacagtaggaatcttgattctctagtttgggtgattccacatttttgtgcctcagttttctcatctaaaaaatggggacgactgcaacagtaactatgataaacactgtgtaggtccttacacttacatcattt

SEQ ID NO: 11513 - DNA, 1195 bp, Homo sapiens
acccacccaaatggctttttgtttgtttgtttgtttgtttgagacggaatctcgctctttagccagggtggaaggcagtggcgtgatctcagctcactgcaacctctgcctcctgggttcaagcgattctcctgcctcagactcccaagtagctgtgattacaggcacatgccaccaagcccagctaatttttgtatttttagtagagatagggtttcaccatgttgaccgggatggtctcgaactcctgacctcgtgatccacccaccttggcctcccaaagtgctaggattacaggtgtgagccaccgtgcttggccaacccacccaaattgtgtaccctacaccatcctagtgcttgggagccaacacccactcacaggaggctaagggcaagtttaggtaactcttaacaccacgaattagttgcctgctggcaaacttcaaactccaagcctgaaatttctggttggagtcacctcccagatggactcagggattcattcaccccctcatccagtgctcacggagcctctgtgaggtgcaggcctggagaggagccctgtggcctcagcaaagggcaggcaggctggtgagcacccaacctctggatcgaggggactcaattatgcggataaaggcccctaatcctctcagtgctccaaactcactctgcttctgaaagggatcttcgtaccctgggttcagagagtaggaagcccgcagggaccgagtatgcatgaaacaagcccaagtctgtgggggctgtacatggtcaagatcacagatttccagaccaagccagctccaccctagctgggatgcccaccctgagacacccctctctgctttcactggaataggatggccctgacttggccgggtggactgttgaatcagagcctctcaaaacaggaaaaaggaaaaggatcaccaagcaggagtttcagttgtcaaagacaaaacccttaccacgattaaagattactccagggcctcgcatattcacccttccaccagcagggcccagtttacggatcatttgaatactagcaaaaaaacaagccatctgctggagagattgaacagagggagaaacaggagtgtttgccctgcttccagacacccctttcctgtggcagttcctgcacctggcaagatctactggggaattcccggggtcccactagctcagg

SEQ ID NO: 11514 - DNA, 1206 bp, Homo sapiens
gcgggaagggtacataggaggcagccgcattgagctctggagatgacagtggcttggtggagagtgtcggcagtaggattggaaggaagtggacagattcacaataaacaataatgtagtgcacatttgctgactgcgagatgaaaaagaccacctttgccctgagagtgggggcccggggtgcccccctgtagtcaggaggtacgcagattacggcagaaatgtacagagcactgagagttgagagaggtgtgaacagaggccacacgcctgggaccagcctcttggaggagcggttttttgagttgggtcaggagaaggagctggctgcggggccagggacccttgtggccagaagcctgcaggcgctcagcagcaggaggctctgggacagtgctgcctagagactgttccctgcattttctcctgagggaggtggaggaggacaggcctgggagatgcaaccagggggtggtttggagcctttctctagatggggctggaaggccaccttcaggttgggcggaggagcctcactctggttttaacgaccttctgccctctgcccccttccctgtgtgcagagattgtggacggcaacgcaaagatgaccctgggaatgatctggaccatcatccttaggttcgccatccaggacatctccgtggaaggtgacagccacctgtactgcccccgcttcccacctgagtcagggcgggttagaggagagctgaagtgtgatcttcatgcttcaagcctcttcctgtttccttggggtcactcacagggcctggcccttgcaggggtagtcagtgggtggcaggtgaagggaggctcctcccagctgcctgcctcttggctccagtgccttccgagtgcctttgctctcacagcctcatctcagtggaccctcacgccaccctcatgagatgggctaggatggctgggcccgttttacagtccaggaacccaagtcccagaacagactagtgagagagttgggcctgggcctggttctctgtctgcttgacatccccatccttgaaacttggcccccatggacccgttatgagctcaggccgtccaggaatggacaatttcgcttccctgcaagcacctgtgtgcacacaggatgggcagagccacctgggctagcgtgcaggggctcccaggtgccaggtcgcagtgatgactgggagagatgtg

SEQ ID NO: 11515 - DNA, 1099 bp, Homo sapiens
ctgagacccccttctctataaaaacttaaaataaaaatcagccaggctcggaggtaggcacctgtagtcccaactacttgggagactgaggtggaaggatggcttcagcccgggaggttgctatgatcatgccacttcactccagcctgggtgacaaagcgtgaacctgtctttaaaaagaaaagcacaggcaggaacaggaagtaacaagagaacagtacagtgatgcagggacagggagggagcccacgctcccagagttccaggttgggggttctagcaggaatcgtggagaagttgggctggggagcaggggtaaccccctaaggtggggccctcaaagatccagatcccatgtgcccataagctggggggcagcccgtcagcactctgagggtcccccacaaaggccacgctggcttctgtggcccacagctcctggagtggatccggcgcaccatcccctggctggaggaccgtgtgccccaaaagactatccaggagatgcagcagaagctggaggacttccgcgactaccggcgtgtgcacaagccgcccaaggtgcaggagaagtgccagctggagatcaacttcaacacgctgcagaccaagctgcgcctcagcaaccggcccgccttcatgccctccgagggcaagatggtctcggtgagcaccaggattcacatgggagcagctgtgaggggcagaggcagccctagaactgcctgtgggcagtttggccagcgtaatctttcctaagttgttgatgtcctgtgggacatggcatggcctttcggatgcagtggtcggggaggggtgcacttcactcggcattgtgctcccctttggccctcactcactgtattttacacccagggttttatacgcatcccaaatccttgccacgggttgtgtgggtgtggagtggtgtgaatttggagccgtggtctgccatgatggcatgaccgccatgtgcttgaggcccttcatcagcggaggggcagtgcgccctggacggtaccacctccccatctatggtattcatccattcattcatgcactcacccgttcacgcattcattttgttaatccagaattg

SEQ ID NO: 11516 - DNA, 1200 bp, Homo sapiens
gagctggggtgcagccaccttcccaggctggcattttccctgcggttccctaaagaccttcacttgcttgcagggcttccttgagctttggttctgggatgtgtaattagccaggatcagggactaataacagcgttcctcctttcctttaaagggcctgatggtgggcccgccccaatgcacacaggacaccttaggacagcgtggggcacttagacgtggagaggaccaccacctgtgcgggtgcagggtcagggtcctagaagaagctggctctgatgcttccccttccccaagcctgctgggacatgggctttgaccccgggtgcttctccggatcaaagccctccagaaacaggtgctacctttctaagccgtgctaccacggcccgatttgtatggtttcctactaacaaaagttgctaagtttaggacacacaggttgagatggaatctctctctcaggctgagcaaccctgaagtgtccatccaggtccatccaggttacagttgggcttagagatccctggagggtacggaagaagattctggaagtttccatgccactgtcattggcatggaaggatgtggggtccacagtctctctttccctccctctgcttggacagcccctccagactcctgccccacagctgccgtgctgtggtctaagcgtctctctgctcctaccagggaaggaagccatgctgaagcaccgggactacgagacggccacactatcggacatcaaagccctcattcgcaagcacgaggccttcgagagcgacctggctgcgcaccaggaccgcgtggagcagatcgccgccattgcccaggagctcaagtacgtgcgggctcaggacactatcatcacctggctctcaccacagcctgcccagactggtggcggcagcacgccgaggcccagcctgcctcaaggcctggaatagggtccccagtgccccaactgcacctccttccagaagccagggaagggccttatgggatgaggccttttgcccatcctgtctcagccccaggtgggacacctgaaggatttggattctctagcaggagggaggtgtctggccccttgtcttgattcttcaggctttaggggtccctgggggtgtcacctctcctggccaccccaagtaggccctggtcccctgatgggatgggccccagcctccgttgctc

SEQ ID NO: 11517 - DNA, 1997 bp, Homo sapiens
ctctccttgcagggtgaggccgagttcaaccgcatcatgagcctggtcgaccccaaccatagcggccttgtgaccttccaagccttcatcgacttcatgtcgcgggagaccaccgacacggacacggctgaccaggtcatcgcttccttcaaggtcttagcaggggacaaggtgagcgagacccctacgaggtgcatgggggctggcgagaggggtccctgcagtgggaggggctgagggggccagtgtgtgggtggggatggctcagagtcccatcctgcctgccccagaacttcatcacagctgaggagctgcggagagagctgccccccgaccaggccgagtactgcatcgcccgcatggcgccataccagggccctgacgccgtgcccggtgccctcgactacaagtccttctccacggccttgtatggcgagagcgacctgtgaggccccagagacctgacccaacacccccgacggcctccaggaggggcctgggcagccccacagtcccattcctccactctgtatctatgcaaagcactctctgcagtcctccggggtgggtgggtgggcagggaggggctggggcaggctctctcctctctctctttgtgggttggccaggaggttcccccgaccaggttggggagacttggggccagcgcttctggtctggtaaatatgtatgatgtgttgtgcttttttaaccaaggaggggccagtggattcccacagcacaaccggtcccttccatgccctgggatgcctcaccacacccaggtctcttcctttgctctgaggtcccttcaaggcctccccaatccaggccaaagccccatgtgccttgtccaggaactgcctgggccatgcgaggggccagcagagggcgccaccaccacctgacggctggggacccacccagcccctctcccctctctgctccagactcacttgccattgccaggagatggccccaacaagcaccccgcttttgcagcagaggagctgagttggcagaccgggcccccctgaaccgcaccccatcccaccagccccggccttgctttgtctggcctcacgtgtctcagattttctaagaaccaaaaaaaaaaaaggaaaaaaaacacaaaacaacaaaaaccaaaaaaaaaaaaaatcacaaaaacaaaaaaactataaaaaagaaagaattaaaaactttcagagaattactatttactttattaacttacggatttattatataaatatatattcacctagcaacatatctctgccgtctctcctgctctcataatgaagacatagccgattctctgcccgggccccttgctgatgctcctccgggtctgcgtcgggcgtgggtctctggggaccctccagaggtggaggtgggctgatggcctggctgcctggtggttgatggttttgctccccctaccttttttttttgagtttattctgattgattttttttcttggtttctggataaaccaccctctggggacaggataataaaacatgtaatatttttaagaaggattcctgcagcatcatctttttttatttctcctgtgtctgtcctccaccttctaggagagccagggcagagctagcactgtcttaagctgtcaacgtggactagctcgtgtcatctgctcgagaagggctgtcgctgttcttgtttctgagtgaggagtacgcaggccagagtggtcacccggccgtgagcagtgagggccagagactagccccagacaggtggatgccagagagagtggcacccatgccaggcaaggcctagggaggtggtcttgctcagcaaccctgccctgagcagcaggtgcgcccatccggagatcctaggagaaggtggccacctccatccactaaggaagagaaggaagacagtggcttgaggcagggagctcgcaggacagagcctgagccaccctgtccctcccacctggctcacctgtctgtgggtcagg

SEQ ID NO: 11518 - DNA, 2275 bp, Homo sapiens
tggtcccgattaactgtgaggacatgggaggccagagcaggggttattatcactaacttgggaggggcaggagaggggaccctggcagctggacagaggtgctgactgcagctactctccccaaggtgaaattcatgaaaagcaagccgggggccgccatggtggagatggctgatggctacgctgtagaccgggccattacccacctcaacaacaacttcatgtttgggcagaagctgaatgtctggtaggtgctcaggctcgggagggcagcagaggtacaggggagagaaaaggaggggaatggggcccagcagaggagcacagtgaggccgaggtgttgactcacacagaaatgggatgtggcaggtgtgttcccagacgtgtctctgacaccacaggagaaagtgagtcagccttgcctcaggtgtagagcaatgccccaaggcacacagggcaagctaagcctctggaggccacaggggaaagcttcagggacaactttgggtatgacaaaggctcccctttcttccttgctgcagtgtctccaagcagccagccatcatgcctggtcagtcatacgggttggaagacgggtcttgcagttacaaagacttcagtgaatcccggaacaatcggttctccaccccagagcaggcagccaagaaccgcatccagcaccccagcaacgtgctgcacttcttcaacgccccgctggaggtgaccgaggagaacttctttgaggtgtgtgccgtggagctgcgcaggcagtcgggtccttgccacggccgtctgagtaggccattcatttcagtcttttctgcaaatagctgttgaactcctgtcctgcctggccctgggttgagtgctagggacacagcagaggccaggacagataggaatctgtgctctcaaactggacagggtgagaatggcaccaagtttctagcaacaccatttgccgcgttccttccttttacatttttggcaagcagggcaactgctcgtttgctgggaaagctgcttcacaggcccagtgatgagggcccaatttcacaagaaccgcattggcgtaggcttcgggtgccatcaccctgataccatcagaaggtggggccctgtaaagctcagtcagggggaactgaggcagcggaagggaggaggaactcaagtggatctggctgtggtctgaaatgttgaccttgcattcagcaaacagtgttcagcaaacagccgggtgcagatatccacatagctgttgaagttgggaacgaaaaagcagcttcccagtctcaggcaacttaataattaaagagcattgttgctggcctttttatgacacagggatgccttagggtatgtgataaaatctacaagccttttctcctgaaaacttcaagtactgagtcatgcagggcctggtctgcttgaatcctgtgtggcggcccttttgtttcagagttcatttactacctgttttcttttgcagatctgcgatgagctgggagtgaagcggccatcttctgtgaaagtattctcaggcaaaagtgagtcgagtgtgcccacctccttgccctaattgcatggtggttggtgggcagctgcctagttcctattgggtgagtctaaaacctttacttttccccttggtttgcaatcaggtgagcgcagctcctctggactgctggagtgggaatccaagagcgatgccctggagactctgggcttcctgaaccattaccagatgaaaaacccaagtgagtatctgtgtgtcctgcaggcatcaacctggtgacctaatgggttggctggcttcaggccagggatgtccttcctgcccttgagataggaccccgggatcttcgcactgttggtgacacaggcaggtgggacctgctcatcaggagagcagcctgtgctcctcttgggagagccagcctgactgcctgctgccactcactctgccagcttgggagttgctcaggcttgtcctccagggaggtggcattctcttctttgcatcagagactggcttaggtaggaaagccactctgttacctaggaaagaggcaacactatccagcaggtaaaacttgcccacccagttgctgggagaggcccattgccttgggctggcgaaggagataggaatgggattctctatgggaatgaaggaagagaaggagaaacgccgtgcataattggtaattggctcatcttgaagcctcacgttgggcagtcactccttagacccctgccgttgacctgcagaaaa

SEQ ID NO: 11519 - DNA, 1621 bp, Homo sapiens
ggctggagtgcagtgacaatctcagctcactgcaagctttgtctcgtgggttcacgccattctcctgcctcagcctcccgagtagctgggaccacaggcgctggccaccccacccggctaattttttgtatttttagtagagatggggtttcgctgtgttagccaggatggtctcaatctcctgacctcgtgatctgcccgcctcggcctcccaaagtgctaggattacaggcgtgagccactgcgcccggcctaatttttatattgttctgtagaggtgaggttttgccatgttggccaggctggtctcaaactcctaggcccaagcagtctgcccacctagccctcccaagttttagggttacaggcatgagctactactgctcctggccagtgttctttcattcagcaagtagttactgaatatttggtgcatgctatatactgcaaatacagtagtgagctgtatctggatgcttctcttagaaagttgccctcctagagtgatttgcactgtcatagtgtaagctcaagaagccgtctgtgggtggcatctgacagtctggtgaggagaggtcaggaaggcttcccagagggacatgatggctcagctagacctctttggcttttggtactacttgtggcacagggtgttcaggtcggggaaccatgatagggttgcagaggagttcagaggccatggaggagtcagttctcaaaaaatcaaatgataccctcctcctgtctacattttcctgagaggattgaaacctgtgttctctctgccagctatgtggtggtaatgcctaaaaagagacaagcactggtggagtttgaagatgtgttgggggcttgcaacgcagtgaactacgcagccgacaaccaaatatacattgctggtcacccagcttttgtcaactactctaccagccagaagatctcccgccctggggactcggatgactcccggagcgtgaacagtgtgcttctctttaccatcctgaaccccatttattcgatcaccacggtacgtgccagcaggcatttcttgtgaggtctcccttccttttctccccttattccctcccccaagccagactgatctgccagtgccccttcatcttgcctgtgtttgcttttgcaggatgttctttacactatctgtaatccttgtggccctgtccagagaattgtcattttcaggaagaatggagttcaggcgatggtggaatatcctttgctggaaaacaggtgttccttagggtagggactcttgcagggcttgacagtggccattctttgagccagcatgtgtctgctgaccacgggagtggctgccatgtgccagatgccttcacagagcccagtgactgagtagggaggcagttaaaggaccaggcatatcgtgtggacgtgcagatcttaggggagagagcagtgtgttgggagatacaaaggaatttatttttctttttgttttctttctgttatttacttatttatttattgagatggagtttagcccttgttgcctgggctggagtgcagtggtgcgatctcagctcactgcaacctctgcctcctgggttcaagcaattctcctgcctcagccttcctagta

SEQ ID NO: 11520 - DNA, 1173 bp, Homo sapiens
cactgggggggatcacctgccccgagcagctcagcagccccagggccaacatgtacggctgtgtaggttgtttactgtacagcagtacagtgataatccagccccgggccttgacctggggttgcatccaccagagggagtgcctcttaatcttccaaaggcttcctctgggcactggcagccctggctcaccctgtggtctctcctcccaggctacttcatggaccacaccgtggccttcagggacctgccagtcaggtgacacctggtttccttagaccttgaccccacctgtgacaatcagtcttccctccttgacccgactttccctgctctctgccaggatggtttgctccagcacctgctaccgggcagagacaaacacgggacaggaaccccgggggctgtatcgagtacaccacttcaccaaggctggtgtcgctgggactaaacggggctggggtggggggccaccccaagagctcagagcctcctgactcctgtgccctctgtcccaggtggagatgtttggggtgacaggccctgggctggagcagagctcacagctgctggaggagttcctgtcccttcagatggagatcttgacagagctgggcttgcacttccggtgtggagaggggccagggatccagggatggcaggggtggggtaggggagggacaaggggctggccagctgctcttcgctctggaaccacctctccagccccctcgttgcccccattttcctgtacaaggattacaggagcatatacaggatcccaatctgtctgccgtgtgccggtcgtccctcacaggactgtaacagaagcacgaacagtgcacggtgtgccagagtggagacccgggcccctttcctcctgctgctccccctctctctgggccactgcctcatctgtgcaacccaagatactttttcacctcccagtggagagtgggggtgggaaaagggggagccagaggttgggaaccccacttcctctcaccctgtcagtcacacgcagctttcaagagaggctgagaaatgtggacttcttttctgggtgacccattgtaaaaaactgggagcgtaagccgggtgtggtggctcacgcctgtaattccagcactttgggaggccatggcaggaggattgcttgaggccaggagttca

SEQ ID NO: 11521 - DNA, 1192 bp, Homo sapiens
cctctccaggcccagctctggttccccggctctgggctacctgctccatggctaccctgaaccagatgcaccgcctggggccccccaagcggccgcctcggaagctgggccccacggaaggccggccgcagctgaagggtgtggtcctgtgcacgtttacccgcaagccgaagaagcccaactcagccaatcgcaagtgctgtcgagtgcggctcagcactggccgcgaggccgtctgcttcatccctggggagggccacaccctgcaggagcaccagattgtccttgtggagggcggccgcacccaggacctgccaggcgtcaagctcaccgttgtgcgtggcaagtacgactgtggccacgtgcagaagaagtgacggctgggggcacagtgggctgggcgcccctgcagaacatgaaccttccgctcctggctgccacagggtcctccgatgctggcctttgcgcctctagaggcagccactcatggattcaagtcctggctccgcctcttccatcaggaccactattaagccataggagtcctgggggtgcaaagggtgcccctctgtcaacacccttggctcctgtgtttagaggggtggcctgaaggaccttttctgctgggacaagacactgtactgccctctgctgggaaggggttttaataaacagaccctggcgcttgtgatgtaaatccccttgtggagtatttgccctctgtgtggctgtggcagtggacatctctgagcttcagtttcctccagaaaatagctccattggtggtatctcctttgtttggtttggtgaagattaaattcgatgctctatgtgcataacacgcacggagggctcttttttttttttttagacaaagtctcactctgttgcccaggctggagtgcagtggcctgatctcagctcactgcaacctctgccccccgggttcatatgattctcctgcctcagcctcccgagtagctgggattgtaggcacacaccaccaggcctggctaatttttgtatttttagtagagacagcgtttcaccatgttggccaggctggtctcaaactcctgagctcgggtgatctgcccaccttggcctcccaaagtgctgggattacaggcgtgagccaccacgcctggcagagggctactgtattttaagcttaggagtcaggtaggtggca

SEQ ID NO: 11522 - DNA, 1282 bp, Homo sapiens
gaggcaaaggctagagaggcatgaaccaagtggtgggttgtgggagaggaacaggggccaggtcctgcatggccttttaggcatgtggaagcatttgtattttgttcccactatgaaaggaagtcacagggatttgagcaggagtcaggctcggtcagatttgcatttttagaaggacctttatggctgttgtgaggggcgtggactgtaggaggcaagagtgaaggcaggaaaccaatgaggaggctgtggcagtaattcctgccaggggtgctggtggcttgagccagcggaactggagaaattcaggaaagtggctgacagcttgctgatgggttgggtgttggaggtaagagaatgaggtatatctggtaggcagttacccttggaccccaggtcccttcctcttggcaggttatggggccaaactgccatcctggcactgacggcagggggatggtctcctgtggttgggtccccaggtctaatattttgcttttctcccactctggccaggtctcccctgccaaatccaccctagcccactgaagcgctccatgtcactcatccctacaagcccccaggtccctggtgagtggccgagtccagaggagcttggggcccgggctgcttttaccacgcccgatcacgcacctctctcgccccagagcagcgtggcctcctctggcagtgagcagacagaggagcagggctccagccggaacaccttccaggaggatggcagtggcatgaaaggtacattggggacagcagcaccaggacccttttccaggggcttctgcagagcttagaggacagaaaggagcttgtagctgacacctgcttacccctctgaggaggggacatgtctgaggggagtagatagtccctgcttttagggctcaggactaagcagagagaccccacatctaccctaacaagttctagtctgactgggaaggagccccctgtcttcacacaccccagtctgacaaggaagccaggacacagctaagtgatggaacagaggttccagcaagagttttggagcaatcagtgaggtcatcctggtatacatccagcctagcagcttagaagggtcagatgtccttcccagggaaggctgcctgagggtctggctaggcagatgaagaaggagctgatggaaccttagctccccccaaccccctcccaattttttgcatcttttgaggcttcctgtgggtttatccccacaacttttcctttaccctggtaatctgggccaaactcctgacctttc

SEQ ID NO: 11523 - DNA, 2988 bp, Homo sapiens
cttaccacccccattctcctctctcccacccagactgcccggttcctgggcctgacctggagatcaatcccactctggagtctctgtgtctgagcatgacagaacacgccttgggtggtgagcatttcctctttccctgacccagctcccacctacccagcgtctctgcctctgaactgagcaactcagagtcatcctgaggggtccccaggggaggccagactccagggagggcctgactgggatgacaggctacctgagtgccttttcttgggcctccctccagctcctgatcttcctcccttcctccctttcttaccacagatgggacagacaaaacctccaccatctgacgggacccacagcccagcgcacccataggctccctgggcggcgggcgggggccaacccccaacgggcttctccgcgacagcgagagggtgggctggctcagctatatattctaatatttttctactctcttaccctcttaacttttgtttaacattggcacatgccttgctcactcccaggcccgtcgagggatctctgctgaggcccggggagttgggggcagccaggataaagggggcagggactggccagactgcctgcctctctcctttccttcctcatccccacctggtcccatcccacccctgcctcctccagaccgctgaccacctgcctctccccaagggagcagactccccagagacaaactgaccactaccttgtggagcctgctcagaaacatttgacatttggggtgacgcgcagggcagagaacctgccctccagaatgttattgagaggagctggggagaaggaaggggagcaaggagaggaagctctctctcctctccctgcttccccttcaccattccccacattctgcaaggacaggagccaccttcctctctctcacctcccctggccctgttcaccagaggttctctatgattaatttcttaggcctatttaagatacatatttatatagttcttaacggtttttctctgatcatttcctctcatttttagaatccccaggtctctctcagccaagacagtggcagggagagcctgaactttatgaggggagagggcagagccccctcctccagaccctcaagctctaacccattttcctccagccctggctacccggatgaagaggttggaggtgggcagccagggtagccagtgaggtcaggaagtctgttgccttaacgtccccttccccacgaacacacacccttctccgctcccaggtctggttggtgagacttgggagtcaggaataagggaaaggggattgtttggtttttgggtttttccctaagcccctcccttttctttcagcctttttccttcccccattatgtcatgacctcacttaagtggaacactatatcataacccagagattcgtcccagccccagagtccgacagactgtctggtccctattcctaatgaggggttgtgttggggcccaggtggagggaggggatttgggggttcagactgcggggaagccagggtctccctcttcaacgccctcctccccctcaacccaccttcccaactgggacattctcaagcttttcacaccgaaaaggaaaaaaaatgttatttttagatacattttatgaataacttttgttatgaatatggctggtaaccattgtgtatgttattaaagatacaaaatgttgggaaaaaaacaaaaaaaacaaaaaaaaaaaaaattttaaaaccaccaccctccctgcactatcaccccattccccagaccttcttgcccccgccctcctggtctgtggacttccctctgctctgagcccagggagggggaagaagccagggggtagggtggccctgggaacctggctctgggtccccacttcctctcccagtgccgggctgggtggggtgtcaggtttatttatgtacctcttgcacactcatcaacctatgcaagtcccccaccccggccctccatgtttctgtgcctttgctcatcccctcaatctcccagggcttctccagtccccctcccactagctgcaggaagtgggatggatgggccacctcgtttggaatcagcagggtgtccctctcatgggaccctcccctctccccagcctgtcctgtcttgttcactctccatcagggtgagctgactgtgcctggcactgggaggtggtgagggacaccgtctcacacacacagggaggcaagagctgccccccaccccacctgacagcagagtgtgcaggacgcaggcggccccactctgatgggcaggaccctgaccctctcccgctccagccccctccccaggccctcctccatgatttcaccctccctacccacttctgtccccggccccactggcagaatcagctttgagtaactgtacagtttttctcgctgttggagaagacttatttgttggagtttcacttgtttaatggtctgggcttattttggaaaaaaaaaaaacaaacaaaaaaaacgaattctgaccttcgttgtgctacattttgtgggaaaccattggccctgcctctggcctgtgtttctaagcctcaagccaagatccttgagcacctgggggttgcgggaggtatgtgctgggctgaatgacatcataggggctgggaggggaagtaaagagaagttgactttattaacagcaaaggtttgggggtggggaacaaacaagtgaaaggctcacaaacagaccactagaaaagtgctttgctgctcacaataatggtgtctgaaccagccctgaatgccctgggactcagtcactgtcactatcagcttcactggaatcagaagctgcagcttcactgccatcctcctgggccgagtgctcgctgccactggggaagggactggcgctgcggctgtggctccggctccgctggccacccccattgctgccgctgtctgaatcattgtcactgccacct

SEQ ID NO: 11524 - DNA, 1235 bp, Homo sapiens
aggttctattcctctttctgcttagcgctctctccgactaacctggccctcggcctgcccctctagactaccaaatccagtttgcttctcgctgcttaaggccaatcacctgtagactctccttcagctgcgggatgagcatcttataacgctgcacaggatcgaagtcctgttgctgttgctgcaggaggccgctctgggcagggcccaccagttgtgctggcggttgcggctgctgctggggacccgggccgccagccgaactaggacccgatacaccagcagctgaggaagccgctgaagcttgctgctgggatgcagccatcttcctcgcgtagaccgccggaagtgcgttacgactgcgtctctccccgttgcttttcagcatccctatttctagtccccgtttgctagttagtcccgccccctaggcaattaagccaatggaggggaaggaggtgccccaacgttacgtcactctcaaatctgcgtccagactgagatatctctccaccaatcacagaagcacctctctccctcgctccgcccttcacccagacgctcgccaatccgtgtgtggttccgagccggacttcatttccccgaaggcgtcgcggcctgaggagacccgttgggtcctcagcgtcttggcggcagttggtggaaccggagcttcgagtccgtccccggtgctgcctgcgcgttcacctgagtctcgctggagctcttctcgcccgcccacctcatctcaacccactttccgcggggagcggcgccaagctgggccttcctcggatcaggcgtcccctgaagtcggcacgcccctctgcgtcccccttcggtcccgctaggaccccgtccgggctgccgtcgcctcgtcgctatggcgcccaccatccagacccaggcccagcgggaggatggccacaggtaggcgccacgcttttctgttgcagcaaggcgggggatcgggagagggtttctgctgaacaacgtcaccagcccccaggtctgcccgtgacgtcatgaagcgctcacctttgacgaagggggcgggttccttctgagattcaggtgttcccctcctccccgccgtgcagttcagggattaggcttttggagactccctccagaagggatccctccagtcaaccgtttggagacccctcttccgaagacgattgagtacatggttctttattaaagcacttgaagccatctcctgcaaaagggat

SEQ ID NO: 11525 - DNA, 1171 bp, Homo sapiens
cttctccaactggggctccctagcgccgcgccctccagcctggggcccctgcctcccgctcagaccagcttggtgatttggaggtgaaaatggaacccgcgacacccggctcttcgctcaaacatgggtggggcggcccatgcaagtggaaagtcggagaacttttctcagaccgaggctgcctggaggcggaagtggcccccatacctggctcacccctagtcgttgctgagggcgtggttttgcgcggaggcgtctctggggctgaagtctcagggtggggggatccgacttctgtctctccagtccctgaccgtagagacagagaaccctaaaaccgaagcaatccggacttccaggtcaactttgcccggtttctccagttgtgaaactggagatcccgacgcgtgggtcatatccggggaggacaagagacccaaaattgggaaacagtggtgcgccctgacttcggggtccccctcttggtccagccggggaagccgggattcctgggtccctcgggataaggcctcggtggtgggtaaactcagaacctccaactctgggttcctggcatccggaacccaggggtttctgcgggcgggtggggctcaggcggggagcccacaaaccggcctggcaagctctagttccctgcagctggggtggggcgtcgccctgcattttcaggtgccttaaccgacccatttccgcagagcctcctgtcgctgagccctgacgtgcccgtgccatccgaccatggagggactgagtccagcccaggctggggctcctcgggaccctggagcctgagcccctccgactccagcccgtctggggtcacctcccgcctgcctggccgctccaccagcctagtggagggccgcagctgtggctgggtgcccccaccccctggcttcgcaccgctggctccccgcctgggccctgagctgtcaccctcacccacttcgcccactgcaacctccaccaccccctcgcgctacaagactgagctatgtcggaccttctcagagagtgggcgctgccgctacggggccaagtgccagtttgcccatggcctgggcgagctgcgccaggccaatcgccaccccaaatacaagacggaactctgtcacaagttctacctccagggccgctgcccctacggctc

SEQ ID NO: 11526 - DNA, 1351 bp, Homo sapiens
ttgtactgtaattctggaaacctgtgaggctcaaagaaagggcagagagctcaggtgggaaatagaaaaggcacctgaacagtccagggatggctttcgactacttgaaacagccttgggagtttcagaagctattggaatgctccttactgttcagccttctaagaaccagtcttagaggtagggtgtctgaggtccagtgagggacacaagtaggagggagcccagatcttgttccctttaccttgcctatatttcttaacaccacttcagcagtctcatatctggcttttttgactttcctcttctctgggtctgtagagggccttggagtgacaccctgacccccatccactagtacttgaaggccagtggtggcagaagccacagaaacaagaagcccagtgagatggctaagctgcccagcatgtaacttaaatccctgttcattccccattcctttagctgctggagccagttctgcttctcggcaaggagcgatttgctggtgtagacatccgtgtccgtgtaaagggtggtggtcacgtggcccagatttatggtgagtcccaggaactgggcgcatggaggaggtggctctgggagggaggccttcacagcgctcctgtaccctttaattgtgtgtctttctcacagctatccgtcagtccatctccaaagccctggtggcctattaccagaaatgtgagtgagcatgggtccttcccatgaggtagatgggtgtgtggggatcaagtcaaggactctgtgtgattatctaaatcctcgtccctgctcttcttgccagatgtggatgaggcttccaagaaggagatcaaagacatcctcatccagtatgaccggaccctgctggtagctgaccctcgtcgctgcgagtccaaaaagtttggaggccctggtgcccgcgctcgctaccagaaatcctaccgataagcccatcgtgactcaaaactcacttgtataataaacagtttttgagggattttaaagtttcaagaactgtgtgtggccttatgtgttggtattggatgtttaaccagacagaaatcagtaaacatcctggacctattgccagtctggattttgaccctccccagaagtggtcgcgctgggcttggtgtgggtgagtggaagcagaaggcagggggtctctgtctctacacctccagtagagtccagtgtgcaggcaaagctgagatggcagtcgtttggggccattagtggctgcagaccttggcggatatatggctcatccttgtggatgtctatttttttcaagcccagcctcccaaatagcttggattacaggtacccaccaccacgccatgct

SEQ ID NO: 11527 - DNA, 1172 bp, Homo sapiens
caatccccaaacacctggctacccagacccctcgtccccacaggtcaacccacaatacaacccgcagacgccagggacgccggccatgtgagtccactggggcctgccctcgtctacccctgcccaaaccctcctactgccaccacctcttttcccctccctcctccaacaaatgcccccttctctcctgtctctgcaggtacaacacagaccagttctctccctatgctgccccctccccacaaggttcctaccagcccagccccagcccccagagctaccaccaggtggcgccaagcccagcaggctaccagaatacccactccccagccagctaccaccctacaccgtcgcccatggcctatcaggtaatggtctgcctgcctgccctgaagggtggtgggctagggtgactttgggcatatagggtcggccaggccagatgactattcccaatgacacttcctctttcccctgcaggctagccccagcccgagccccgttggctacagtcctatgacacctggagctccctcccctggtggctacaacccacacacgccaggctcaggcatcgagcagaactccagcgactgggtaaccactgacattcaggtgaaggtgcgggacacctacctggatacacaggtggtgggacagacaggtgtcatccgcagtgtcacggtacgtggggcccagggtggtgggtgagcaggcatcctctccttggtaccccctaaactggagacagacctgtccccagatggtgacagcccagagtgggcagagctgggattgaggaagcctagagggcaaggggagctatgtgaacccaaaggaggcatcttacctgatttagcggggaatcagggagggctgcctggggaaggagaaatctgagccaagacctgacaaatgaataggagtaagctaaggaaagtgactggggtgagtgagttccaaatggagggaactgcatgtgcagaggcctggaggtgaggggaacctgggcacattccaggagctgaagggtttgttgtggctggaacataaagagccaaagggggccaagcagtgcttcacacctgtaatcccagcactctgggaggccgaggtgggcagatcacctgaggtcaggagttcaagaccagcctggtcaacgtggtgaaacc

SEQ ID NO: 11528 - DNA, 1189 bp, Homo sapiens
gaggtccagagctctggtggggcctgcagaccatggggcggtccctgagaccaggtccaggaagaggagcaggtgtggggaagacgctgaggccagtttgggacatgaagagtcaagaagcagtctcctttttgcctgttagcttcattctgatgcttcccttgctgattgggtcaccctgtccaccctgacatgcaccacaggccccaggccttggaaccaggcccagccttggcctttcctgcccccatttcaccttgagttctcagaatgagccctgagcctgtgtcccctggagtatgggcctcagtcccatgttgggagcaggacaggctgaccaggctgtccccatcctccaggggggcatgtgctctgtgtacctgaaggacagtgagaaggttgtcagcatttccagtgagcacctggagcctatcacccccaccaagaacaacaaggtaagggcagggggcaaggagataagatggggccgttgggtgctgacatggaccctgaccatattccccccacccccaggtgaaagtgatcctgggcgaggatcgggaagccacgggcgtcctactgagcattgatggtgaggatggcattgtccgtatggaccttgatgagcagctcaagatcctcaacctccgcttcctggggaagctcctggaagcctgaagcaggcagggccggtggacttcgtcggatgaagagtgatcctccttccttccctggcccttggctgtgacacaagatcctcctgcagggctaggcggattgttctggatttccttttgtttttccttttagttttccatcttttccctccctggtgctcattggaatctgagtagagtctgggggagggtccccaccttcctgtacctcctccccacagcttgcttttgttgtaccgtctttcaataaaaagaagctgtttggtctaaaagtgcgtgtgtgtgtgtgtgtgtgtgtgtgtgtgtgtgtgtgtgtgtgtatgccgtgggaatgagggtgttgtttttaagtggggtcatttgcagaccccacttccttgctttgtggttggggcaaataactggaccctacctaaatctgttttcccatctagataatagtgatagtgcctgccccagagagctcttgaggggagtgtgtatgagaagacgtcggaaggagatgatcagag

SEQ ID NO: 11529 - DNA, 1274 bp, Homo sapiens
gcgttgccctatctccgtctccgccacccacttagcgttttaggcatcaattaccagcagtttctccgccactatctggaaaattacccgattgctcccggcagaatacaagagcttgaagaacgccgcaggcgattcgtggaagcctgcagagcaagggaagcagcgtttgatgccgaatatcagcgaaatcctcacagggtggacctcgatattttaacctttacgatagctctgactgcctctgaagttatcaaccctctgatagaagaacttggttgcgataagtttatcaatagagaatagttatgtggtgacactacttcaagagaacctctgcattccagtcataccaatcctgcaacttgattttcagaagtcaagagtatatcgcgataagacagtgcacaggtggaggggaaaaaaagggggagggggaagcttatcttgaaaaagcatcacagaagtagaaaaaaatgtcgaaagcattataactgtaacgttctttgagtttgtgattgatccacatttttccccctgcattatggaaaatgtctctcagcattgctttattacaaagtaaaggatggttttataaaattgagactgatgaaacatcaatactagagcccatgaggatgaaagaaattatcaaatagtgctgaacagaataagatgttaacgctgagttattaggactggaaggctatgaaaagaacttgaaattgtcggaatatgtgctctcttcatgtcatattcaatagaagtttctagtttaagattgattttgtgttttcttaggcatttcaagtgacaagcaaagtaaatgtatatattatgtgataaatcatgttttcaagaacgtcaaatttctggacttttttctttcaatttttaatttttaaagtttttttggtattaaaaaatctattcacaagccaaaaaatatataaaatatacagcgaaaagccttccattcttgttttcctccatccagtaccaacgatgacctctaatagccacagtttcctttccgtccttctagtttccttacgtgtacacaggcacatataaatctgggtttacttgttttatttcttcacagaagtcggcatattatatttactggtttatacattgctttctcattaagaacatatgttgacccttccaaaccactgtatttcctcattattttttaaagtggcattttattccattctgaggttatgtccaaatttacttaaccagggatatattgacggacatttagg

SEQ ID NO: 11530 - DNA, 1202 bp, Homo sapiens
agtctgaggttgtctgacattttgctcgtggttagactgggattttaggctttgggaagaatgctcactgaggtgaggttaacctgatcacttcatgaaagtggtgtctgcagatttcccaacgataataccactattttccctttactcatttgttagaagcaagtcactaaatccagcccacactcagaggagagctaagcctgattcctggagggaaatagggagatacttggaggctgcacaaatatcccatttctccttcaagtttacccacacattttagcattcatcagtggacccggtctgtagcagttattaccgtgatattataatgatgactttctgtttccctcatttctttacatttactatttagaattccatatggaagatttgtcccttctatcatacttcacttattttatttatacaatcattagtttatttccgtgtggactcatgaatatttattagttgggcataccccaacattattgtaatcaattttttttttgctcaagttgttttagccttggccatcagcgtttatctttcaggttggctcctgtgttctttactcttttttttttctccaacaccttcttactttctggcactgcaagatattccaggctcatgtattctccctgcaccagccctagaattagctcttcctctagagtcactggttcttttcattggagaatggtgtgtaaaaataagcatgagttcatactgatactctgacactagtctagtaccagagggttcattctcaccatcccccccttgctttctttataactccttcctctgccagtgagaagcctggctcagtgggctctttttggtgctcatcttattggtcatcttggcaaaaatcggctgtggtgaccctgcctgccttctgtgagcacaccctccccttagtttctgtgagtctgctatcccctgacatttcctctacgttttgcttccttgcgggctcctctgttttcaccagtctgttaaatgtggtggggctatgttctctcttctcaccttggggccaccttaccctctttcatggtctgtttcctatctctgtgcagatgacacactctgtccttagccctgacctctactctgagccctagacctggaggatccggaggcctcatggacaatcccccaatcccaactgggcaatccttgggccc

SEQ ID NO: 11531 - DNA, 1273 bp, Homo sapiens
gctaatattagtgaacagagctgtagaagttgagggttggaagactagagagtgggaagaggtgctattttagatagaggggttaaagaagacctctttgagaaaaacgttaatggacctcacagaaagggaggacaccagctggctgtatgtatattctgggaagaaggacattccaggtagaaaaaaccagcaaattcaaaggccccgaggcatgcttggtgtgctggaggagcagaaaggagtgaactggacctgactggacacagtgggagggaaggagaccaaggcaaggtcaggtgggaccgggaggccatgggaaggacttgaatttgaagctgatgagatgtgtggcagggagagcatggtgagctgaggcgatgtgatctaccacggtaagagggttcctctggctcccatgtggctactagggtggaagcaggatgccagtgaggaggccactgtgcagtccagctgagatgatagtggcttggccagggtgctaacggggcggtggggagatgtggtcagattttgcatataatttgaagggagaatcaggtatgtagggtaagaaagaagagtcaaggaccacactatggcgtttagtctgcacagaggaaggagggagtgccattaactgtatggacaagactgagagagagtgtgggcgtgtttagcctctgactggacccactggccaaacaggagcttatacaagactggcattgaagggtgagatctgggctgggagtagttggcatatttatggtattaaagcccaggatgggatcactaagggagggtgtatagatggaagtgtgggctgagaatgagagcagggaggcccgtgaggaggttgctgcaataatctaggtgagatgacagtggcctgtaccagggcaggggcagaatgagtagtcattggagtctgggtgcattttgaaggcagaactcactgtgattggttgtgggtagtgatggaaagaacctgacaagggcttcatgagaacagaatagaagcagaagtgagacagtggtgtgacattcctcctttccactgggccctgtggtctctgcttctctttgcattggctgcttcctgttctcaggcagctgggttggtcctgggtggactcttgcccccactctatgtgatcttccagctcagttacccgcagcccctcagtcttcattccgaatttcccagataggaatgggatttccagggtcgggtatccaaccctgctcaactcactggagctggagggtt

SEQ ID NO: 11532 - DNA, 1060 bp, Homo sapiens
atttttagtggagactggatttcaccatgttggccaggatggtcttgatctcttgaccttgtgatctgcctgcctcggcctcccattatgtgtcacatttctatgtccatcccagaatctctcccctgagctcctgactggctgccttcctcataacctgttggtaatctagaggtatctccagagtaattttgatcaaattgagctcctgctcctttccccaaaattttttccctgcatgttcatctcagtaaatgctccccccatcctctccaggcccaaaccactggaattgtcctttactcctctttctgtcttatattcatgtctgtcagctaatatacctgaccacttctccccaccttcactcctgtccacccttatctccttcacagaccattatggcaggctcctcagtgatctctctgctctcacccctgcccccagagtgttccttacatgcagctggagggatgctgtgagcacctgtatcaggtcatatccctcccccgctcagaacacttccaaggctacatcttgctcggggtaaaacccagagtcctctgcaaggccctgcattgtctgccctcatcacctctctgacatcatctactcttcttactccctgtgctccagccacactggcccgagggcctttgtgcttgctcttttctttgcctaaagaactcatctatcaaatagcccagacttgttccttcctctttaggtctctcctgagatgtcactgccttcctgagatcttccctcaccacccttctaaatttgtgacttatagtcacatctatctttgcttctttaactttatccttagcattaatcatattactgtttaacactctgtagaatttatctgtgtttatggtctgtctcccctgacccttacctctaggagactgttgacttcatcagggaaggggcttttgtctacttcctccgttatctccaacacatagaaaagtgcttggcacacagttagggctcagtaactacttatcaaataaactattgaagagcacatatctggatcccagcatggcgg

SEQ ID NO: 11533 - DNA, 1178 bp, Homo sapiens
agggctttgctgatgggggtaatggggcgggtagttaagtattatctgtggcttgcctgagtgatatttaggtctaaggtgagttaggagactgtgacataagggatctttgaggggaaactggggaatgttgggactcgttgaaggcgcagtcactttaacagcctatctaggagagccatgtgacattaggaacctcttgaaggggattgggtggcatttgggtctgataaggagttgatgtgacgtttagatcctagttgggggttgtgtgacactggggacatgttatgagtggtatatgataacataagatctgtttgaggggcaagttgacataaagagcttgtttaggtggccaaaaggtttccaggatctatttagagggtcttaagatatcaggggtctgttaggggctaagtgacatcagggtgaagtggggaggggaacaaacattagtgaagttgggaagctttcatgagaggactgtcttcttccaatgtgagttatcccctttcgtctaggatgagatcccagcactgtccgtgtcccggccccagaccggcctgtccttcctgggccctgagcctgaggacctggaggacctgtacagccgctacaaggtacattcgacccccaacccagaccttgcacaggacctgacatctcatactcttccccactttccaccactctctggatcagcaagtctggagccatccccttctgtcccctctctgctcgcagaagctgcagcaagagctggagttcctggaggtgcaggaggaatacatcaaagatgagcaaaagaacctgaaaaaggaatttctccatgcccaggaggaggtgaagcgaatccaaagcatcccgctggtcatcggacaatttctggaggctgtggatcagaatacagccatcgtgggctctaccacaggtgtgctaaggacacctcattcattcatctgtccacttaacaactatttcctaccatgtgctaggcagcagcaaacaaggcagggcagtgcagtgcaatgttcttcagagtattttgactgatcgaaaggtagaaatacatacatatatatatatatacacatatatatatgtatatctatgttttttttgtttgtttgttttttgttttgagacagagttttgctcttgtccaggctggagtg

SEQ ID NO: 11534 - DNA, 1162 bp, Homo sapiens
ttcaacctcagagtattcatactggtgagaaaccctatgaatgtaaggagtgtgggaaggcttttagacttcacctacaactttctctgcatcaaaaacttgtacaggtgagaaaccctttgaatgtaagaaatgtgggacagccttcagacatcagtagcaacttactgaacatcagaaaattcatacttgggtgaaaacctttgaatgtaaggaatgtgggaaggcctttcaatatcattaccaatttcatggacattatagatttcatattcgtgagaacccttatgaatgtcaaggatgtgggaaatgctttaccagtggtagaaaccttagagtacatcagagaattcatactggtgagaaaccatatcaatgtgaagaatgtgggaaagcctttagtcatagttcaaacctgttaaacatgttaaaattcatactgatgagaaaccctatgaatgtaaggaatgtgaaaaggcctttagcagtaattatgatcttactgtacatctgagaatccgtactgctgagaaaccctgtgagtgtaaagaatgtggaaaacttttggatttagcttagtctttactgcacatcaaagaattcatactggtatgaaccgtatgaatgtaaagaatgtggaaagacctttacttgtagctcgagccttgttcaacatgttaaaattcatactggtgagcaaccctgtgaatgtaaaggatgtgggaagacctttagacttagttcagtcctttctgcacatcacagaattcatactggcatgaaaccctatgaatgtaaagaatgtgagcaaacccttactgtgaatgatctgcttacgcaacatcagaaaattcattatagttagaagttttatgaatataaggagtgtagacaagccttcactgtgtatgaaaaatttactcaacaccagagaattcatattgatgagaaatcctgtgaacataaaagaatgtgtgaagaactttcatcgtggcctgggatttgctcaacatcagagtattcatactgctgagaactcctttgagtgtaaagaatgtgggatattttatagccacactaaatgccttagagttcagagaagataattttggtgagaaagttactgatgtgaggaatgtagagtagctgccatgttcacagt

SEQ ID NO: 11535 - DNA, 1200 bp, Homo sapiens
cacaatgatgcccctgtgcccatcatccaccgggacctcaagtccatcaacagtaagtggtgtcctctccccaaaattccttccacagaacctctcaaggccaggcctaggtggtgggaaacagggtgagggacaccagatgacactgtgcctggagtgagaaggggcagcagtatgataccttcagggtgaaggtgaggtaggccttgcctgccttaagggagaaaaaggaggctcagaaaggttgaaggacttacctgcctcccaggctgcagagtcacaatcgctcagtaaacatgtatccatgaacacctgcgttccctgcatgaacaggacagatgcagtgcctgccttcaaggtgcttgccatccagccatgctgccagagtccaccaggcagagacaaaaagagcctaccccgtctggagtcagtgtctctcaaccccagcactattggcacttgaggccagatcattgttgtaggggctgtcctgtaaattgtgagttgcttagcggcatctttagcctcttcccactagatgtcattagcattccctgccccctctccccagctatgacaaccaaaagtgtctccaggcattgcaaatgtcccctggggggcagaatcacccccagttgagaaccatttcctggagtcttcataggccgagctggccaaggcaaactggaaaagatgagggaggaattaaattgatgtggcttatataaaagcttccaggctgcctgataggttctccaaagttgattggttggttgaataaataatggagccaggtagaagggaacattctgcaagactcatttctagatggaagagcttcatgtggtgtcaacaagtattaattgagcacctattaagcaggagcccagctgggagtaagacagccatggtttctgccctgacagtactcacaggctagcaatttcattcattcattccacagatatttccagagtgctgtgtgccagaccctgtcccagggatacagcaagaaaaaaaaaatcttacattcctggctctcccattcgtgctgtgccccatctcactccctttcatttcttcattcatttgttcattcttccatttggtatttaccaggccagatcatgtgctaagcaaaggcatcagcagtggagaaggccagcatgtccccggccctcacgtcactcacagttaagc

SEQ ID NO: 11536 - DNA, 1260 bp, Homo sapiens
ccctactcgaccccgtcctacctctcagtgccactgcctgccgagccctccccgggggcgcgggcgccgtgggagccgacgccgtccgcgccccccgctcggtggggacacggcgcccggcggcgctgcgacctggcgctgctaggctgcgccacgctgctgggggctgtgggcctgggcgccgacgtggccgaggcgcgcgcggccgacggtgaggagcagcggcgctggctcgacggcctcttctttccccgcgccggccgcttcccgcggggcctcagcccacccgcgcgtccccacggccgccgcgaagacgtgggccccggcctgggcctggcgccctcggccaccctcgtgtcgctgtcgtccgtgtccgactgcaactccacgcgttcactgctgcgctctgacagtgacgaggccgcaccggccgcgccctccccaccaccctccccgcccgcgcccacacccacgccctcgcccagcaccaaccccctggtggacctggagctggagagcttcaagaaggacccccgccagtcgctcacgcccacccacgtcacggctgcatgcgctgtgagccgcgggcaccggcggacgccatcggacggggcgctggggcagcgggggccgcccgagcccgcgggccatggccctggtgagtgaggcgccctgcacccaggtcacagaaaaccccttctttcctcctctgccagggtcgcaagtccagcccagccacgacccctcaggcagccacctcctgcttcttgtggaggagggagggtctgtgtccctttaccgctcactcctggaggcatcgggggtctccaggggactgagacacaggcggcaaactgatgcctataaggccaggcaggtgcctatagcggttgtgaccagcatgaccatcgccaattcttacacagcctagacactgttctcctccatctgttaactgggtgggagatgcggccatagcagtgttattaagtacccacgtcaggcactgtgctgcttgttttaagttatggttattctatttgctcctcacctgcgtggtgaggcaccatttttatcccccttcagagctaagccatgcctgagcttagcccagtgcaggagagtcgggaagaccagggctttggcccccgaggctgccgctaagcagcagttccagaaggttgaggaacatgccagggtccacccagaggagcaagcagctgggagtggtcccagtctaggtcaaggtcccagcactgc

SEQ ID NO: 11537 - DNA, 1152 bp, Homo sapiens
gacgcaggcacacgtgggtgtgtgtgcatgtgtgtttgtgtgagggcagcgtgtcctccagtgtgcatggtgtgtgggcttgggccccatccctggcccgagcatttcatcctgtgggggaggggtgctgacctagtgggaggagccccactgtgatccatgagctgccctgcccacgcctcccctccctgtagcaacacctctgggtgtttggagtttagcttttgtgggtttgctctccctatcccatctcctgtactacacagttcatggcagggtggggaggggtggggttggttcgggtgggtgagggtctttttcctctgtgtgcgatgttgttatctgacagttctccgtccctactggcctttctcctcgtcttcatatttgtacggtacaagcaataaagacactcatttcagaccagggcccagcctgcactcacgccagcccaaccactctgggctttgccttggtgatggagtcagacccctgggccccagctcctcctgtactagccgttcccttcagcaaggagggcactgagctcagggtgagggcagctggggtgtgtgcaggagctcaggctggagagggtgggtggagctggtgctgtggggctgaggggtatgggaaggctccccgcatgtgggggtggggtggacagagaccactccaggccctcagtgctgcttaggctaagagaggtggggtggagggacagggctggaagatctgggtagcccagaatgaggagggtgcctgtgctgtcactgaatgagagggagtggttcattccacccggctgccgagcctcagaggggggcattcctatcctgccccacctccctgtttatgctgccacctggaagccttgaggcccccaaattccagtacagacccagtggtgtgttcatggtggcgtggttgctgtcacctgggagctcctgagcgtttggttagaaccctgttcagcttggggtcagccctcccctagtcactgccctttagcctggatgtgtctgggcccctgcacttcccgtgcttgagtcacgtggctgcatggccgggcgctggccggatggaacacctcccccagcaagggaccagggaccagagccctggcctgccctgctgagccctgctgtgcag

SEQ ID NO: 11538 - DNA, 2549 bp, Homo sapiens
aagcctgtcttccccactggactgtgagccccatgcgggcagcgctgaggctgtcttggtcatcactgtgtccctagcactgccggcctaggaccaggtacaatatagaattgggactcaaaatattcgtggagtgaatgaccagattaatctctccactccactcatgcccacctattgaccttgcaaatgacattccctttgtgcggcactcccgtcctcttccctctttcttagacctacttccagctcagatgtcccccctctcagggcgccctccctgaacttctaggaaggtcaggtacttcctctgggctcctccagtcccctggactcccccatcatggctctcgccactatctggggtgtcagtgatgggtgtttctcccaactgtgagtcccaggaggccaggcacagaggaagcagctctccatgaatgtgtgttgagtgactcagtgactcattcatcctgtctctgacctccacagcccacaggagtcttcagccgcctgggggccaccccagaaacggacgaggatctggcttgggacagcgacaatgacagcagcagctctgtcttgcagtatgccggggtcctgaagaagctaggacggggcccagccaaggccagtccccagccagcactgactgtcaaagccaaggccacaagctcagcgacaacggctgctgccccgacactgcggcgcctggcgctttcctcacggtctgggcttgagaggaagccggagtccttgtctaaagtcagcatcatcaagagactgggcgcagctgcccttgtgcccgaggcccaggacagccaggtcaccagcaccaagagtaagtcctcagccgaggtcaaggtcaccattaagaggactctggtggggccccgggggagcagctccagcgagggccttggtgcccagatggaccacgcgggcactgtgagcgtgttcaaaagactgggccgcaggaccttctagcccacctgtgggcggggtgcaggcagcagagcctgcgggcatctgccctggccgccccaggctcctggcttcatcacgcctcccaccagctcctggatgacacagcttgtctccctcgggctctagagctaggcccgagcattcgggggatcaccccatttctcctagcctgggatggtcgtcgcagctggcctggcctgctccaggactccccttctctcatgtcctctgtgctttcttctctggctgtggccttggcagaacccacttttctacctctcccaagtgccagggggcttcttcctctcctacattccccttcttcccctgagcagggtctgctgcctcagaccccagctcatcagcctccctgtccccctcaactaagtgggtgtcacctggtgggcctcccttcccccactccccactgacctccctcactcctctgcgcctccccccactgctgtgacttctctctctccctgtcttcactttgttcatttctcttctgttttctgtccccgtggcaaggcccgactgtccgctgcgtcctgcccgaccctcctgtacctccggcctcccagcggccccctcgtcggcggtggcgtcgagcctgttgagactgttagccgccctctactcccaggctggagggacctctccagaccctgggctgcggctgaggcgcatccgttttcctgccctgggcatctgtctctgaaagtgtatggcgggtggtgggcaaggggcactgggaagggaggccagtgcctagagtgaagacagctgctgttttaatatatttttgtgactttcaaatcatttcccccactccttcagggtgagttgcaggactgtttcacactatgcgcagctgggctggggatggtggcagaggattgggctgtgtctctaaaggtcaggcttcctgcacacacatggtccatgtccctgctgcaagccctgagtcagggggagtaatggccacagtcaccattcagttaggccgccccctgcccccaataagccgtagtggttttgtcactctatcccctccccccatggatttcacctgcctgctggcacctttccaaatgatgggctccgtttgtgagaccatgagtttccactggtttggtcgcccacccctccctgctgcacagcgcccctgagccaggcctgtcctaggagctggtagcaggtagtgagcagggcctctccagggatggggtgtaggtaaagcggtggtgctggccaaggaatctgaggagtgggagaaagtggccagggccgcttcagtggttgtggataggaaggccttgcagaaggggtgacatggaggccaagttgggaatgtggcttcatgaagttcaggaggagagctttcagacagagggacagccaggggcagaggtgctgaggtgggacaaggaacaggaagaaggctggtggctgtgggtgagggtgggccctgcctccagcatgaggcagaggtgggtgggcaggggctaggtggctgggggtgttgtgatcaaggaggaggaatgtgcacagtgacccgggag

SEQ ID NO: 11539 - DNA, 1221 bp, Homo sapiens
cagatctcgctccacactctgctccctgatcccggggctcctccgactccccctgcctctcacactccttcccatcctcccctcccactcagaaactctttgtggtccccgcggatgaggcccaggctcgaatcccatatgcccgtgtcaaccacaacaagtacatggtgactgaacgcgccacctacatcggtgagtgtcttgagcaccacggggcgctgaagaagagggggttcagacaccaggggcggccccccgagggtgcccttatgctccacccattcctctctaggaacctccaactggtctggcaactacttcacggagacggcgggcacctcgctgctggtgacgcagaatgggaggggcggcctgcggagccagctggaggccattttcctgagggactgggactccccttacagccatgaccttgacacctcagctgacagcgtgggcaacgcctgccgcctgctctgaggcccgatccagtgggcaggccaaggcctgctgggcccccgcggacccaggtgctctgggtcacggtccctgtccccgcgcccccgcttctgtctgccccattgtggctcctcaggctctctcccctgctctcccacctctacctccacccccaccggcctgacgctgtggccccgggacccagcagagctgggggagggatcagcccccaaagaaatgggggtgcatgctgggcctggccccctggcccacccccactttccagggcaaaaagggcccagggttataataagtaaataacttgtctgtacagcctgtgcctgactgagtggtgtgagatggggtgcaggggtaggggacagctggcatgggcctctggtggggacatctttttgtgctgagccctcaacatgtcactggcatgtgctgagccctcagtgtgtgaccagtgtgggttagcatgtactgagccctcagcatgtgctggcatgggttggcatgtgctgagcccttaacatgtagtgtacatgggctgacctgtgctgagcatgcagcgtgccaccctgtggcccggcatggacttagcactcatgtagccagcatgggtatgtgctgcagagaagcatgttcccagattgatcagcagggaccaaaccattgccacatcccaagggtgaacaagcatggctgagcaccagagtgtgcaccaagtgtgaatttaggcctgccaagtggatttac

SEQ ID NO: 11540 - DNA, 1113 bp, Homo sapiens
tggtcactgagggccatgacgcggggctgaggatgcctccgctgggcatctccctgccacaggtggagctgaccggctttggggaggcaggtaccccagggcagcaggctcagagtacagtcccttcagcagagggcacagcaggctacagggttcaggtgccccaggtgaccctgtctctgcctggagcccaggttgcaggtggtgagctgctggtgggtgagggtgtctttaagatgcccaccgtgacagtgccccagcttgagctggacgtggggctaagccgagaggcacaggcgggcgaggcggccacaggcgagggtgggctgaggctgaagttgcccacactgggggccagagctagggtggggggcgagggtgctgaggagcagcccccaggggccgagcgtaccttctgcctctcactgcccgacgtggagctctcgccatccgggggcaaccatgccgagtaccaggtggcagagggggagggagaggccggacacaagctcaaggtacggctgccccggtttggcctggtgcgggccaaggagggggccgaggagggtgagaaggccaagagccccaaactcaggctgccccgagtgggcttcagccaaagtgagatggtcactggggaagggtcccccagccccgaggaggaggaggaggaggaggaagagggcagtggggaaggggcctcgggtcgccggggccgggtccgggtccgcttgccacgtgtaggcctggcggccccttctaaagcctctcgggggcaggagggcgatgcagcccccaagtcccccgtcagagagaagtcacccaagttccgcttccccagggtgtccctaagccccaaggcccggagtgggagtggggaccaggaagagggtggattgcgggtgcggctgcccagcgtggggttttcagagacaggggctccaggcccggccaggatggagggggctcaggctgcggctgtctgaagcccctagtcagatggggatcccttcttgccttcctttctctaccccctcgctgttgtgtgtgtgataactagcactaaccctaagagggccgggaggtgggtgactgaccagggctggcagggag

SEQ ID NO: 11541 - DNA, 1185 bp, Homo sapiens
tccagaggtgcagctgccgaaagtgccagagatgaaagtccctgagatgaagcttccaaaggtgcctgagatgaaacttcctgagatgaaactccctgaagtgcaactcccgaaggtgcccgagatggccgtgcccgatgtgcacctcccagaagtgcagcttccaaaagtcccagagatgaagctccctgagatgaaactccctgaggtgaaactcccgaaggtgcccgagatggctgtgcccgatgtgcacctcccggaagtgcagctcccgaaagtcccagagatgaaactccctaaaatgcctgagatggctgtgccagaggttcgactccccgaggtgcagctgccaaaagtctcagagatgaaactccccaaggtgcctgaaatggccgtgcccgatgtgcacctcccagaggtgcagctgcccaaagtctgtgaaatgaaagtccctgacatgaagctcccagagataaaactccccaaggtgcctgagatggctgtgcccgatgtgcacctccccgaggtgcagctgccgaaagtgtcagagattcggctgccggaaatgcaagtgccgaaggttcccgacgtgcatcttccgaaggcaccagaggtgaagctgcccagggctccggaggtgcagctaaaggccaccaaggcagaacaggcagaagggatggaatttggcttcaagatgcccaagatgaccatgcccaagctagggagggcagagtccccatcacgtggcaagccaggcgaggcgggtgctgaggtctcagggaagctggtaacacttccctgtctgcagccagaggtggatggtgaggctcatgtgggtgtcccctctctcactctgccttcagtggagctagacctgccaggagcacttggcctgcaggggcaggtcccagccgctaaaatgggcaagggagagcgggtggagggccctgaggtggcagcaggggtcagggaagtgggcttccgagtgccctctgttgaaattgtcaccccacagctgcccgccgtggaaattgaggaagggcggctggagatgatagagacaaaagtcaagccctcttccaagttctccttacctaagtttggactctcggggccaaaggtggctaaggcagaggctgagggggctgggcgagctaccaagctgaaggtatccaaatttgccat

SEQ ID NO: 11542 - DNA, 1224 bp, Homo sapiens
ctcagggagctggacacctccatggatgggactgagccccctcagaatccagtgactccccttggcctccagaatgaagtgccaccccagcctgatccagtcttcttagaagctctgagctcccggtacttgggggactctggcctggatgacttctttctggacattgacacatctgcggtagaaaaggagcctgcacgggccccaccagagcctcctcacaacctcttctgtgccccaggttcttgggagtggaatgaactggatcacatcatggaaatcattctggggtcctaaaactgtgatagaggggatcgatccttcctcatgtcatcttcggtggcctggatccctgaatgcaactctgggtgtgtgtttttgtgggggctcgaagcagtgactatggcctcctttgttcccatttcagggttccacaaactgtcttgcatgtgtgtgtgtgtctggttaccccgaccttctgtgaaggtgggtcttcctgaattaatttatctattccaaatgccttaacgagactctgtttctgggagtctgattttccacttacacatttcttccacctttcctgctagttcccactcccctgtgaccactggggcctcagggaagataaagaaagctgggcctgtcgaaggatgacagggatgtgctgccaggttgctatagaaacccaggctctgcctcttgcaccttgagggggtgggaggggctggtgtcctccctccaggctgaaccccacttcctcggcaggaccccagtctcagcagcctcctgatttcataaccaggccggaccacgtgcaatagggtggaaaccaaactgctccatgccgggttatttaaaagaaaggcagagtttgtggtggcttttttttttttttttggattgtttgtaatttttttaaataaaagtattttggaaggagggatgttgtctaatgtttctaaacttcactgggtcagtgggagggacctggtaagttcctaaacatcagcaccacttccgtgccatagctggggtaggtgtatcattgtacatgacatttattgagtgcttgttggctgagtgctctagctcccacttggaatcctagcactttgggaggatctgcttgaggccagcctgggaaatgtggcgaaacactgcctctacaaaaaatacaaaaaggagctaggcatggcggcctgtagtcccagttactgggga

SEQ ID NO: 11543 - DNA, 2335 bp, Homo sapiens
cctatctctttcacagcccctgcctcttctcagaatcccttctctggaacctggttgggttcataatccctgaccctggcccctgacttgaggcagaattctggaccctgactataacttctgatcctaactggattcagattccagtcactaactctgacccatggctcagccgaatcccatccaatgatcctagtttataatacttgactggtcccttgccctagttgatttctgatccctgtctgatccctctcctgactccaaaatcctggcacaggtagttcctagaaacctagacccacaggacttgcaaccatggtccccggaacccgagaaccttggtcagccctacccacctctgccatagagccctcccccagcctccaactcatgagacttcccaccacctcccccagacaccctactccaaggggattggtcgggtgtgtcccgagactggaccctttctgaacacccccaccccccacagatgtggacgaatgcagttcgggtgcccctccctgtggtccccacggccactgcactaacaccgaaggctccttccgctgcagctgcgcgccaggctaccgggcgccgtcgggtcggcccgggccctgcgcaggtgagcagcatagggacccgccagagagtctgggagtagggcctgggttccagggcaaagccggctggaaaggtggaggcgggaccaaggcgctgtgggaggagcttagaaacctggcattggtgggggcggggttactgcgatgtgggcggagcttgtctgggaggccgggtcccgtgactccgcccaatctcccgcgtaccctagacgtgaacgagtgcctggagggcgatttctgcttccctcacggcgagtgcctcaacactgacggctcctttgcctgtacttgtgcccctggctaccgacccggaccccgcggagcctcttgcctcggttcgtacccgggctgatcctggccccggaaagggtgggcttagggcaggaaaaggcgggacggggagaagagggcgaaaaggggaaaacgagtttttagccggggtattccagcaggatcagggggcagctggtgggagtctcgaggcagtgagggggggcggggcgtggagatgaaagggccgagtctgggtatttggaccgtgattgtaaagaagctgttctaaacccgtcggggggcggtgtttgcagggagggaagtagcgtgaggcaggttggggaaggcgtgagaggcctaggagagccgaggggcggtggaggggtgtggcctagaatgttaggcggagcgggaggtgggccgggccttcggacgccctgtcccgcagacgttgacgagtgcagcgaggaggacctttgccagagcggcatctgtaccaacaccgacggctccttcgagtgcatctgtcctccgggacaccgcgctggcccggacctcgcctcctgcctcggtgagaggccccgccccggcctgatccctcctcccttcgactccccgactcgccgattggcctcccacctctgtctttcctcctccgcttctcccctccccttacctctttcccccgcctcctctcctagcctccccaactctcctctaccccaatcttctcctgccctctcctctgcttccccggcctcccccttctgactctcctctcccctctttgtatcccccatcttgcctccctgcttcccacatccgaccacccgacctctctcctcagacgtggacgaatgtcgcgagcgaggcccagccctgtgcgggtcgcagcgctgtgagaactctcccggctcctaccgctgtgtccgggactgcgatcctgggtaccacgcgggccccgagggcacctgtgacggtgagcctgcccccacccgccttcgctagcgcttgcaacgcggtgctggaggctgctcccttggggactgaggaggggcgccctgcttcccagacttaggcggagggaaagaacaccctctcaccgtatctctgtagtggaaataagccgccaccgtgtccatgtattttcttgtgtcaggatcacggccaagcctcccttccagccgcagtccattccccctctgcagctgaagcccggtccacattttaggctatgcccccagtaagacaccgccccaaaactgttaggccccgccccttccaatcggcctctggattaaaaccccctcttcaggccccttctcttcctaacagaagtttggacgtgccctttccgcgccctccaccagtcctacttccagccttccctccaaagaggcccaatcccggtggccctaggccccattctttcccaatga

SEQ ID NO: 11544 - DNA, 1180 bp, Homo sapiens
gatgggtttttgccatgttgcccaggctggtcttgaactcatgggctcaagcaacccccccacctcagcctcccaaagtgctgggattacaggctccaacacactctctctgtgcttcttgccacctctctttttgcccactgtcccaaccactcttctctcatttcctgtgccttcagcacttacccccatacagtgagatgtcagacaatgctcagagaagcaaagcaactgccccgaggccacacagccctccagaggccagacttgggtagacccctctcaggccctacctcccagtcattggacaccttcttctgccctctcctcctatatgacagtctccttgttcctcaatccagaaccctggagtgacctcagagaacttccagagttagatcacagctgatgagaaggatttgctgataggcagagggtgcctgggctgctcagcaggggaagggtccagcccctgggaggacctgagtgccaggcccactctgacacatgctgtctccacctacagatgacaatctgggagtgtgctggcaggaagtgggggctgacctcgtgtgcagccaccctcggctggaccgtcaggccacctacacagagtgctgctgcctgtatggagaggcctggggcatggactgcgccctctgccctgcgcaggactcaggtgctggcactggcctaggctgaactcagaggccttgccccatgggctccaaatctaggccctcagatccccagtcgcagaacccccagactctatccaaactctgtcccctagaccaacccctatgtcgcagcccatcccaaaatcttggtccccgattcacactccaaagacttccaagtctcagccacagacatcccaaggcctgacccagcagatcccatagtaccagacccacaggcccctgaggtctggtctctcatatgctcagctcctggtctctagaaccaccagacacagcctatgagatgtcctcccctaaatcctgggcccttagacctgaaatgccagttgctcagacctcaccatcctggccccagaccccctggtcacagccccacagacctccaagtcccattgccttagacaccctccaagtcccattgccttacacaccacatccgggtgcctaagaccccaacacacagccccagagattcc

SEQ ID NO: 11545 - DNA, 1108 bp, Homo sapiens
cctaagctggtctcaaactcctgggctcaagcattcctcctgccttggcttcccacagtgctgggattacaggcgtgagccactgcgtccatccagattcatgatatttagatgttgaaatgtggctttacagactcagacagctctctgaggcaaacaaagagggagatgcaggtaccctcagcacaagccccaaattacctgcaggggagaggcggaaaatcagacaatgtagaaaccgggagaagaaaggtatggacagaccgatgcagataggaggggaaggaaatacctggaaatgagatagagaccggctggacagaccccggggaccctgcaggtcaccacacccttctctttcagctcacctgttctccaggaccagccctgctggggcccaggcccaggctctgagaggccgtgtcctaacctgccctggccccggagaagctacgttgccacctgtcccccttccctggcctggtggggcctggctttggggcaagactgagccacgggggaagggggaatcccgtacctgctgctgcttcctctgtcttggctaacgtctgtccccctgaacccctaaccataccccaagagctcccaaagcctgagaccagggtcatttgtccccaactccccatctggccctgctgttgctagtacctgttatttattacctggaggcctgtccagcacccaccctacccccataaagcattgtttacacctgtgtcttggcctccattattgtgagatggcagggagatggaagaggtccctgatggaagaatcatgtgtcatggtgtttgggggccttgtttctgtttttttgttgttgttgttgagatggagtttccttcttgttgcccaggctggagtgcagtggcgtgatcttggctcaccacaacctccacctcccgggttcaagctattctcctgcctcagcctcccgagtagctgggattacaggcatgtgccaccacacttggctaattttgtatttttagtagagatggagtttctccatgttggtcaaggttggtctcgaactcccaacctcaggtgattcgcccgcgctggcctcccaaagtgctggaattac

SEQ ID NO: 11546 - DNA, 1108 bp, Homo sapiens; identical to SEQ ID NO: 11545

SEQ ID NO: 11547 - DNA, 1221 bp, Homo sapiens
ggggcctaggtgggagcagaaccgggtggctcaaaaggatggccgcctagtgtgtgtggatatggtagctggaattgcagaaaactaatgtccaaccaccctggtctccaggtacgccatcactgtctggtattttgatgccaaggagcgggcagcagccaaagacaagtatcagctaggtacctgcttccctcccttcagtccttcctattctgtgggccctcttgggcctgatgccaccccatccccctcatcagcctcttgttaaatcccaccactcatttttcttcatctctgcccaccttccttagcccactctcctggtaccccaacaggagccccatttcttcctggtcctctccccatctccccaggtttcccttggcttctttgtccttctgatgactcactgtctcctgtcccctctcacccccagcatcaggacagaaaggtgtccaagtacctgtatcacagccgcctacgcccacctagtggccagtcccagagccgcatggcagacagcttaaatgacttcaggagagccctgggcctgtgctggctgctccttccctgccaccgctgctgcttctgactttgcctctgtcctgcctggtgtggagggctctgtctgttgctgaggaccaaggaggagaagagacctttgctgccccatcatgggggctggggttgtcacctggacagggggcagccgtggaggccaccgttaccaactgaagctgggggcctgggtcctaccctgtctggtcatgaccccattaggtatggagagctgggaggaggcattgtcacttcccaccaggatgcaggacttggggttgaggtgagtcatggcctcttgctggcaatggggtgggaggagtacccccaagtcctctcactcctccagcctggaatgtgaagtgactccccaacccctttggccatggcaggcaccttttggactgggctgccactgcttgggcagagtaaaaggtgccaggaggagcatgggtgtggaagtcctgtcagccaagaaataaaagtttacctcagagctgcacacatctgactccatctgcaatttagggcctttattgaccgaggagggtatggaggtttgagggccagtgagcccaccatagtggagcctgacctcagcaggccactggctggagctggaagtctggggggacactgcccaggccagtgcactgcaggtga

SEQ ID NO: 11548 - DNA, 1221 bp, Homo sapiens; identical to SEQ ID NO: 11547

SEQ ID NO: 11549 - DNA, 1203 bp, Homo sapiens
catattagtgtatctataggatgctgagttatagagcatgtgcatttatggggttttgttgtttttttcttttaatgtttttgtaaagatggggtcttgctatgttggccaggctggttcctaactcctggcctcaagccatcctcctgccttggcctcccaaagtgttgggattacaggtgtgagtcaccatccccagccatttacagttttgatagagacttctagattgccctctaaagacactgtaacagtttatctttctactagatgttacaagagtctcttaaactaaaacataaccgtattttgaaatgcctgtctctgtggccctgtactctactgatccctttggaggccctggcttcgattcggttcaacaggcttttcagagctgcttaaacgcttcttctccagcaagaaaagccattgctattttttaatgcctgatatgcttccctcctatattggctcataacctacggcctccagagaagcaaccctgagcccttttgtcctctttcctcagatcaatgaggaaatctccgtgaagcaccttccgtctacagagcctgacccccacgtggtccgtatcggctggtccctggactcctgcagcacccagctaggtaaggaggggtcagctatgcagtccagagaatagagtgactgtccctacccttggattttcaaggctcctaagcttccttttccagcgtcagacttagaatagaactaggctgaagtggaacaggtacaaggattaggtatatgccactgtctctgtcatgctgtattcaactgagaggactatggtcatgaaacaacttttctgtgaagaatcaattcttatccttcatcttttaggagagggtccaaaattctctttaggaatctattccctttctgtaaaaaggatcagtgtctcctgcccttaaaccaagctgctgataagttcccaagctccattaagttctgtctgtattttctgtccggagcctaacctagaggaaaaaggggagcagagaccagtgaggccagggctagttgggagaggggcaggggctgcctattgaaaggttttgaattttgcgggtccccaggcttcaatgaccttctggtcccaagtgactgattattctgaccaatgctgacacctcctgccttccgtttatgatcatacaaacgttccaattatgaaaa

SEQ ID NO: 11550 - DNA, 1393 bp, Homo sapiens
agtagccagtgtgacccagaggctcccggaggcccctgccggcttcctccaccagcgcctgcctcggcccctcctctgcccccgccagatcccgtggtgctggggatggggtcatcccagggctgcctccctccagcccactgcctcccctctgaggggcttccttcccctccatagggccaggcatttttttctggattcaaacaggcaacaatgaccttttattttctgtttgtccccacctccccagccttccacctcctgttcttcctaccttcttcctttttgactaaataatccccacctcccttgatcatacagtgaggctacagtgactgaggggagaatcccctcctgttcactctcccaaccctgctccagcccctcagcttcccagaccctcatgcagttggttgtaaattctcccaggagctgttttactgtctacttttcaggattaaaaaaaaaatcaaaacttaaaaaaaaaaaagtttaaaaagcaaaatggggagggggaggaagcagtgacttttttttggtaattatgcgcttttttttaatttttagaatttgtctttttactgtgggtgggctgttgatatttcatcaagataagcatttctttcctgagttcaggtgactgaggaagagccacaaaacaaaacacaacaaaaccaaaccacagaatcatctttaacccaactttttatacgatgccccagttccccataactttgcacacaagcttctgtgttcagttgaattgtaactgctttttgtatttggagagagtgactattgaacttgaaaccttttattccgggcgtcttggtagtttctggtgggattcagtgggtgagagggaagaaggggaggttggggggctccttcccttcagaacttgaagtttctcccactgcctcctctccagtggtctcccaggtgccagacccaaaagcttttcctacagtgataccctttatttttacttccccttgactcatatgttttaacatgattttaacaaactgcacttattaagaaatgtgtttgccctgttttgtttggtttcgttttgttttctttgaataaatgacatggcacctcctagcaggaaggaagcagggttgaaaccctgaagtgttactgcagttggccgttaattggggtgggggcctctttaaagggaaattatttactcattcattaaacaacttaactgagggattcatgtgcctggccccgattttggtgctaaaaatgcacgcttaaacaagggtccctggtttaaaatccactagttcatttttaaagtgcttctcttgttctctacctctcacagtctaaaatccctccaggagtttttgagtaaaggacatggaacaggcctcta

SEQ ID NO: 11551 - DNA, 1226 bp, Homo sapiens
ctcccctctcttctctcacctccctcttcctctctcacctcccccctcctctctcaccttccccctcctctctttcctccccactcctctctcacctgggttttctttccccaccttccatccccctccgatctccctgccacttttcattttttcagcccttcctccccttctctttcaagcccccctgccccctgccccccaccccccgcctcgctcctgcctcctggtgcccgtccctcaaccccccacccctctgctctgtgccctgggggccctgtcccccttacagctggggggcaggctctgcctcctgcccgtccttgtgccgctgctttggggaccctttggtgggtgcggggaggtgggtcaggttccatctgggcccacctctgaccctgtgcccctctctccccagaaggtggaagaggtgggtgcctgggccctgggtgggggaagggctagcccctcccccatttctcccagcccctcccctctccccatggccactccctccccttcactccctgtgaggggtgggtggggacatcaccctcccagttgaagagctaagtatggaaatcctccccaccccataacaccccctctgttgccatccccctgcctcagggaagggagggggtcagtcctatgctccatcctgggttccccatcccttcccccatcaaatttcagtatcccccctcccccaagaccccccactaccccagtgcccctaaaatcccaccactcctctgactctctcctctcttctgttgcatgtttgatccctgtcctggtcacccttgccccggtcctggtctctccctgtctctgtccctgtcctggtctctccccgtctctgtccctgtcctcgtctctccccaatttctgtccctgccctggcctctccccacctctgtccctgccctggtctctccccgtctctgtccctgtcctggtttctcttcgtctctgttcttgtcttggtctctccttgtctctgtccccggcatctgcctgactctgtccttggcctcggggtccaggctatcagggcgtctggggcgctcagagagcctgcgggtgagtgaccgccgccggccttcccggggcagcctcggggctaagggccggggtgggggccgctcccggagcgacgtggacatggaccccagttccgccacggcagtgcttggccctgcccgacgagccacgtatgtcaa

SEQ ID NO: 11552 - DNA, 1099 bp, Homo sapiens
aaggactatcagcggcgcctggacttgtcccaccttcggcagagcagcgaccctatgctgagcgagttcaaggtgtgaccataccctcctgcctcccccgcccccctactccttggcccaggggattctgtgatacagcccccagcctgtcctgcccatcccataatacacccaggaagcgagagctctgtcccccacctcatgccaatcccatgatccccagcctgtggtcatccccggccactgccctgcccttcccctccccaccaaccccaatcaccccctgccaacctgcacaaaccatcaccccctcctgccccagaacctggacatcaccaagaagaaattggtccacgagggcccactgacgtggcgggtgactaaggacaaggcagtgggtgagtgccagagcagctgcctagtgcagggtgttggggcagtgagccaagggcggggagggggtcgcgcgggggcacgccgtgtgagcactgctcgccccgtagaggtgcatgtgctgctgctggacgacctgctgctgctgctccagcgccaggacgagcggctgctgctcaagtcccatagccggacactgacgcccacgcccgatggcaagaccatgctgcggcccgtgctgcggctcacctccgccatgacccgcgaggtggccaccggtgagtgcagccactgcatggcccagggcagagggtgtcttttttgggcagagctgcctgtggagtggggagcagaaccctctagagagccagggagccagcattctagcaaagaggttgagaagtaggtggaggtgggcagggcggggccaggcctagagggtttataagtgaggtaggaactgctgcaggtgtttgcacagaggcgtgtcttgtgtaaacaaggagaagaaaggccaggagtccagtgaggagggatttgtaaacatactactaggaagttgcaccagggccacaaacactggaagcggctggagggtgggagtggctggaggggtttcgttaggtaagccagggtacatgcccgattccataaggaggtgtgagaggtggggctcaggaggacacatcgggccctggatattagc

SEQ ID NO: 11553 - DNA, 2058 bp, Homo sapiens
gggcttgtgccctatctccctgactatacactgggccggggcctgggttatgtctccactggctgtgggcacatgctgacctgcacccttcctccccacccggggtcatttctgggccctgcctcctctctccctgctctgtgttctgtccgggcctgtattatctcgagtgctgtcagtctcagccccttcaggaccttggctcttttatggccctagggagaagttgctgcttgaattggagtttggggaacccctccatccccagcccttgatgctgggacacagttgaggcctaggggacggagtcagtgtgtctggagacgtgagatgatgaggatggacatgcgatgagggtccgatttcaggcccaaggtgggctcctggagtcagtccatgctcctggcccctccccctccctacctctctctctctcgcctccctcagttgctcactctccgtgcatttctctctaactgtccacttctgtcttcccctctgtccccctccacccctgcccggcttcccctccagcagaaggcagacctggctgtggccgccttcaccatcacagctgagcgggagaaggtcatcgacttttccaagccctttatgaccctggggatcagcatcctctaccgagtgcacatggtatggttcccctggagaccatgggctgcttgcctggcatggaggctcagggcctgcgagtgggagccagacagccccaggacctcagatgggccggtcaggctcccaggtccctggtagggcaggggctgggtgtgaggctcaggccaggggtgtctccgggtctcactccctctccccacagggccgcaagcctggctacttctccttcctggaccccttctcccctgctgtgtggctcttcatgcttcttgcctacctggctgtcagctgcgtcctgtttctggctgccaggtgagtccactgcctactgggaaggaaggggctggaggaggcacgagccgaggcctctgggaccgacctgcctcttctctctcggaactgtccttggcctcccctttggggcctcggattccctgtgccctcctttctcagttttgtgccctgtgtctgagtctcattcttccccttgtggctctgactgtgctctgtggttctctgttcaggtctctccccttcccgcctctcccttttttgcctcctcccttctctatttctctctgagtatctctgtgtctctctctgcctcttctgtctccatctctgtgcatctctctctgccttttctctgtgtgcttctgtccatcttgctcctttttccatctctccccctttcttctgatcactgtgactttcctttgcttctttccttttcctccccacctgggctctgggccccatccacacgctgcacgtctctccacaggctgagcccctatgagtggtataacccacacccatgcctgcgggcacgcccccacatcctggagaaccagtacacgctgggcaacagcctgtggtttcccgtggggggcttcatgcagcagggctcggagatcatgccccgggcgctgtccacgcgctgtgtcagcggagtctggtgagaagctttctatctgcctctgcccggggcgagggagggacccatctgaggcctggatggggttggggctgtggcatctcctggaagatttgattccccgttttcccttgcagagctgtgtgacgaggaatggggtggggagagctgagctccagctctgccgcttactggctatgtgagcttggccagaccgcaaccctccctttgcctcagtgacctccctgaaagatggggagaaagatgcccatgtctcagggttgtgaggattcagtgaggctgctaaggaataaaagaatggctactccaattgcttgaactcaggaggcggaggttgtagtgagctgagaactccccactgcactccagcctgggcaacagagcaagactctgtctcaataaataaataaataaaagaatgactactccaaagacagagcagccctgagggctgctggttgcccatt

SEQ ID NO: 11554 - DNA, 1117 bp, Homo sapiens
tgcctcctgtgcagccgtgaatttggaaaggccttgcagctgacccggcaccaacgttttgtgcatcggctggagcggcgccataaatgcagcatttgtggcaagatgttcaagaagaagtctcacgtgcgtaaccacctgcgcacacacacaggggagcggcccttcccctgccctgactgctccaagcccttcaactcacctgccaacctggcccgccaccggctcacacacacaggagagcggccctaccggtgtggggactgtggcaaggctttcacgcaaagctccacactgaggcagcaccgcttggtgcatgcccagcacttcccctaccgctgccaggaatgtggggtgcgttttcaccgtccttaccgcctgctcatgcaccgctaccatcacacaggtgaatacccctacaagtgtcgcgagtgcccccgctccttcttgctgcgtcggctgctggaggtgcaccagctcgtggtccatgccgggcgccagccccaccgctgcccatcctgtggggctgccttcccctcctcactgcggctccgggagcaccgctgtgcagccgctgctgcccaggccccacggcgctttgagtgtggcacctgtggcaagaaagtgggctcagctgctcgactgcaggcacacgaggcggcccatgcagctgctgggcctggagaggtcctggctaaggagccccctgcccctcgagccccacgggccactcgtgcaccagttgcctctccagcagcccttggaagcactgctacagcatcccctgcggcccctgcccgccgccggggtctagagtgcagcgagtgcaagaagctgttcagcacagagacgtcactgcaggtgcaccggcgcatccacacaggtgagcggccatacccatgtccagactgtggcaaagcgttccgtcagagtacccacctgaaagaccaccggcgcctgcacacaggtgagcggccctttgcctgtgaagtgtgtggcaaggcctttgccatctccatgcgcctggcagaacatcgccgcatccacacaggcgaacgaccctactcctgccctgactgtggcaagagctaccgctccttctccaacctctggaagc

SEQ ID NO: 11555 - DNA, 1102 bp, Homo sapiens
tagcaccacccaccaaatgttcttttccagaaggtgaaagagaaagggcctgaacaaccttacaccaaatattcagtagcttcatccaaaggatgtacagaatttttagcattgtgctcaacagaatgtgtccctaccatgtgtccccttctcccctggcccccagctctccccacctgggcagggggtcttgctttaacctcctccctccccccagcaggggagagttcaagggaaggcctgcggacaacttttcatcccctgttcctccctcttttcccctttgaagggtgggctaggccattttgccaagttctagctctcacaagtccctcctcaaccctgtcaccctcctctgctctggaactgactccctccccagcctatgggaaggtggaaatttcaggcaagaggggatgaagacattcagttgagggcattcagttgtctttttccatcctgtctgtttccctgaaaaaaaaaaaaattcatattccagtgcctatccgtgggatccttcacgttctttgacattaaccagaaaccaaaaagagaactcacctcgcttttcccaccctgtgcccctctggtactggcgaatgcctctccctccccccacatgcacgcacgcacacaccccagtggtggggttcctcgagatggcatccccatcagggtccatgtggtggggacagtgccacagcctgtggtccccatctgagagggcgcggtggtggccaccactcccacaagacctccacaactcttggctggaccctgtgtttgaccagccccggacacgtctccactgacgacggacagaggagagacaccactgggagccaccctgccctcctgctattgtggaggccaacaaagttttgaaccgaaaaccaaaaaaacagaaacaaacaaacaataaatttaaactagaaaaaaaatttatatatatatataaacatatatatatatatatatataaaagggaaagaagatgaggactcttcaagaataagatggaaccgcgaggcggagccaagcccctgcaccggtggtccaggcccttgttccccaaggcggatggaaggacggatgcttcttt

SEQ ID NO: 11556 - DNA, 1160 bp, Homo sapiens
catgttggcgaggctggtcttggcctcccaaaataccgggattacaggcgtgacccgccacgcccagccagtagtccctgttttaacaagtccttcaagtgattgtggtgcacattaagagaaccaaggtttcaaatgggtttccccaaagctgtgggggcagcagggagagtgggcctggaagggctcttcaggccaagctggtggggtagtggtgctgtatggggaaagctgggctaaagttctgctatcctgtgcccgccgcaggtgtacatgtaccagctcttccgcagcttggcctacatccactcccagggcgtgtgtcaccgcgacatcaagccccagaacctgctggtggaccctgacactgctgtcctcaagctctgcgattttggcaggtgggcctggggcatgttgggtggctgaagaggcaggggggaccccaacccttgcctcacgtgtacccctgcccatctcttcccacagtgcaaagcagttggtccgaggggagcccaatgtctcctacatctgttctcgctactaccgggccccagagctcatctttggagccactgattacacctcatccatcggtcagagttatgggagggtggcggggggagtggcaatctgggaagttttggagttttctgtgtgctgtatgccaagcttggtgatgaaagcttaacttctgttcttgtatccagtcctcacaaacttaggaggctgatgctgttgaatgctaattttacagatgagcttagagctgtgaggccgcctgcccgcactggcaccactaggactgggcaggactgggatttgaaagctgacctgactccagagtccataccagctctggaacctccctgtcagccctctgttctcagctagggggaagggctgctggagaccttgggggaaccgggaagcaaggctttgccaccatgaaggtgcaacttgctcccagggcctctgtgtccttccctgtttgtggggacaactgccattttccaggcatgaggggaagtctgaattgagggaatgggcatgagagtttgaaagggcaccttccacagcagcatgacgaactgtggagtccttaggtatgaactcgtgctgtgggggtcaaggtacaaagcagggaggggtgagactgccac

SEQ ID NO: 11557 - DNA, 1874 bp, Homo sapiens
atcctctagtcctgccttagatgtgaggagagagctggtacccaccctctgggcacttgatttgtcttttgtggcctacgttcctcagttggcctttgggaaccacacctaagtgcgtgttaaggtgtggagtctagacctgggtcccacgtacctgaccttcccaatggcatttctgtacccacagctattactataacaagcgcattctgcacaagaccaaggggaaacggttcacctacaagttcaatttcaacaaactggtgctggtcaattacccattcattgatgtggggttggctggtgagtaccagggatggttggtgtggagagggtctacatgccccttcaggctaggccaggggccttgacactgtctcccttctgccagggggtgcagtgccccagagtgccccgccagtgccgtcgggtggtagccacttccgcttccctccctcaacgccctccgaggtgctgtcccccaccgaggacccccgctcaccaccagcctgctcttcatcttcatcttccctcttctcggctgtggtggcccgccgcctgggccgaggctcagtcagtgactgtagtgatggcacgtcagagctggaggaaccgctgggagaggatccccgcgcccgaccacccggccctccggatctgggtgccttccgagggcccccgctggcccgcctgccccatgaccctggtgtcttccgagtctatccccggcctcggggtggccctgaacccctcagccccttccctgtgtcgcctctggccggtcctggatccctgctgccccctcagctctccccggctctgcccatgacgcccacccacctggcctacactccctcgcccacgctgagcccgatgtaccccagtggtggcggggggcccagcggctcagggggaggctcccacttctccttcagccctgaggacatgaaacggtacctgcaggcccacacccaaagcgtctacaactaccacctcagcccccgcgccttcctgcactaccctgggctggtggtgccccagccccagcgccctgacaagtgcccgctgccgcccatggcacccgagaccccaccggtcccctcctcggcctcgtcatcctcttcttcttcttcctccccattcaagtttaagctccagccgcccccactcggacgccggcagcgggcagctggggagaaggccgtagccggtgctgacaagagcggtggcagtgcaggcgggctggctgagggggcaggggcgctagccccaccgcccccgccaccacagatcaaggtggagcccatctcggaaggcgagtcggaggaggtagaggtgactgacatcagtgatgaggatgaggaagacggggaggtgttcaagacgccccgtgccccacctgcaccccctaagcctgagcccggcgaggcacccggggcatcccagtgcatgcccctcaagctacgctttaagcggcgctggagtgaagactgtcgcctcgaagggggtgggggccccgctgggggctttgaggatgagggtgaggacaagaaggtgcgtggggaggggcctggggaggctggggggcccctcaccccaaggcgggtgagctctgacctccagcatgccacggcccagctctccctggagcaccgagactcctgagggctgtgggcaggggacctgtgtgccccgcaccccccatgcttcttttgctgccttaagccccctatgccctggaggtgagggcagctctcttgtctcttccctgcctcctcccttttccctccccacattttgtataaaactttaatttcttttttttaaaaatggtgggggtgggtgggtgcccagggctaggggctattccctgt

SEQ ID NO: 11558 - DNA, 1184 bp, Homo sapiens
gattccagacttgggtggagtctttgagggtggatgtgttgcctggaggccttgttggtacctgtttgagctggggccaagggaggcggattgacccctgcagcctgactggatttgggagccgcccatctttagctggccaccttggccttctctctctagtggcaccagggaccctgctctgcctccccactccttcccttcctcccctttccctcctcccacccctccattaccggctgcctggtgctgaattattgatggcccctgttgttgggaaatgacaacaaccgcagtccccccaccccccaccccccaccccaggctgcccaccccctccagagaccagccagcccaccgccaacctctacccaaggttaatgctgggggtgggcaggcaggtgggcagggaaggagctgaagatgagaaggcagaagtgggaagagggtgacagctccagggtgcctgctcaagctccaggcctgggctgggccctccagccaggtggggcctggatgcctgggtctggggagggcagtgtagctcagagggtccagggcttggggggcctctcagacagtctgggtttcactctccagggaagacagaagcctctgtgtgtgcaagcgctgacctcatcggcaaccgagtcaccccacccctcctggtccttttaagaaaaaaaaaaaaaatcttcctctcaggtcttggggttgggagtaggggctctgttgggtcttcggaggagacagtgcatgtttctaaggaggacatccgaggagctggggtggtgcaactggctctgaatgggagtgggggtaagctggggggctgtaccccaacccggctggccacgtgtgccccttcctgcccctcccccactggcagccctgcccgccagcctggcttggtgcctggccccctggcactggccccgggacccaccgccgacggtttcctgtttctcccggtgtcgctggagcgggctccagcttcccctcccccccagctcctgtctagcccctcacatgcagacagacagacacgcactgtcttctcttaaatcagatcttgacttggctgaggtgagacagatttccccatgttgaaggcagggcagaggtggaccctgggatgggacccagagccctggacttggcagcctgaccccaggccactccct

SEQ ID NO: 11559 - DNA, 1181 bp, Homo sapiens
cccctgggaacctgagaccatgctgaggaagccccctacaggccctgaggaagagcaggcagagcctggggccaccctgccaccctgccctgctgccctggaccccaaacagcccgaggatgctgaggtctctaagatcagctttggtggcaacctgggtactcactgtgaggagggcgaggagaagcaccctccagccctgggtaccccagccctgctcccactgcccccaccccagctcctgtcaccaccacccaagtctccagcctttgtgggccccggccgccctggcgagcagccctcgccctgccaggaggggagccagggcggcagccgcagcagcagcgtggcctccctggaaaaggggacagcaccggcagcccgggcccgcacgccactgacagccgcccagcagaagtacaagaagggcgatgtggtctgcacacccagcggaatacgaaagaagttcaacggcaagcagtggcgccggctgtgctcacgagatggctgcatgaaggagtcacagcggcgaggctactgctcacgccacctgtccatgcgaaccaaagagatggaaggcctggcagacagtgggcctggcggggcgggccggcccgcggccgtggcagcccgtgagggcagcacggagtttgactggggtgatgagacgtcgagggacagtgaggccagcagtgtggcggctcgtggagactcacggccacgcctggtggcccctgctgacttgtcacgctttgagttcgacgagtgtgaggcggccgtgatgctggtgtcgctgggcagctcgcgctcaggcacgccctccttctcacccgtctccactcaatcgcccttctcgccagccccatcaccctcaccctcaccactcttcggcttccgccctgccaactttagccccatcaatgcctcaccagtcatccagcgcactgcagtccgcagtcgccacctgagcgccagcacccctaaggcaggcgtgctgacgccaccagacctgggcccccacccaccgccacctgccccccgagagcgccactcctctggaatcctacccaccttccagaccaacctgaccttcaccgtgcccatcagccctgggcgacggaagacagagctgttgccgcatccaggggccttgggggcccctggcgcagggggtggaggag

SEQ ID NO: 11560 - DNA, 1168 bp, Homo sapiens
ttccgtgatgtctctgtgcatcctgactctctcaagtcctcagtgtctgtaccctcctccttctctgtgtccccacctctcactgtcatcttgcccatcctgttctcaccccaagttctgtgttccttgcttttgcttagagtcccacttgaggtcttggtcttcccctgccccagtctggggccacagctcaccctggcctatgggtgcccttctccacagatcatccagctgaccccggtgcctgtgagcacacccagcggcctggtgccgcccctgagcccagccacactccctggacccacctctcagcctcagaaggtcctgttgccctcctccaccaggtaattgcagctgagcccatactcagaggccagggaaggggtggggcggggccggcttacctcactcctccccatttcctctcctgcggcagaatcacctatgtgcagtcagcgggcgggcacgcgctgcccctgggtaccagccctgcgtccagccaggctggaacagtcacctcgtacgggcccacgagctctgtagctctaggcttcacctcgctggggcccagcggccccgccttcgtgcagcccctgctctcaggtgaggggcggcctggcaggcagtgctggggacccagggtggggctgaggcagtccgggccctaacttggtctcctgcttcttcttctctgtctttcagcaggccaagccccactgctggctcccggtcaggtgggcgtgtcacctgtgcccagtccccagctgccgcctgcctgtgcagcccccggaggtcctgtcataacagcattttactctggcagccctgcacccacctcctcagcacccctggcccagccatcccaggcccccccaagcctggtctacactgtggccaccagcacaaccccacctgcagccaccattctgcccaagggcccgccagcccctgccactgccaccccagccccgactagccctttccccagcgccacaggtaggtgtcagatcaacccagagcagagtgagttgggggacccaggggatgggctccagtcaggcctggctcagcaaacaattttctccccactagcaggttccatgacctacagcttagtggcccccaaggcccagcggcccagcccgaaggccccccagaaagtgaaggc

SEQ ID NO: 11561 - DNA, 1064 bp, Homo sapiens
ggccctgagaccatggtgagcgcctgcaggccgtggggctcccactgccacttggctgtgcctctccattgacgtctttgcttttctgtcctactcttctttccatgcctgtgtgtctctcaggttaaagggtcccctctgtcccttctgcctgcctgtgttgtctcctctcccatctgaggcccctgtcttggccttcctgaggccgtgtgacagccttctcaaggggtctgctgggcgggctcagatccaactctttgtttctggcctttgccccagagtctgagctcagtgttcgccatctccctgcccatctccaccccaggccagcaaattccccagctcatcttcagactggcgcgtccctgggcagggcctggagaatcgtggggagcctcccactcctcccagcccggccccagctccagctgtagcccctggtggcagcagcgagagcagcagtgggcgggcagccggggacaccccggagcgcaaggaggcggctggtactggcaagaaggtgaaggtgcggcccccgcccctgaagaagacctttgactctgtggacaagtgagcatgggctggggccttggtggagcgtgttagggtggcgggagtgggagcagctgcaggctgaggcgggggaggtgaccctgccggccctccagcagggtcctgtcagaagtggacttcgaagagcgctttgctgagttgcctgagtttcggcctgaggaggtgctgccctcccccaccctgcagtctctggccacctcaccccgggccatcctgggctcttaccgcaagaagaggaagaactccacgggtaggcgagcattgggcacccagggtccttaggtggagggcagactggggccacctgcactgagtctgcttctgtttggccagacctggattcagcacccgaggaccccacctcgcccaagcgcaagatgagaagacgctccagctgcagctcggagcccaacacccccaagagtgccaagtgcgagggggacatcttcacctttgaccgtacaggtgccgtggtgggcagaactttgggg

SEQ ID NO: 11562 - DNA, 1127 bp, Homo sapiens
cctgtgctccccaccgtttttctatctccagcccaggccacagccgccttccaggcccgctatgcagacatctttccctccaaggtttgtctgcagttgaagatccgtgaggtgcgccagaagatcatgcaggctgccactcccacggagcagccccctggagctgaggctcctctccctgtaccgccccccactggcaccgctgctgcccctgcccccactcccagccccgcagggggccctgaccccacctcacccagctcggactctggcacggcccaggctgccccgccactgcctccacccccagagtcggggcctggacagcctggctgggagggggctccccagccctcccccccacccccaggtccctccacagctgccacaggcaggtgagggacccctgagaagatgccaggacttatagtaccccctcaggacatggacagtatgtgggggcaggaaggttatctcctcccgggtaaagccatttcgtcctctccagtttggggcggaatgaggcctgctcctcttgtaaatacccccttccctcgaagctccctcccggtgctggggggcagctgaggggctgcaggggcagtctccctcctccaagcccctgtacataacctggagcgtgtgaccttcagagcttttcactttatgcaaaatggctcctgtgagggctgcaagctggagggtggtgcaggccttgggccacagggaggcgcctgtggaatagggggagttcatgcaccccttttttccccagaggggctggactcaggttagtttgggggtgggggctcctgcactttgccacaggcacggggagggttttctcctcaccccctctgccctcccaacttgggttgtactttctaagaaggtgattccccctgcccttgcccccttccccagaacaaaacatgttgatcatgtgcaatatttcttactgtgccgagaagccgcaatgagcgagattaaagctgtttaacacacctgtgtggctgtaggctcttaacagggagggctgttggttgtaccagtcctgtcctgagttgtcatggagcggtaggctttccatgaggtgggggcaacaattccagtaccactgcccccaa

SEQ ID NO: 11563 - DNA, 1147 bp, Homo sapiens
tcccagctacttgggaggctgaggcaggagaatggcgtgaacctgggaggcggagcttgcagtgagtcgagatcgcgccactgcactccagtctgggcgacagagcaagactctgtctcaaaaaaaaaaaaaaaagaaaacgaaagagggtaaaacccagaagtctcttgctaaatgagggctaggatgtgatatttaggaactaccctcccaccctccccacttgcccatccctagtgttttctgcagctggaaacttcatggtggtgggtggaggacaggttggcacagagaacaagatactcaaatgcttgtttccttactacgcctcgtgttcctgctcagggcctgcttccgcgaggccaacatcccaacccacttcgggagaagaaccgacaggtgaacgagctggtacgggcggcactggctggccaccctcgggcccacttcctagatgccgaccctggctttgtgcactcagatggcaccatcagccatcatgacatgtatgattacctgcatctgagccgcctgggctacacacctgtttgccgggctctgcactccctgcttctgcgtctgctggcccaagaccagggccaaggtgctcccctgctggagcccgcaccctaagcatcctgctgccttcccacaacattaaactctccttcctcagtgtgctgtttcctgctttatggtcgaacctgtctgggtatctgggtaccaccattagtccttatcctgatctgtgaccctgcagttctgcaaggtgttttttgtgtgagacagggtctctctccgtcacccaggctagagtacagtggtgagaccacagcccactgcaacttcaacctcccaggctcaagtgatccacccacctcagcctcctgaatagctgctactataagcatgtgccactaggtccagcttattgtattttttgtagagaagtggttttgccatgttgcccaggctgatctgactcctgagctcaagcaatccacctgcctcggcctcccagggtgctggcattacagacatgagccaccatgcctggctgtggttctatttctgcccagggcaggtatcactgatccattaaggcactgtgattcttgtggttaggttaatttccactatcacaata

SEQ ID NO: 11564 - DNA, 1192 bp, Homo sapiens
atggtctcgcctctccctccccccaccccgtgccgggtgcgcggcctgggagtcagcggcccgagcgggaagcgccgggcgagcccactgtgcggccgtcgtgggggaagcgaaggttcctgattccacctacctcctaagtgaaggcttccgtccctggagaggaggcggcgccctgtatcggccttcgtcctccgcgggtgtgctagcgttgggacggtcctttgttgccgcgaggggtaggagtgggcgtggcggagccagctccgttcggaacactcccgggccgacccgactcgctcatcctgcaggagctgcggcgccaagatgagtggagaggagaacccagccagcaagcccacgccggtgcaggacgtacagggcgacgggcgctggatgtccctggtgagcgttcccacctgggatattgaggagtccgggggcgcggggggtggctcaggagaacggctggttcgtgccactctcactacctgattgggaaactgagggcagttgaggaggcgctgcctaagggagcagggcggggcgggccctggagcgtgcatgccattgactccctctcgcgcgctcccgcagcaccatcggttcgtggctgacagcaaagataaggaacccgaagtcgtcttcatcggggactccttggtccagctcatgcaccagtgcgaggtgagggcagtccctctccccctgccccatccagccctgtgtccatgctgacacatctggaccagaacccaggccaggtgaggtattatgagagtacccagattggcctcaggcagcccgaggctctgagaatcttggtgtaaggtgcaacattctattgagaaagaaatgtatgccttggttttatcagattggatttgtgtataatgtactaagacctaaaatgaggctttcctgccataggcttgcctaaagtgaggctctttcttgtttgctttaagtagtgcgcagccctgttgggtttacacaaagctatagtcactttacaggaagcgaagggcaactctaatggcactccacaaagaggactcaatcataataatatctttccacaaagcatgtccaactgtaatgggtttcatcaaaataagtttcaactgtaatgccattgattcaatgcatggctcaagcagactggattttcatgaagtgagtcttgcttcta

SEQ ID NO: 11565 - DNA, 1155 bp, Homo sapiens
ttggagacatggtcttgttctgttgcccaggctggagtgcagtggtgcaatctcagctcactgcaacctcaacctcctgggctcaagtgatcctcctaatttagcttcccaagtagctggggccacaggtgcgcaccaccatgcccagctaattttttattgtttgtagagacggggtctttctacgttgcccaggctggtcttaaactcctgggctcaagcagtcttcctgcctcagcctcccaaagtgttgggatcacaggtgtgagccaccgcccttggccttgtttctgctgtcctttgaccctgtgtttctcctctttccctgcatccttctctgactggcatcatggtgtgggtctcttcctggagtctcctgctctctatctgtctgaatacaccatctttcctcaggctcggcctctgtggggcccccaatggaggagtctgtggcccatgctgtggcagcagtcgggagccgcctgtatatctctgggggtttcgggggagtggccctgggccgcctgctggcactgaccctgccccctgacccctgccgcctgctgtcctcacctgaagcttgtaaccagtctggggcctgcacctggtgccatggggcctgcttgtccggggatcaggcccacaggtaaccatggcgaccatgacaggcagtggggagtggagccctctaatgggggtcctgtgctaggccacaccaggatggaggcctcaggagtataccgtctggttcaggaaaggggtgaatcaccgcaggcagggtggccgggggagctctgagtggggatccctgcctgggactggggtctcatgcaagaatgcttgctggaggagctgggtctgaactgggccttaaaagaacggtagagttgagaccatcagtgattcagaagtgaggctgagaccggaagctggagggggtcagctcagaaagggcttcccatgcctggcagaggcactggctctgtccagctccacagatccttcagctgcggttccaggaatgcagacatcctggacactgaaagtgttttcttaggcttagcacagactcacttcgctgcccagtcaccctcactgatatgaggctattagttggccttatttgcccgaagggtgtgttgtcagttactacag

SEQ ID NO: 11566 - DNA, 1219 bp, Homo sapiens
cagccccacggctatgagtgcagctgcaagaccggctataccatggacaagtgaggccgcaggcggcgctggggccaggcaggctagggtgggagagtctgtggggagcagtaatggatgaggcctagagccaagcaggacagaagaaaagaaagctcgaggcatgaaggcagtgggattgattcctgaaggtcaagagtggtgaggctgagcagggaagagtgagtttcatagggtaccccaatggccgggcacagtggctgatgcctgtaatcccagcactttgggaggccgaggcaggtggatcacttaaggccaggagttcgagaccagtccacagggagaccccatctctacaaaaaaataaaaaagaaaatagggtaccctcaaaagaggagagagggttgtgggctacacctggagggggtggtgggctagatcctgaagagaagatagcaacgggacagagcagggatgagcaaccagttgagaagagggtggggtagttggttgggtgctaggccatgaagccacgaggagggtggccacctgccctgacccccactttgcccctgcagcatgacagggctgtgccgccctgtgtgcgcccagggctgcgtgaacggctcatgtgtggagcccgaccactgccgctgccactttggctttgtgggccgcaactgctccacggaatgccgctgcaaccgccacagtgaatgcgctggtgttggggcgcgtgaccactgcttgctctgccgcaaccacaccaaggtgggccgcccggagcctcagacccccgaccctgggacccaggccctcacttgccttcatcccacgctcaggcggctcgcatctcatcctgagccctgataagccagggacagataagccagagccctgtcccagggagatgtgtggagacttgggggacgctgcctgggtttggatcccagagggtctgccctggaatagtggacggagtgggtgctgcgccaggaggacaggcacgtggaggaggatttgagataatggagggaagggcttttgaactcagcactttgggctgcaggtgtgcaagggaaggcgggggctaaatcccgctgggattgtccaaaccaggtacccgagcctctgctgccctcccgtgggctctcagaacctgcccctgtgcccccaacgccctcctacccctgatgactctccagcctctctaactacc

SEQ ID NO: 11567 - DNA, 2329 bp, Homo sapiens
tccatgagcccaaacgccgggcgctaggccccggccgcactgtcctctttggcgtgcagcccaaattcaccaacgtggacatccgcctgacgctggacgtgaccttcggggccgtggacctctatgtctccacctcctatgacaccttcgtggtccgtgtggcccctgacactggcgtccatactgtacacatccagccacccccagccccaccacctccaccaccccctgcagatggtgggccccggggggctggggatccaggaggagcaggggccagcagtgggccgggcgccccagcagagccacgggtacgggaggtatggccgcggggcctgattacctacgtgacggtgacggagccgtcggcagtgctggtggtccgcggcgtgcgggaccggctggtcatcacctacccacacgagcaccatgccctcaagtcgagccgcttctacctgctgctgctgggcgtgggagacccaagtgggcccggcgccaacggctcagccgactcgcagggcctgctcttcttccggcaggaccaggcccacattgacctgtttgtcttcttctccgtcttcttctcctgcttcttcctcttcctctcactctgtgtgctcctctggaaggccaagcaggctctggaccagcggcaggagcagcgccggcacttgcaggagatgaccaagatggccagccgccccttcgccaaggtcaccgtctgcttcccacctgaccctactgccccggcctccgcctggaagccggctgggctcccacctcccgccttccgccgctctgagcccttcctggcacccctgctgctgacaggggccggtgggccctggggacccatgggagggggctgctgcccaccagccatccccgccaccactgctgggctgcgagctgggcccatcactctcgagcccacagaagatggcatggctggcgtggccacactgctgctccagctgcctggcgggccccatgcacccaacggcgcctgcctggggtcagccctcgtcacactgcggcacaggctgcacgagtactgtgggggtggtgggggtgctgggggcagtgggcatgggactggtgcgggccggaagggactgttgagccaggacaacctcaccagcatgtccctctgacatgcccagggttctcatccacagcagctgggtcacctgatagggccgccctggacttggggtccctccacctgggggcccctggacactgtctacttggagaccactggcccccttcccccagggttgcccagatggggcctcctttgttctgcattcagcagctatttatcgagtacctactctgtcaggcactgtcataggcgtggggcaaagcaggaaccaagagacgaggttccctgatctcatgggacttaggttctggtgaagggagacaatcagtgcacatgcacacaccccacacgcatacacacatgaacacatgcacatgtgcacacacaagtaagatggcttcagagagggagaagcactgtgaggcctccagaggatgtggcagtgagggacgatggggtgaagtcagctgggcattcaaagaagctagactgagaacgcctgagaagaaccagctacgggaagagctttgggaagcaaaggcagaggccctggggtgggagcaggcttgttttattggaaggaccagaaaactggtaagtgtgacccagatcaagtgtgaggagatgaggctggggatagtcaggggctggatcacccagggccttgtgggccccacatagggttttgggttttattctcagggcaatgggaagctgttggatggtttgatgaaggggagtgacaggatccgatgtacctatttaagaatttaagagggtcgggtgcggtggctcatgcctataatcctagcactttgagaggccaaggtgggctgatcacaaggtcaagagttcgtgaccagcctggccaatatggtgaaaccccatgtctactaaaaatacaaaaattagctgggcatggtggcacacacttgtagtccgagctactcgggaggctgaggcagaagaatcgcttgaacccaggaggcggaggttgcagtgagctcagattgcgtcactgcactccaacctgggtgacagagcgagactccacctcaaaaaaaaaaaaaaaatttaagaggtcactcagttgtgctgtggagaatggaccggagggacaagaggggcagcagggatggtgggctggagtagggtgctggcaatgagggagtctggctcagatgtgggatgtgtatggaagaatataaatgatggtgtgga

SEQ ID NO: 11568 - DNA, 1202 bp, Homo sapiens
ccttccgcctcctgcctctattacggatgtgggcactctcccttggtgagactttccttatcttgtgggtgctgtgggtgctacaagtctcaatgcccctccttgccactggagcatgttgctgagaaacacatctgggcaaaaatcaaggccttgtgaactggtagaactcttcacaagtggattgtggcctcctgtggttctgcccctgccccctctctggtactaacatgctgggtctggaccatacactctgagggaagtaaattccttaactgatccttaaactccccaccctccaactgccacctccttcagctagaatcacctgaagtcagctttgcatttccatggatcgctaactcttcttttgcttctccagctcaggaccactccaatgacccacctaacaaggtaagcatagccggttttcatgggcttattttctcatggaaatgattctgtgtagaattgattattcatgaagacacaatgtaacatcaagtttgggttaatgttcctcagtgcaacaacaaagacgtatttgtaatcactcccatgagtctactttgcagcaagaacatgcattttggaattattcccatcctgtgtctgaatactggatgtgactcttagtagctctgtgacccttgtcaagtaacttaacctctttgatcatcagctttgtcatctgtaaaatgggcattctgcctacttcaaagagaagttgaagggattaaacgagataacctacaaagagcacccagcacaatggcctaaaaaaggaaggcactgaatcattctcactcccctaccttcagtctgatcctgctcttattgtcaaaaggataatttcaattttaatagatctgagatcctgttttttaataataattttatagaatttttcattttatggccaggcacagtggctcatgcctgtaatcccagcactttgggaggccaaggcaggtgaaacacaaggtcaggagatcgagaccattctggctaacatggtgaaaccccagctctactaaaaatacaaaaaaattagccagctgtggtggcgggcgcctgtagtcccagctacttgggaggctgaggcaggagaatggcgtgaacccaggaggtggagtttgcagtgagccaagattgcgccattgcgctccagcctgggcgacagagggaaactctgtctcaaa

SEQ ID NO: 11569 - DNA, 1230 bp, Homo sapiens
ggttgtgcagctgctgttagatgttttctatgtcgtaagactctggagggaggtggaaactgaaccctcacccacaaagccagcactgtgtggagtgggagaagtttaggtggtggagacttgaggtcttagtccaagccctggaaccttcagctttgcataacctgggtgagctaagaaaagttgggccacctcccatcactgttaggatcctccctgtatcccagtcgaggagattgggttccaagaggctcagagtcacatctcaggtcataaaaggggcctcagtttctccacctgtcccgggttggtgctgggctggggggagccccggccaggcagccctgactgttggcctcctcacaggttccactacgctgcccggatctgggatggggtgagaaagtcctctgctctggcagagtacagccgcctgctggcctgaggccaaggagaggaatgtcatgcaggggacctcctgggtccgcagtgtactgcgagggagcacagatgtccatcccccgctggggtggagagcggcagcaggcctgatggatgagggatcgtggcttcccggcccagagacatgaggtgtccagggccaggccccccaccctcagttggggctgttccgggggtgactgtgagcgatcccaccccaaacctgagatggggtagcccgtcctgtgtcctccacagggacaagcagtgggaggagtctgaatggtcaccaggaagcccgggctccatcttgacctcctttttcagggacaggagcaacaggcccctcttccctgactctaagcccttccctgtaaggtgaggcagggtctggagagctctttattggaacagatctggtggttcaaataaacacagtcatgcaagcctgttcttatgttccacttactcctctacccaccatgcagctctgggaagcaggacaaattggacacccagcccttgcgggcagatggagatcagtctctgctaagaagtccctagaaggggttattctgtttcctggggtggcatcaagcctcccctgtgtatgttttggatgggaaaatacactggtgcagctgagtacagcaactaccctcgtgtcttctgctctcacttaaagacagttacctgcctttgggttaaatgcccagttaaatacagtgcctaggctgggcatggtggctcacgtctataatcctagcactttgggaggccgaggcaggc

SEQ ID NO: 11570 - DNA, 1178 bp, Homo sapiens
tgcctggactcctgggtctgatggaggagggctgcgggcctgggatccggggtctgatggaggagggctgggtcctgggctcctgagtctgagggaggagggctggggatctggactcctgggtctgagggaggagggctgggggtctggactcctgggtctgagggaggagggctggggtctggactctaagtagcgaggtgctccaggctcctggttcctggggaagaagggctctggggcctcggactggttgttcctgagagggagggggcctaaagacctcctagtgaggagggagggggctggggacccagaattcaggtactagggaaagaggaggttggaggcccagtcttctgggtcctggggaaggaggagcatggggcccggactcttgaatctgagacaggaggtgtctcaggtttctgttcctggggaagactgcaggatgaggaataagggttcagaaaacctgggggaggcaggactagagagcagggctggacacaggtccctcacagtcactgttccccagacaccgctccacctggctgtgatcaccacattaccgtctgtggtccggctcctggtgacagctggtgccagccccatggcgctggaccgccatggccagacggccgctcacctggcgtgcgagcaccgcagcccgacctgcctgcgagccctgctggacagcgcagctccgggcacgttggacctggaggcccgcaattatgacggtaagcatttaccgcggggcaccgctgggctgtccagcggacctggagtccatcagcggccgcaaagcccgggcctaggtttcaccgagccctcctctccctcagggctcaccgccctgcacgtggcagtgaacaccgagtgccaagaaaccgtgcagctcttgctagagcgcggtgccgacatcgacgcagtggtgagcgtgcactaggagctgggagggagcggggccttagcaggggcggggtcttggcgggggcggggccagtgtggggctggcgtgggagagcacccgggtggggtggggcttggagtatcagacccaagagagaggctggaccccgcgaatgggatgtggacgggatgcgggtcgccggctgctggagcagagcttggagaaactaagaccttccctccccgccgcaggacattaagag

SEQ ID NO: 11571 - DNA, 1175 bp, Homo sapiens
agctgggacaagacaaatcaagtcactcccctcagtggtctactggaggtcaggggtcagacactgaggttgcgctcaaggttcaaaggactgtttagagcccaaggttaagtatttgaggtcaagactgaggtgaaaggttcatggggaaagatttgcagagatcgagtgtcaaaagtgagtcccaggattaacagggtgagttgcacgagctgggctttgggttaaggaagggctgaatgaatgtcccagtgcaatatggcctcaggggacaaggagtgaggtggcatcttgttggcatggggagagagcggtcaggattttggggtcaagagcagattggtaatctgtgtcgtgcgtaggaagtgatcttgagttcctgtcctctctctacctccaggaaatgcctcgataccatgagctgcccaccttggaagaacggtcaggacccttgcaccctggagccacaagcctggggtcccccatcccggtgcctccagggccacctgctgtggaagacgtttccctggatctagaggatgaggagggggaggaggaggaagagtatctggacaagatcaaccccatctatgatgctctgtcctatagcagcccctctgattcctaccagggcaaaggctttgtcatgtcccgggccatgtatgtgtgagctgccatgcgcctggcgtctcacatctcacctgttgatcccttagctttcttgccaaggatctagtgccccctgacctctggccaggccactgtcagttaacacatatgcattccatttgtgatgtctaccttggtggctccactatgacccctaacccatgagcccagagaaattcaccgtgataatggaatcctggcaaccttatctcatgaggcaggaggtggggaaggtgcttctgcacaacctctgatcccaaggactcctctcccagactgtgaccttagaccatacctctcaccccccaatgcctcgactcccccaaaatcacaaagaagaccctagacctataatttgtcttcaggtagtaaattcccaataggtctgctggagtgggcgctgagggctccctgctgctcagacctgagccctccaggcagcagggtcccacttaccccctccccaccctgttccccaaaggtgggaaagaggggattccccagcc

SEQ ID NO: 11572 - DNA, 1189 bp, Homo sapiens
gcgatgcctcagcgggcgtggcaaaatgctcagcacagaccaatggcgggttagcaccggaacccgcggcgacgcgagccaataggcgcaggcgctgcgagccaatgggaagggtgggaggggcgccgtggctaccctgcgagtgagaaccaatacaaaaggacatttcagggaaagtgggcgggactttatgcacaagtccaatgggaagaccgagtcttgacgctggtgggcgggcctcagggcacactaaaccaatgggctaggtggggcggggcgacggtggtggcggcggcggcagcgggttcggttgcgcgtggcgcacggggtgggagcggagcccaggccgggagcaggcgccgccgccagtgagaaccggggccggagccgggtgcggatttgctggggctgagtcgggggcgcgcgggccctgacctctgccctctgacctctcccctagcaggcgaccatggggaacgtgttggctgccagctcgccgcccgcagggccgccaccgccgcctgcgccggccctcgtggggctgccgccacctccgccctcgccgccgggcttcacgctgccgccgctgggaggcagcctgggcgccggcaccagtacgagtcgaagttcggaacggacccccggggctgcaaccgccagcgcctcaggggccgccgaggatggggcctgcggctgcctgcccaacccgggcacattcgaggagtgccaccggaagtgcaagggtgaggggcgaggggcccccgctgggctgcgatggcctggatctcgggggaagggggaggacactggggactctgggatttggcgcgcaccattggaattatttaacagcactaggaggtgatgttgggatcgaatggtggaacgttggacttggggcttagaatgatggaatcaaatgctggaaacgggatggaatgtcatagcagtagagaaaagcctttagggacctgaggagccccgggatcagccaagccagacttctcttgtgatcgggaaggcaactgaggcccaaggtcacggtgtcagcaaggtgtcagcgaggttccttgggtatgggacccaaagcctccggatcccagcctggagcaattagagtagtagtagtggtggagatttatggagttctgttctggtgttcattatacgttaactcattagatccttg

SEQ ID NO: 11573 - DNA, 1261 bp, Homo sapiens
aggccatgctcggccagagcaccgaggagctgcgggtgcgcctcgcctcccacctgcgcaagctgcgtaagcggctcctccgcgatgccgatgacctgcagaagcgcctggcagtgtaccaggccggggcccgcgagggcgccgagcgcggcctcagcgccatccgcgagcgcctggggcccctggtggaacagggccgcgtgcgggccgccactgtgggctccctggccggccagccgctacaggagcgggcccaggcctggggcgagcggctgcgcgcgcggatggaggagatgggcagccggacccgcgaccgcctggacgaggtgaaggagcaggtggcggaggtgcgcgccaagctggaggagcaggcccagcagatacgcctgcaggccgaggccttccaggcccgcctcaagagctggttcgagcccctggtggaagacatgcagcgccagtgggccgggctggtggagaaggtgcaggctgccgtgggcaccagcgccgcccctgtgcccagcgacaatcactgaacgccgaagcctgcagccatgcgaccccacgccaccccgtgcctcctgcctccgcgcagcctgcagcgggagaccctgtccccgccccagccgtcctcctggggtggaccctagtttaataaagattcaccaagtttcacgcatctgctggcctccccctgtgatttcctctaagccccagcctcagtttctctttctgcccacatactggccacacaattctcagccccctcctctccatctgtgtctgtgtgtatctttctctctgcccttttttttttttttagacggagtctggctctgtcacccaggctagagtgcagtggcacgatcttggctcactgcaacctctgcctcttgggttcaagcgattctgctgcctcagtagctgggattacaggctcacaccaccacacccggctaatttttgtatttttagtagagacgagctttcaccatgttggccaggcaggtctcaaactcctgaccaagtgatccacccgccggcctcccaaagtgctgagattacaggcctgagccaccatgcccggcctctgcccctctttcttttttagggggcagggaaaggtctcaccctgtcacccgccatcacagctcactgcagcctccacctcctggactcaagtgataagtgatcctcccgcctcagcctttccagtagctgagactacaggcgcataccactaggattaatttggggggggggg

SEQ ID NO: 11574 - DNA, 1133 bp, Homo sapiens
gggtcacacatggggcaggggaactgggaacggtggggaagggcaggggctggttctggcttgtggggtgggagccagcgtagcaactgaccatggcacccacctcatccacagctggaccgagagcacagggtggcaggaatcttcccccgcctatccttcaaggacaagtccacgtatatcgagtcctcgaccaaagtgtatgatgatgtgagtgtcctgcacagtgggcccctgggggtggtctccaggtaccacgtatccctgaggcacccggggccggccatctgtctgccggacccatgctttacagcctgtgccacatcctctgtgtcccccatctgccataactgcttccctgggcgagtccggagtccccagggctacctggaaattccccctgcccggcctgccagaccaggtgtggtgggtgagggcggggagcagggctgccaggcagggctgaggagctggctgacagccccaccctgtggccccacagatggcattccggtacctgtcctggatcctcttcccgctcctgggctgctatgccgtctacagtcttctgtacctggagcacaagggctggtactcctgggtgctcagcatgctctacggcttcctgctgaccttcggtgagcggtccggccgccccaggagagagcaggccccatgctgcgcagggctcacagccccagtgtaggagacagacccatccccagacagggacaacctagggtgggcagagctgggatatagggaggcccgagggcacacatggccccatctggggtcagagaggacttcagggaggacatgaacagtacgcttcagtcctcattctcagggggcctttgtgtcttgggaacaagtaaacaagtagggccaggtgcagtggctcacacctgttatcccaatgctttgggaggctgaggcaggaggatcacttgagcccaggaattcgtgaccagcctgggcaacttggcaagacccgatctctacaaaaaaacacagaaattattggggagtggtggtgcgtgcctgtagtcccagctacctgggaggctgaggtgggaggatcccttgagtccaggaggttgaagctgcagtgagccatgattacgccactg

SEQ ID NO: 11575 - DNA, 1188 bp, Homo sapiens
ggccggcggcggggggcggggtcccggcgccccgccctgcccgcccctccccctgacgtcccttcctccctccccagcccctccaccgcctccctccgccgccgcttgggccggctccgcgccccctccgcggcccccgcccgcccgcctgcccgccgcccccatggcgcccggggtccccgctgcacggggccactaggaccctcggcgtcccttcccctcccccgccctgccccctctcccgccgcgcggacccgggcgttctcggcgcccagcttttgagctcgcgtccccaggccggcggggggggaggggaagagaggggaccctgggacccccgccccccccacccggccgcccctgccccccgggacccggagaagatgtcttcgcggacggtgctggccccgggcaacgatcggaactcggacacggtgagtggggcccggccccttggggagccctggctgggtccagccgccaaacccttctccccgttgtacccctcgccccgcgagcccctaccctcgtttcctgggcccgacccggctcgtcacctctcgacccctcccggacttccaggcctctccaccctccccaccttttccagcccagcccgacccctgggggcgcccctctctcgggacccctctcttgtccccgtgcagaccgcttccgctcgggtctgttccctccaggaagccccttcccctgcttccaggagcccctcccttctcttgcctgtgctaagccgtttcccctccaggccgtccgcgtccgacacctcgccccctcccggatttgcagggcccctgaccccccaaggcccggccctggcactctcagcagggcctggcccagtcctgcctctggctccggccttccctgtctggggctgggtgccggctccccaggagcccccctcctcttattcccagccctctgcccctccaggacgcacccagggcgcctgtgggcagcccctggcaggaagctggtttccacctctcctgggccccggcccttttctggcttcttcaaggtctctcccgtcccaggcctggtccccatcttccaagcagccctgtccctagatcccagcaccccggggcccccagatgccacctggaccctttctggtctcttcctctcccaggaagccttggcctccaacttctaggccctcac

SEQ ID NO: 11576 - DNA, 1367 bp, Homo sapiens
tcctgggtgctggcgctgagggtccgaggggccttgtccaggtgccagctgggaaactggagacaggcacaggggatggttggaggggaggtgaggggcaagtgttacatccaccctccagctccaggtccagcctggcagccaactatccaaccccctcgcctctaccccaagtaaaacccatctttgctcctgtcctgggtctcttctgacaccaacccaccacctgctgactccaccactggcccgaccgccctgcctttgcctcatctctgcacctacccacatggcctcctctatttttgacccagatgtccccctcacctgagtcccaggagcccttggagcatccacgttcagtgtgttgagtgacatggctctcttcattctgcaaagagggcagcagggaggaaatgagtgaatccaggagtggcccccctccacgagggacctttccagcacagggtttgatctgtgtgtatcacaggggagatgggagccatggaaggttcttgagcaagatgggggtgggggtggggtgggctgtggattctgctgatgtcagggctctttgccgacctgatcaacactcacccggctgctcctgccgccgcctcgcctcggagccgggagaccagcttctcacttcctcgcctgatagactcacggatcttggagagtgagctgctgcggcgaagggcctggggaggggccggggatgctgctcagtcccccaggcccatgcagtccccacgcccaccccaggagccgaagcacagcccatcctcacctgttctgcgtcaccagctgtgcctgtgttgggggcacctagggggaaagatgggggacactgagatggggacatagagaagccaccaggagggaagacagacaggggctaggggctcaccgagaggggcgggtaggtcctccttgtggaggatttctttgtacagctcttccgcttgttgatacttgttctgtttcaggtaggctgaggcctgcggagaagggagtgtctgggaacttttcggaccccagttcccaacactgcatccagtcccgcctttttttttttttttgtagagacaggggtcttggtatgttgcccaggctggtcttgaactcctagcctcaagtgatcctcctgccttggcctcccaaagtgttggggttacaagcgtgaaccaccacgtctggccccactttctaatgtgctgacctggccgtatccttcccctgcctaaagccttgccctggggcagagtgggtttggagctcggccttacttcctgccctggggatggaggacaggcagcctcctgtttctgagcctgtctgctgtactttgggctggtggcatggcc

SEQ ID NO: 11577 - DNA, 1254 bp, Homo sapiens
ctgcaaagccatttctaactcttgggcccagaaaggatcaccaatttccctgtcattctccgttagactattcgctactgagacgatttttttttttttttgagacgaggtggaggggcgggggttctcgctatcttgctcaagctgatctcgaactcctgggttcgatcaatactcagacaatcttggcaggcgcaggaggaccaaattctagtgaatgagatcgagtctctcggctctttcccttccatgttttctttttgattggccctcgacgatcctcagtgacgcctcccgcaccgcctcacccgagagtcagccgccctcgcttttccgtgcgcacgcgcagtatcccgattggctctgccctagcggattgacgggcaggttagccaatggtctcgtaatataggtggagcgagccctcgaggatgtccacgacccggcctctcgctgaatattcatgagggaggcgggtcgaccccgctgcacagtccggccggcgccatgaagtgagaagggggctgggggtcgcgctcgctagcgggcgcggggggtcttgaagatggggtcatcggtgggcgcgcctgggtccccaagggggcgaggggagggtgaaggggtgggacgggggcagccgcagggagcagcagtgatagcgaggagacactgagggggccccgaggctcctgaggacctgagggttaccgggggcgccgggcccgtcacccttctctgggctcgacgaccgggcactgtggaggcgggagaggggctgaggggacgggaactgacccagcagcccctgccgccaggctcaacgtggacgggctcctggtctacttcccgtacgactacatctaccccgagcagttctcctacatgcgggagctcaaacgcacgctggacgccaaggtgggtggccggtgggcccgacccgcccactcgaccggtggggctgccacgcctgggcctaagacagattgcaggacgtctggattttagaagtccgaggtccctgggaatccaggaccccataatcttccgttatctaaaacaataatggtgaataggctgggcgcggtggctcgcgcctgtaatcccagagctttgggaggacgaggcgggcggatcacttgaggtcaggagttggagaccagcctggccaacacggtgaaaccccgtctgtactaaaaatacaaaaattagccaggtgtggtggcgggcgcctgtaatcccacctactcgggaggc

SEQ ID NO: 11578 - DNA, 1168 bp, Homo sapiens
cacaaagcagtggtgagattacaataaggtaggcatgtaaagcgccaggcacatactaactgctcaataaatgggaggcatcataattgtatattattcacagcccaaggaaagtgtagcccagagagggcaaggaacttccctgaggtcacacagaaaatcatgtgctggttgtatgccctggaagttgtggagagggagtgttgggtgtctcctggggacctgtcctctgatgggctcttgttccggctaggaccccccaaaccccccaccgagctggagcctgagccggagatagaggggctgctgacaccagtgctggaggctggcgatgtggatgaaggccctgtagcaaggcctctcagccccacgaggctgcagccagcactgccaccggaggcacagtcggtgcccgagctggaggaggtggcacgggtgttggcggaaattccccggcccctcaaacgcaggggctccatggagcaggcccctgctgtggccctgccccctacccacaagaaacagtaccagcagatcatcagccgcctcttccatcgtcatggggggccagggcccggggggccggagccagagctgtcccccatcactgagggatctgaggccagggcagggccccctgctcctgccccaccagctcccattccacccccggccccgtcccagagcagcccaccagagcagccgcagagcatggtaagtaatacaggaggaaaccggggtatgtttgctacatgaatccaggagctgtagcaaagagccccccaaatatagtggcttagatgagatcgaagttttctcctcttttgagtagaagtccaagagtttgcagcccaggactgtaggcacctcactggagtcaggacccaggctctatctacctggggctctgccatccatcggggagtaagcctgccttcatggtcctagatggctgtcaccaagtctgccctccagccaggaagagagaaagaagaagagaaagtgccctttcctgtttcaggcagaacctgggagttccatacatcactctgcctgctcccactggccaggagcctcattgcaatgggatgctgggaaatgtagtctttaggatagctgtgtgtgactatatggagggccatctgggagtcttggccacatagagatg

SEQ ID NO: 11579 - DNA, 1211 bp, Homo sapiens
caggcagctctggcagctcccaaaaagaagacgaagaaagaaaaacagcaagatgccacagtggagccagagacagaggtggtggggcctgagctgccggatgaccttgagcctcaggcagctcccacatccaccaagaagaagaagaagaagaaagagagaggtcacacagtgactgagccaattcagccactagagcctgaactgccaggggagggacagcctgaagccagggcaactccgggatccaccaagaagaggaagaagcagagtcaggaaagccggatgccagagacagtgccccaagaggagatgccagggccgccactgaattcagagtctggggaggaggctcccacaggccgggacaagaagcggaagcagcagcagcagcagcctgtgtagtctgcccccgggaaactgaggaactaaagaaagctgaaggtgcccacctgggccaccagaaggtgacacccccagaatccctccccagagactgcaccagcgcagccagcaggagcctggcctgggaggacgatttattattacactgggggtttccttggcagctggggtcatcagggtactttcaagaagggctcgtgcaggacatcaaacagcctccgggcctggatgggagggagaaaaaaatgaggaaccagtcattaaaggagctgtttcctgggtaaatctagagtggggttttggttctttattttcccctataccctcaagcatttatccattgagttacaaacaatccagttacaatctttttaagttattattattattattattttttttttttttgagatggagtctcgctctgtcgcccaggttggagtgcagtggcgcaatctcggctcactgcaagctccgcctcccgggttcacgccattctcctgcctcagcctcctgagtagctgggactacaggcccctgcccagctaattttttgtatttttttttagtagagatggggtttcaccacgttagccaggatggtctcgatctcctgacctcctgatgcgcctgcctcagcctcccagtgctgggattataggtgtgagccactgcgcctggctaagttattattatttttttgagacagtctcctggtgtcacccaggctggagtgcagtggtgtgatcttggctcactgcaacctccgcctcctgggttccaacgattctcctgcctcagcctcc

SEQ ID NO: 11580 - DNA, 1167 bp, Homo sapiens
tctcctggggtaatgtccccttgaaaaggctgaggaggcaattccaatgtaggccactaggtggagggcaggagctggcttcgggctcttggtcagtttcccacccagctttccccgttgtccccagatgcccaccccgcgtctcttgccccacctcgtgatcccacctgtttctccttcaggatccgagctaaaatcccagggaccggagccctggcctctgcagcagccgcagtctccggatccaaagccaaagccgaatgagaacggtgtctctgcccgcaggacgcctgcccccagcccccgcagccctctggccccctccatctcttgtccgttcccacccacccccctcctcggcccgagccttttcccggtgggtgtcaggatcactcccactagggactctgcgctaattacctgagcgaccaggactacatttcccaagaggctctgctccaggagtccaggaaagacgaggcaccttggccgcggggcctgctgggacttgtagttgcctagacagggcaccaccctgcacttccggacccgccgctggaggcgccgtgaggcgttggtgtctcctggatgctactagccccaacgccggggctttgcatggggcccaggggaggcctgagcttggatttacactgtaataaagactcctgtggaaaacccgaggcctcttgtgcttccagaaccctccagttgttcacctttctgcactgaaaggcacttaagtgacactccaggagaaccttccccatctctggagaaggagctccctctgccatctgtgtaggttatgaaatgattgaggggaggccgggcgcagtggctcacgcctgtaatcccagcactttgggaggccgaggagggcggatcacttgagaccagaagttcaagaccagcctggccaacatggtgaaacctcatctctactaaaaatacaaaatttagccgggtgtggtggtgcatgcctgtaatcacagctactcgggaggctgaggcatgagagtcgcttgaatctgggagatggaggttgtagtgagccaagattgcgccactgcactccagcctcggcgacagagcgagattctgtctcaaaaaaaaaaaaaagaaagaaatgattgaggggaagatgctgacagaccacccattcca

SEQ ID NO: 11581 - DNA, 1351 bp, Homo sapiens
ggttttagagtctgtgtgcagaatgttctaaaaatcccgtgattcaaatattctaagattccaggactgggacacttctgtgattcggacagtctaagcttctaagagtcttcgattctttccctctcgcagaagaagctccgtctacagcctcctcaactcctgattccacagaaggtaagtggtggggagcatgtgaaggggctcagggctgggcagctcagggacctgctgagggaaacaaggctctccttcacccactgcaggagggaacgacgactctgattttcgagagctgcacacagcccgggaattctcagaggaggacgaggaggagaccacgtcgcaggactggggcaccccccgggagctgaccttctcctacatcgcctttgatggtgtagtgggctccgggggccgcagggattcaactgcccgccgcccccgcccccagggccgctcagtctcggaaccacgagaccagcaccctcagcccagcctgggcgacagcttggagagcatccccagcctgagccaatccccggagcctggacgacggggtgatcctgacaccgcgcctccatccgagcgccctctggaagacctgaggcttcggttggaccatctgggctgggtggcccggggaacgggatccggggaggactcttccaccagcagctccaccccgctggaagacgaagaaccccaagaacccaacagattggagacaggagaagctggggaaggtgagatgtccgaggtgctgggaccaaagccaagaggggtgggtggtttctccttggggcacctccaagaagaaagctcacggcctcctctctctaccgtatcagaactggacctacgactccgacttgctcagccctcatcgcccgaggtcttgactccccagctcagtccgggctctgggacaccccaggccggtactccgtccccatcccgatcgcgagattcgaactctgggcccgaagagccattgctggaagaggaagaaaagcagtgggggccactggagcgagagccagtaaggggacagtgcctcgatagcacggaccaattagaattcacggtggagccacgccttctaggtaagcaacgtgtatgaagatgctgcattggcccacagaaggcaaaaggtgagaggattttgaattaaagggaccaacctcgcaaaggaacagtacatagtggaaaagggaagagatagacgtgatatcacatctggctagacgtgataaactccgctttttaaaaaaatttccccggccgggcgcggtggctcatgcctgtaatcccagccctttgggaggccgaggcgggcggatcacttgag

SEQ ID NO: 11582 - DNA, 1134 bp, Homo sapiens
gatgggatttcagggagaaaatctgagaccacttgcttaacttgagggtcctcctcgacccccaaaattgagcggagtacgagatggagaagtcgatggggaaagaaatcgcgccccttccgagaccctcctcagaattcccacagtgggagcgaactaggaagcaagggaggtccccttccccttcaccaacttgcccctcaggtgggggtgattcccagggtgcacccctgggctacaacattggggagaggagcgagatcgcggaagccgagggtgcagagttgcccttttaagcgccctccaccccctcgcctggaggcgcacgcggcccctttaaggcgcggggcattgtgggtgcggggagtggaattttggaacgaaatgtaacgaagagaagtacagtagtaagagtaacactgtagccgccaccggcaaggggtgcgcgctggggagcggacgctgcatcccctttctgctgcaggaacctctcatcagaccgcctgagggaagcggcgcccggagacccgccccggcccggtccacattctccccaggaagccggactctatggggcgggaccctgggggagcctgagccgagcccggagccagccccgaacccctgaacctccagccaggggcgccccgggagcagccagcccgtgggcgagccgcccgcccgccgagcagccatgaggtgagccggacctgccccccgacccgtccccgcccgggcgggctccgcgccccgcctttgtccccctcccccccagctagctccgggctggaatttggggacagatccttgggagcctcggatttgagctgaatccccttggacgcgccccagaaccgtcgatcacttctccacgactgactccccaagctcggggggtggtggcggtgaggttctcctgggagccctcaagatttgggggcgctcggaggactcccgaattgttaagactttttttagaggacctcaaagttggcagcgactccccgcagggatgccaggattgaggcagggctcagactctcctccccctccccccagacttcagctcgaggtccgggaaggattgtgggggaccgatttgggataccctgggacttggaagagagactgaga

SEQ ID NO: 11583 - DNA, 1517 bp, Homo sapiens
atttctcagggacccagtcgaatccaagcccatggattcaattgtcacatccttcatcttccatccgtgtctcctaatctgtgtgctcttgctttctttcctcggagctctggactgacccgacagcctgtcttcatgtagcagtaccctcctgcctccatagcccccggtcccacccccatcctaccaattaggccagcagttggccttaactgcttgattaatttccttggactgccataacagatcaccattgggtggtgaacttgatggcttaagtccaacaggaatttaattcacacagttctggagtccagaagtctgaaaccaaggtgctgacagggacacgctccctcttccagctcctggtgattccaggccttccttggctctgcctgcagcttcacatggccttttccctcttctattttgtctcttacaagaacacctgtcattgcatttagggcccatcttaagttcaggatgatcccacctcaagacccttaattacatctgaaaaaacactttttccaaataaactgtcataagcacaggtcctgggggttagtatgtggacttgtctgttgggggcacaccattcaagccattcagcccactattcctcctcaccccaagagtacgctggcgtccaggtgcagtggctcacacctgtaatcccagcactttgggagaccagggcaggagggatctctttgagcccaggagctgaagaccagcctgggcaacatagtgagaccccatctctacaaaagtaaaataaaaaattagccaggtgcggtgatgcatgcctgtagtcccagctacttgggaggctgaggcaggaggatcacctgagccctggaggtcgaggctgcagcgagccgtgatcgcgccactacactccagcctggatgacagagtgagaccctttctcagaaaaaaagtaccctgggactcctgccaaccccgcgggccatttggccttcctgctagctgagaggaacagtctaggaaccacccttttctactgggtttctcttccaggatctgccactgaagcgggagggggtgggtcccagtagcctgcagtctgtccttccgactgtagctctctcattagaggagctgcaaggtgatgaaggcatcctgaggctgtacctgaaccaccatgtggatctccacaatgggtacagagcttattaaaatcaggagggaaactgggagggttctgatggggagaggcccaagagtcaccctatgagctggggaaactaaggccaggggtaagcaaagggacttgccagagatgccacagccagtgaggggctgactgcccagggtggtgaagtagtaggggcagagtgagaggcttggattaccccagctgcagagtgaggagggagaggcgatggctgagcagaggctgggagggtgacgatctctacacagaggcccagaccatcccagaggtggcgttgatagtgggagaccctctctatcccctctcagagcagccc

SEQ ID NO: 11584 - DNA, 1181 bp, Homo sapiens
aatgtctggctgggcacggtggctcacgcctataatctcagcactttgggaggtcgaggcgggtggatcacaaggtcaagaaatcaagaccatcctggccaacatggtgaaaccccctgtttactaaaatacaaaaattagctgggcgtggaggtggtgcatgcctgtagtcccagctcctcaggaggctgaggcaggagaatcgcttgaacccaggaggcagaggttgcagtgagccgagatcacatcactgcgctccagcctgggcaacagatcaagactccgtctcaaaaaaaaaaaaaatgtctgttaggcatctagctgatgatactcagaaggctgaacaggaggacagatgtggtgggacaaggttggggagacactgaagccaaggccctgatcacccatcctcacagctccagcctctcaactccagcctctctcacttattggttccatgtttgtccatgcaggagcctcctcaacaagcccaagagtgagatgaccccagaggagctgcagaagcgagaggaggaggaatttaacaccggtccactctctgtgctcacacagtcagtcaagaacaatacccaagtgctcatcaactgccgcaacaataagaaactcctgggccgcgtgaaggccttcgataggtgagtgctgggtcctgggaggtgttctccgcaggcctggagaggccactccagctccagtctgaagagctcaaagacagctgtctcagaagcctggggtgtatggccaggcgtggtggctcatgcctgtaatcccagcactttgggaaggcaaggcgggtagatcacctgaggtcaggagttcaagaccagcttagctaaaatggcgaaaccccatctctactaaaaatataaaagccaggcgtggtggtgcacgcctgtattcacagctactcaggtggccgaggcacaagaatagcctgaacccaggaggcggaggttgtggtgagctgaaatcgcaccactgcattgcagcctgggcaacagagtgagattctgtctcaaaaaagaaaatgataattttcaatggccctgtgaggaaggtaacgtgattatcttccctcttaaaaaggagcaaactggcacagagaggtgcagtcctttgcctcagcctcaacctaaggactggcagagttgctttggcagctt

SEQ ID NO: 11585 - DNA, 1264 bp, Homo sapiens
ctcccccaaccctgattcggccgcttcgcatcccgctagctcctcccagaccttcggccgcctccacacgcctccggattggcccgctgcggagcctccggcccacaacgcaaaccgcggacactgtggagtccagagctttgggcagatggagggccttttattcgcgagggtcgggggtgggggtcctaggtggggacagacaataaataccgaggaatgtcggggtctcagtgcatccaaaacgtggattggggttgttgggggtcctgtagcctgtcagcgagtcggaggacgaggtcaataaatatccaaaccgccgaagcgggcggagccggctggggctccgagagcagcgcaagtgaggaggggggcgcgggatccccgaaaaagcgggtttggcaaaagcaaatttcccgagtaagcaggcagagatcgcgccagacgctccccagagcagggcgtcatgcacaagaaagctttgcactttgcgaaccaacgataggtgggggtgcgtggaggatggaacacggacggcccggcttgctgccttcccaggcctgcagtttgcccatccacgtcagggcctcagcctggccgaaagaaagaaatggtctgtgatccccccagcagcagcagcagcagcagcagcagcagcagcagcagcagcagcagcagcagcagcagcattcccggctacaaggacccttcgagccccgttcgccggccgcggacccggcccctccctccccggccgctagggggcgggcccggatcacaggactggagctgggcggagacccacgctcggagcggttgtgaactggcaggcggtgggcgcggcttctgtgccgtgccccgggcactcagtcttccaacggggccccggagtcgaagacagttctagggttcagggagcgcgggcggctcctgggcggcgccagactgcggtgagttggccggcgtgggccaccaacccaatgcagcccagggcggcggcacgagacagaacaacggcgaacaggagcagggaaagcgcctccgataggccaggcctagggacctgcggggagagggcgaggtcaacacccggcatgggcctctgattggctcctgggactcgccccgcctacgcccataggtgggcccgcactcttccctgcgccccgcccccgccccaacagcctacagctgttgttagtccactcgcacgcctcgaatcccgtccgaactcgtcattggctgcttcctagcggcctgtgtt

SEQ ID NO: 11586 - DNA, 1142 bp, Homo sapiens
tcactcaggatccgccaaggactttgattattgcgtgaaagtgctgactgccaggacaggaagctagctaagatgcaagttcccagcctagagcagtggcctctggggggtctagggcggacccaagggcaaggccagggtggcagcagctttggggactctgggctggctccctccccttgacactggctgaagcccaggtggtctctaacccctcccatctctccctctcatcttccccagggcatctcctcccaaccaggcaactccccgagtggcacagtggtgtgaagccatggatatcgggcccccccaaccccatgcccccagcctcctagccataaccctccctgctgacctcacagatcaacgtattaacaagactaaccatgatggatggactgctccagtccccccacctgcacaaaatttgggggccccccagactggcccggacacgggcgatgtaatagcccttgtggcctcagccttgtcccccacccactgccaagtacaatgacctcttcctctgaaacatcagtgttaccctcatccctgtccccagcatgtgactggtcactcctggggagagactccccgcccctgccacaagagccccaggtctgcagtgtgcccctcagttgagtgggcagggccgggggtggtccagccctcgcccggcccccaccccagctgcccttgctattgtctgtgcttttgaagagtgttaaattatggaagcccctcaggttcctccctgtcccgcaggacctcttatttatactaaagttccctgttttctcagcgggtctgtccccttcggaggagatgatgtagaggacctgtgtgtgtactctgtggttctaggcagtccgctttccccagaggaggagtgcaggcctgctcccagcccagcgcctcccaccccttttcatagcaggaaaagccggagcccagggagggaacggacctgcgagtcacacaactggtgacccacaccagcggctggagcaggaccctcttggggagaagagcatcctgcccgcagccagggcccctcatcaaagtcctcggtgttttttaaattatcagaactgcccaggaccacgtttcccaggccctgcccagctgggactcctcgg

SEQ ID NO: 11587 - DNA, 1238 bp, Homo sapiens
tagccagtagtataggaacatactccctgagctgaaaaatatttccggggaatccagatccagtactcttccgtggccatcacctgcaccccatccctctcttcaaaggtgacaaaggcacaaatgaggggaatctttgaggatctttttctgtgcacttaagtacatgggtgctgctcctagaaactcatttttattctgtgatgatcgatccccaccctggtacccccaccccccaacacacaaacgggaccttcctaggcataagggtcctcggctggccttcctcgcttcactccttgtctgctctgagagttcctgcgtctgggtgggagaagtcgcagggcacgattgcggagtccctggattgcccaccctacactgacatgctggctcaccctcccaccaggtccgcataaagatcctggccagcctggtgacacagttcaactcgggcctgaaggcggaggtcctgtccttcatcctggaggatgtgcgggcccgcctggacctggccttcgcctggctctaccaggagtacaacgcctacctggccgcaggtgcctcgggctccctggacaagtatgaggactgcctcatccgcctgttgtctggcctgcaggagaaaccagaccagaaggatgggtgagggggctgaccctgcaccctcctgtccccgagaggcttcctctcctggtgctgccctccctttctgattgcgaccacctccctcttcgtcaccccccgagtcagtcctcctcgcacccatcccaagtctcctctcctcctccccctctggaggcacgttcaaggttgtagttttgcatgtgggctccaggtcgcactccctgagctgttcctcagctctgccacttgctctgagcttgctctgcgtggctttgtcactccctctctctgccattttcccatctgtaaataacagtgctcacccatgggcctggagatagacttctctacaccccattcactacctgagttggttctgtagcttcctccctatccgtggcctccagcttactcgtctatcctccacacagcagctccaggaacattttattatataaatccttttattacttccccacaaggaaccttccatggttctccattggtcttgggataaaacacagcctccttactgtgaccagtgaggccttatgtgacccaatctctttggctttaccccccgaacattagccacattggccttctgtctg

SEQ ID NO: 11588 - DNA, 1223 bp, Homo sapiens
ccggtggaacgcgggagctgggcggcgcgcggactggggccatggcgtctgtgcaggcgtcccgccgccagtggtgctacctgtgcgacctgcccaagatgccgtgggccatggtgtgggacttcagcgaggccgtgtgtcgcggctgcgtgaacttcgagggcgcggaccgcatcgaactgctcatcgatgccgcccgccagctcaagcgcagccacgtgctccccgagggccgctcgcccgggcccccggcccttaagcacccggccaccaaggacctggcggcggcagccgcacaggggccccagctgccgcccccgcaggcccagccccagccgtcagggaccggcggcggcgtgtcgggccaggaccgctatgacagggccacatcatcaggccgcctccccctgccctcgcccgccctggagtacactctggggtcccgcctggccaatgggctgggccgtgaggaggccgtggctgagggggcgcgaagggccttgcttggctccatgcctggcttgatgccccctgggctgctggcagctgcagtgtctggcctgggaagccgaggcctgacgctggcacccggcttgagtcctgcccgtcccctcttcggctccgatttcgagaaagagaagcagcagaggaatgcggactgtctggcagaactgaacgaggccatgcgaggccgggcagaggaatggcacgggcgccccaaagcagtgcgggaacagctactggcgctgtccgcctgcgccccgttcaatgtgcgcttcaagaaggatcacgggctggtggggcgagtgttcgccttcgatgctactgcccgtcctccaggatacgagttcgagctgaagctcttcaccgaatacccctgtggttccggcaatgtgtacgccggcgtcctggcagtggctcgccagatgttccacgatgctctgcgggagccgggcaaggcactggcttcttcgggcttcaagtacctcgaatatgaacgccggcatggatcaggagaatggcggcagctgggcgagctgcttaccgacggcgtccgcagcttccgcgagccagctcccgcggaggccctgccccagcagtacccagagccggcccctgcggctctctgtggcccacccccgcgagccccatcccggaacctggcgcccacgccgcgccgtcgcaaggcatcccccgagccggagggcgaggcggctgggaag

SEQ ID NO: 11589 - DNA, 2686 bp, Homo sapiens
gagaggaccttggatagaggggaggaaatgggaccatttctctttgaggaggtccctaagaggcattgcaaaagtgtggacatggagctaaattgggtcccccttccacagccctcccaccctgagtttttcttagaatctttgtaagaaaaaaaaaaaaagacagaaaaaagctctccttttcaacttacccctatccttttgggtccccccaaattccaccagccaaggagaatcccacttgccaacttcctggcaaatctatggaaactggggaggaggagacaagctcaactcctcctctgctagcccaaggggcggtaccaactggattcaagagaaggacctcaaagctcctatgagaagagggggttcgatgtgccaaattaacctccttcatcccccatctcagggggctctgagccaacctgcccagccaccttcttctgccctgtcccagccacctctacatgggcaaggaggcttcactgcaataattagtaggggtggtgatcagaagacaatgattttgccgtttctatctgccctaacgcctaccctggacttgtagttgggaattatgggtatcccaagtggatgttgataaaagccgacctatagatggttggggacctctacttggaacaccagggtgtcgcttatctccgaggtgtatttcctctcccctctggaccaccaaatccttcaatatcccctcattctgtttctcctccctgttcctccatcccacatcctccttcttactttgttttgattggtggccaattgtttggaaaatgagaggagtccccctgaatggatgattgctgtttcaggaccgggattagaggctgtgatagactgtgcagtggcaaaagtattaacaagagtggcgatgaggatggcagttggggcgtccaggctgctgactgagtgcccgcctgtcggtacagccagccaggccttcgacaagcacctgcctggaaaccgggctcgctgtcctgaaagcctggactggatgtcacgatggggagaacgggatcgcgatacccaagctggggcacaggcgagccagggacactggtttactggggtgataacacccagccctgctatcgcgatccgtttgcactgtggtcagctgtctccacgccgtggttggagagggcttgtctccgggcgccactgctggtgtgtatggtctgtcttagtgtcccctgcaagttgcattggagattgctgggtggcagggagggaaatgggaagagaatctgtggggtcatggtggtgaaggctgctggtttttaatcccttctcaaccagtccaggacacttgtctcccagagataactggggggggactgcctaaccccccctcccccacccctttccctaccccacctctccccccaaaaccaccaacctctcatcttctaagtgactccatcaccaccggccaccgggacctgcggcctcattgctccagcccgccccactcgaccgtcagactcgctcatcgaactctttttgattaaccctttctgtgttcatcccacggaaaactgtgtgtccggcaggggggaggggggaggctaggggcagttgctacctttcctccatctcctcccaccacccatgcctccccacccgcaccccatcccatgccccacccccatccctcacccctagggtctgccccaccctggggattgacatcctctataaatatctatgctatttggctttgtccctttaaaaggcgggtccaggggcgtggcctccctcaaatggagcgctcactctgaccccctccttcgtgtgccccccacacactccccacgccttcattgtaaatagtcacttttgtactgggtttgagccaggggacgtggggagtcatttttcttttctttatgttggcatctcaggccactggaggcatggcccacatcccgggtcgatttgggagaattttaaggtatgtcccctcacctgtccccatcgctaaggatttcaagctatcagtattactctagagggatggggtgcatagattccccggcagggtggtgggagaggtgtggaaaggtgtagtctgggaggatgcctccgttttccccttctgtgaaatggattcatcctccaatttccctgaggagcctcagtgagataatggtggagtcagaggagctagaacctctcttccccctttctctgttggagacagggtagcagaagaatgggggacaggggaggctgcagggccatctttggagaaccgattgctaaatccttcttaggaccttaaggtagcctcctctccaggcttgttctccctcttggaatatggggaggactggaggacctctaaggtcccttggttctccccagtccttagattaaaaggcccaggccccaggctggccccctgcctgctgtcccactccttcattccatttcttggaatgtggccatgcctccagtgcctccattcaaccccctctaactgattccttccatcctctgcgaccagagacgccgcccgcctcctgcccaccacctccagaagctcctggctggggtgcactgccgtctcctcccactccccacattgccatgcctgggccacgcccaccccacccactcacccacccccagtgtccgttgtgtgacctagtgcaccatg

SEQ ID NO: 11590 - DNA, 1194 bp, Homo sapiens
tgtttccatatgggaggaggggagggagcctctgggtcacccagaatgaggggccttcccaaaacacaacaccccacctctctgctttcagttctagatctgagggaagccatgggagtagaggtagcagaggcgtctgagctgaaatggggcatttggagcaaggaccccagagttcccagatcttctcagctactctcctcccactggagctgtccctcctaggtgggaatgttcactcttttgttgtcaggttgtatgggggggcagggacagtgctgctgggaaggatgccagctctgggattgggccagtcctgtgggcaagacttgcaagaggctggatcaacttggtgtggtatctctgatggcttagagtaatggcaatgagggtctctgttgtgatgtcactgagtactttctggggtgcttctgggcaccccttatgatgtcacaggaagcagttcctcagaggttacttcctgtgaacataagggagcaggtacttcctgtgatgtctcaatgagttcttccttgaaggtcactttggtgatatcatgggaaggtgtacttccggtgatgcctagaggtcacgtcctgtgatgtcattaggctgaagcatgtacttcctgtattggacagtgaccagtctctgacctgccttctccctccacacccttctttggtgggtgttggcctgggggtcttcctaggaagagaataaggcacgggacttggatccaatctggaggactctaacggaaaaaaaccaatattgtcagggtcatctccattcaaacacgtcaagtctgcgaactcgccctggagggaggggtgggagatggacctagtgcaaactactgttaaagacctcccttcccacccctgccttttgtgtgcatgcctgtgtctgcgtggctttgtttcattgaatcgggtgagccaagtgtgtggtggctctgtcaggccagtatggccaggtgtagagttcagtgagccatagtagggtcccttgggccagaatgcttcgtgtggtctgataggttagattggtttggtggcttccagcaagctggcatacttcggtgatgtctgatggatcagaatgttttggtgtgctcaccaggggctctggagaactagaatgttctgatggagtctgacaagccaggcggccttgagagttggtttagga

SEQ ID NO: 11591 - DNA, 1215 bp, Homo sapiens
tgtgtctgttgtggctctgtccctccctctccctctgtcccttcttgcccagccattccttctcttaacccaccagccccacccagccctgaccacactgtccactctgctcctgtccctgcagcgaccagatggggaacaaagcctcctacatccacctccagggctctgacctacggcctcagttccaccagttcacagcagtggtgagtcacccctcagggcccctgccccttccatcccggcctggggacaaggaggctgagaccctggtaaggggcaggggtaggttctgccggtgggtgctcaggggctctgttctgacttctgtccatcccacctgccctggtcccacagcctcatcccaacgtcaagcccatggcctatgccaacacgctgctgcagctaggaatgatgtgaggtgacgggcggggcggcctgcatcccagggcccctccaatcccaccggacccaggccctgggctaggggcagagcaggccccgccccagggcaatgttggacccccttttactttgtaaagtttgtatttattcccctttaggtttgcagagggggtaggggcagagtcaggggctggccagagggtctgctccctggacagagaggaaggaggtggagcagctggggctgggggcacagcctgggcattctgtggggaggccgtcctcggggtggggtggggccgagtggctgccctgcccccctcatttgcatggctcctcccccactcaagcaatagggccccgccataggaagacccccagagagagggtcagcaggggggccccgcctgcgcctcccctcctatagccccatggtggggctaggctggggctcacccccctccccagctattttatgtctgtaattaaatatgttaaaataaagtcattatcggaagtcagcttgtctctggatggtggagccgaaggagctgcccgggttgggttacgcctgctcaggagatccggagggtggggaggccgcaaagtcccgctggccgggcccacccagctctgggctgaccgcccaagtggcctctgcctctgcccagcaccgtgggctcctggggagagttctgccccctgggtggggcgatgaggccagcactgagtggagcggagcggaagctgaggcatagcctcatcctttgctggctccagcaacaagcatgacagtgccgctccctgctc

SEQ ID NO: 11592 - DNA, 3420 bp, Homo sapiens
ccctcctcgtcccagccagccaaccctggctaacacactcagacaaagaatcctttcggctctcattcactccatgactttggttcatttcatcatttcaagggagaagtcaaagccagggaccaaacagaaatgtagaatcatctaaggacagctgtcagaccattttccccactgtcttcactggctggccagaaaaatagcttcacctagcacagtgttgatgttcaataactgttgaatgaaggttggaagggctttgccctgagcactgaggagagagagctggttgcgtgggacttgaagtctgtctcagtttctttaggtgggactgatgcccttggccttcctccagggaaggcatccagcatccagaggtaaggattctcctgtggaccttgtgacctctgactcctcccccttcttcccccagagttcaaggaggccttctccctctttgacaaggatggagatggcactatcaccaccaaggagttggggacagtgatgagatccctgggacagaaccccactgaagcagagctgcaggatatgatcaatgaggtggatgcagatggtgagccccacagagcgcgtgggcagccctgctcctggtcaccccgagtgactgcagggagcctctctcagggtgatggatgagcccgtgtctctcagggcccaggccaagagcattctccatcctttccccaccttccagggaacgggaccattgacttcccggagttcctgaccatgatggccagaaagatgaaggacacagacagtgaggaggagatccgagaggcgttccgtgtctttgacaaggtaagcagccctctccaggggcggctctgagactgacgccagccttcaggcagacaggcggaactggagccacggagctaccacttccaggaggtccgggtcccggtgccagcctcattgccaacctgctctgccacctcaggcagcctccctcactgtgctcactgctgagggatggtgatgacagccacccctctcactgcctctctccccaccgggagaagtgcccagtgaaaggctttatccccaacccccaggatgggaatggctacatcagcgccgcagagctgcgtcacgtaatgacgaacctgggggagaagctgaccgatgaggaggtggatgagatgatcagggaggctgacatcgatggagatggccaggtcaattatgaaggtgagtcaaggccaggcttgatctctggaacaagaagagaatcgcagcttcaggaacaagcccccagatccctcttgttggggagggccgctcgccacttagcctgcccgcctgacctcctctctctctgcttcactccacagagtttgtacagatgatgactgcaaagtgaaggccccccgggcagctggcgatgcccgttctcttgatctctctcttctcgcgcgcgcactctctcttcaacactcccctgcgtaccccggttctagcaaacaccaattgattgactgagaatctgataaagcaacaaaagatttgtcccaagctgcatgattgctctttctccttcttccctgagtctctctccatgcccctcatctcttccttttgccctcgcctcttccatccatgtcttccaaggcctgatgcattcataagttgaagccctccccagatccccttggggagcctctgccctcctccagcccggatggctctcctccattttggtttgtttcctcttgtttgtcatcttattttgggtgctggggtggctgccagccctgtcccgggacctgctgggagggacaagaggccctcccccaggcagaagagcatgccctttgccgttgcatgcaaccagccctgtgattccacgtgcagatcccagcagcctgttggggcaggggtgccaagagaggcattccagaaggactgagggggcgttgaggaattgtggcgttgactggatgtggcccaggagggggtcgagggggccaactcacagaaggggactgacagtgggcaacactcacatcccactggctgctgttctgaaaccatctgattggctttctgaggtttggctgggtggggactgctcatttggccactctgcaaattggacttgcccgcgttcctgaagcgctctcgagctgttctgtaaatacctggtgctaacatcccatgccgctccctcctcacgatgcacccaccgccctgagggcccgtcctaggaatggatgtggggatggtcgctttgtaatgtgctggttctctttttttttctttcccctctatggcccttaagactttcattttgttcagaaccatgctgggctagctaaagggtggggagagggaagatgggccccaccacgctctcaagagaacgcacctgcaataaaacagtcttgtcggccagctgcccaggggacggcagctacagcagcctctgcgtcctggtccgccagcacctcccgcttctccgtggtgacttggcgccgcttcctcacatctgtgctccgtgccctcttccctgcctcttccctcgcccacctgcctgcccccatactcccccagcggagagcatgatccgtgcccttgcttctgactttcgcctctgggacaagtaagtcaatgtgggcagttcagtcgtctgggttttttccccttttctgttcatttcatctggctccccccaccacctccccaccccaccccccaccccctgcttcccctcactgcccaggtcgatcaagtggcttttcctgggacctgcccagctttgagaatctcttctcatccaccctctggcacccagcctctgagggaaggagggatggggcatagtgggagacccagccaagagctgagggtaagggcaggtaggcgtgaggctgtggacattttcggaatgttttggttttgttttttttaaaccgggcaatattgtgttcagttcaagctgtgaagaaaaatatatatcaatgttttccaataaaatacagtgactacctgatttggctcctctcctcctgtctcagtttctggcctgcccccctccaacacacatacacaccaaccccagcactgactcctttggcccagaggtggaagagcctctcctcaaagctggctctgaagctgtgtccagtcagtgcagcccagtggacgcctctgaaccacagttctgatcccagctagatcgcagggtcatcaacggcagggtcctgtcctagagatagtcgcacaaatggactgaaaggcggggactgagaaggctcctctgaggcaggcccatcatgccatgggagcacacagagaaggggtcagcccagtcaggtggcaggactgagctgagacctacctgaaagatgggcagtcccctagccgggtaggggaaggacggaagggcattcc

SEQ ID NO: 11593 - DNA, 1100 bp, Homo sapiens
ctgtacagtaagtgtccatgtatgcaaaaggggtaattcggtttgaatttccccgttttagtttagaagcctagtctgtttgttcccctccaccgctctccctctcattcctgatgagccctctcattcctcctttccttgcccagctatggccccctctcattcacaaagtgccccctccatgtccctggacccttaagatatccccttggcaccctggtcagagactctgtgtctgactcaggtggtccctgcagagtgccctgggaagggaaggagcactgatttgggggttttgagggtcaagtaggggttggtaacacctggaaagaaggactctttcacttcgatccctggacaattatggaggattcggaggtagaagaggggaaggaagatggtttctatctcatgacccccactccctgtgagagggaatgggggaagcctgatgaccctcagctgttccaatctagtattttttttcttttttaaaattactgtatttattatgacgatggtgactccccagtgcaaaggggggccagattctgtgtgtttctctaacctctttgtaaataaatgcacagtgtaacatatgtggtggactctcactgaatgattaaatgggagaaatgctctttttcctttggactaacatttattgagcaacttctgtttgctgtggatatggcagtttccagggaggtcccagggtgaatctcaacatcatcttcctaccattggctattttacatcaaggaatctaacctttgattgggttatgtttggttataaatacgatttcaggcgggatgtgatggctcatgcctataatcccagcactttgggaggcaggggtagggggatatcttgagcccaggagttcaagaccagcttgggcaacatggtaaaaccccatctctacagaaaatacaaaaattagctgggtgtggtaggtcattcctgaactatcagctgctcaggaggctgaggtgggagaatcatgtgagtctgggaggcccaggctgcagtgagccatgattgtgtcactgcacgccagcgtggatgacaagcaagaccctgtctcaaaaaacaaa

SEQ ID NO: 11594 - DNA, 1499 bp, Homo sapiens
cgctgttgcctgccaccccagcaaggccctcattgccagtgctggcgctgatgccctggccaaggtcttcgtatgatgcccacctggccctgccctggccgccacgctggctggggtgtagggccgggcaggtggggctgaggtgagggcagaaaccccgcattctgagtctctgcacgcccatgcctagtactgccaggtgtgctgagccccgcagtccagtcaggggcgtcctgtgagaatcactgggggagccctgggcatgcaggggaggggttgaggccttagaggcgccctagaggcggcggctcagtctcccctcccttctctttcccgcaggggactcccagcctcgctggaggtgcagaggcctggcctctgtctgtttgccatggagcctggtggtgctaacggccctttccccaggaatccctccccaacggctgccttccccaagcatccagcctggggatgggcccctttcaggaatcacccccgaggatggcctcggggtttccccctgtgccctgacagccgctcctggtatcagagctgctttccagagggcagcacagccagggccgggtgtctttagggatcagtttttccaagactccagaaggtgccaggttctccccttgagctcctgctcccccatcccccatcctcccagacctgggcaggagctgtgctgggagaaagggtggcagccgggagcctcagagctgagccccggcctggctgcccctcccctccggccctctccactgctttccagacactaaccaaggcttccaggccagggattgcccaacactcctagggcagccctcccagcgccccatggggtcgcccatgggtagagacggctttcttgtgcccctccctggggcatggagggtggagtgggcctcgggtccccctgaactccctgtatatctgtataaataacgggattttcatggcgccgccccacccgcattatcactgtgtgatggtctcagtcagtctcctccctgtctccactctttccctctatttatttcactctcttgtttggttctaccctgcaccctcggtccccttccaggttcctgtttataagccccaacccctctgtccccatcttgtatgtgaaaacttgtctcaataaaccctttggagtaagatgggtgacggtgccatctgttgagggcactggggactttgggggaggagtgaccggctctgcctgggttgggtggagtttggagagaggggatatgatgggttggggttttgtggtagggcagcaggggccggagacgggcccagagcttgggtggggtgtgggtggagagaagtggaggcactggaccgaatctccttgtgccctttctgtccctaagtgctccctccccaggggtagagccctggggagcagatactatgatgacagtccagctgaagcctcagccccgcctgggatgtgtgagggtggtggcgaggccaaagggctg

SEQ ID NO: 11595 - DNA, 1544 bp, Homo sapiens
gtggaggttgcagtgagccgagattgtgccactgcactccagcctgggcaacagagtgagatcctgtctcaaaaaaaaaaaaaaaaaaaaattctggaattaattattggcaatggttgcacaagtctgaatatactaaaaaataccaagatggacacttttaaaaggttaattttatggtaggtgaattataattttttttcgagacacagtctggctctgtcacccaggctggagtgtagtgatgtgatcatggttgtgatcactgcagcctccacctcccaggctccagcgatcctcctgccccagcctcctgagtagctgggactataggtgtgcactaccatgcctggctaattttttttttttttaaatatatataaagatgggatctcactatgttgcccaggctgactccaactcttaatttttactttttagattccagggggagagaggcaggaggcttaggccttggccctttccttccctctcaccctctcccctcccgcttactttgctgtcatttctacccctttagcgaccggtcctgtaccgtcctcaatgtagaaggtgacgctctgggggcaggactcctccaaaattacgtggaccgtacggagtcgagaagcacagagcctgagttgatacaagtgaagagtgagctgcccctggatccgctgccagtccccactgaggaaggaaaccccctcctcaaacactatcgggggcccgcaggggatgccacggtcgcctctgagaaggaatcagtcatgtaaaccccgggagggaccttccctgccctgctgggggtgctctttggacactggattatgaggaatggataaatggatgagctagggctctgggggtctgcctgcacactctggggagccaggggccccagcaccctccaggacaggagatctgggatgcctggctgctggagtacatgtgttcacaagggttactcctcaaaacccccagttctcactcatgtccccaactcaaggctagaaaacagcaagatggagaaataatgttctgctgcgtccccaccgtgacctgcctggcctcccctgtctcagggagcaggtcacaggtcaccatggggaattctagcccccactggggggatgttacaacaccatgctggttattttggcggctgtagttgtggggggatgtgtgtgtgcacgtgtgtgtgtgtgtgtgtgtgtgtgtgtgtgtgtgtgttctgtgacctcctgtccccatggtacgtcccaccctgtccccagatcccctattccctccacaataacagaaacactcccagggactctggggagaggctgaggacaaatacctgctgtcactccagaggacattttttttagcaataaaattgagtgtcaactatttaatcaggtgttcttgagaatttgacttaaagcactggccactgcaatgacagtatctgctcatcaagaaacaccactgggctgggcatgggggctcacacctgtaatcccagcactttgagatcactccaggccaggagt

SEQ ID NO: 11596 - DNA, 1490 bp, Homo sapiens
cagccctcagtgtccaagacccaggcagcccgggtccccgcctcccggatccaggcgtccgggatctgcgccaccagaacctagcctcctgcagacctccgccatctgggggcactcaacctcctggagccaagggccccacgtcccacccagagaaactctcgtattcccagctcctagggccaaggaacccgggcgctccgaactcccagctttcggacatctggcacacggggcagagcagagaagcctcagcgcccagcctggggaatttaaacactccagcttccaagagccaaggaacttcagtgctgtgaactcacaactctaaggagccctccaaagttccagtctccaggtgctgttactcaactcagtcctaggaacgtcgggtcctgggaaggagcccaagcgctcccagccagcttccaggcgctaagaaaccccggtgcttcccatcatggtggccgatcctcctcgagactccaaggggctcgcagcggcggagcccaccgccaacgggggcctggcgctggcctccatcgaggaccaaggcgcggcagcaggcggctactgcggttcccgggaccaggtgcgccgctgccttcgagccaacctgcttgtgctgctgacagtggtggccgtggtggccggcgtggcgctgggactgggggtgtcgggggccgggggtgcgctggcgttgggcccggagcgcttgagcgccttcgtcttcccgggcgagctgctgctgcgtctgctgcggatgatcatcttgccgctggtggtgtgcagcttgatcggcggcgccgccagcctggaccccggcgcgctcggccgtctgggcgcctgggcgctgctctttttcctggtcaccacgctgctggcgtcggcgctcggagtgggcttggcgctggctctgcagccgggcgccgcctccgccgccatcaacgcctccgtgggagccgcgggcagtgccgaaaatgcccccagcaaggaggtgctcgattcgttcctggatcttgcgaggtcagctcccgctcccccgggaggtggggaagagtgttacggatggcgggagtggtcacgtggacaggacggggctttggggcccctggagcagagacttccctctagagtcttaggaaaactcgacaggatattgaggggaggctccagccctcgggagtgtgagtctagtctcctggggaaggggtttctaaatctgggggcctgggtacataagtggggtcttatagagggagaagaaagtgatttggggagacataggagggtctgcctaggggagaaagacactgaggggaggggaccccaggaggaacttttgcggggggaatctttgcgtggtcaagggccccaagatggggcttctagatataatttggggccagggttggagagtttgggtaaggagcccctggaggatctgagatctgagtaactcccaccaggccctcttcccagccctgggg

SEQ ID NO: 11597 - DNA, 1873 bp, Homo sapiens
catcagtgtggtgggattatctgggaccgagaaggaaaagggccagtgtgggattggaaagtcttgtttgtgcaaccgcttcgtgcgcccgagtgctgacgagtttcacttggaccatacctccgtcctcagcaccagtgactttggagggcgagtggtcaataatgaccactttctctactggggagaagttagccgctccctggaggattgtgtggaatgtaagatgcacattgtggagcagactgaatttattgatgatcagacttttcaacctcatcgaagcacggccctgcagccctatatcaagagagctgctgcgaccaagcttgcatcagctgaaaaactcatgtacttttgcactgaccagctggggctggagcaggactttgagcagaaacaaatgccagacggaaagctgctggttgatggttttcttcttggtattgatgttagcaggggcatgaataggaactttgatgaccagctcaagtttgtctccaatctctacaatcagcttgcaaaaacaaaaaagcccatagtggtggtcctgactaagtgtgacgaaggtgttgagcggtacattagagatgcacatacttttgccttaagcaaaaagaacctccaggttgtggagacctcagcgagatccaatgtaaacgtggacttggctttcagcaccttagtgcaactcattgataaaagtcggggaaagacaaaaatcattccttattttgaagctctcaagcagcagagtcagcagatagctacagcaaaagacaagtatgagtggctggtgagtcgcattgtgaaaaaccacaatgagaactggctgagtgtcagccgaaagatgcaggcctctccagaataccaggactatgtctacctggaagggactcagaaagccaagaagctgtttctacagcacatccaccgcctcaagcatgagcatatcgagcgtaggagaaagctgtacctggcagccctgccattagcttttgaagctcttatacctaatctagatgaaatagaccacctaagctgcataaaagccaaaaagctcttagaaaccaagccagaattcttgaagtggtttgttgtgcttgaagagaccccatgggatgccaccagtcacattgacaacatggaaaacgaacggattccctttgatttaatggataccgtccctgcagagcagctatacgaggcccacttagagaagctgaggaacgaaaggaaaagagttgagatgcgaagggcgtttaaagaaaacctggagacttctcctttcataactcccggaaagccttgggaagaggcccgtagttttattatgaatgaggatttctaccagtggctggaggaatctgtatacatggatatttatggcaaacaccaaaagcaaattatagataaagcaaaggaagaatttcaggagttgcttttggaatattcagaattgttttatgaactggagctggatgctaagcccagcaaggagaagatgggtgttattcaggatgttctgggagaggaacagcgatttaaagcattacaaaagctccaagcagagcgtgatgcccttattctgaaacacattcattttgtgtaccacccaacaaaggagacatgccccagctgcccagcttgtgtggacgctaagattgagcacttgattagttctcggtttatccggccgtctgaccggaatcagaaaaattcactctctgaccctaacattgatagaatcaacttggttatattgggcaaagacggccttgcccgagagttggccaatgagattcgagctctttgtacaaatgatgacaagtatgtgatagatggtaaaatgtatgagctttccctgaggcca

SEQ ID NO: 11598 - DNA, 1311 bp, Homo sapiens
cctgctggggtcccactcacccacttaggtctagtcgctagatcccccgttttcccaagaagagggttcgagcccttggtggggacagctggggagatggcagtgcaggctggaacctgggctgccccagaacacagtccattacgatagaaacactaattgagcatgtgcgtggggtgggggtgtgtgtgcacatgtgagtgtgagtgtgtgtgggcgcttggtggggggttggggacagctggaaggtgccaggtgcacttggggttggggttggtgtgttgggtgttgaagtggaatcgtttcatcccagccatggaggccaccagcaggagtgttcatggggatgtgggcgaggtggggcactttgaaggaatggcggtctgctggtgccctcgaaggggcatccttcctggtcttcgctgacccagaggcgctgtgcctgcatatcatccaccaccaccctagcccagccttcccactgccccaggaaaagctcttctcctggccacctctgccccccagcacctcaaacttgcatggctgggctgtggcctctgcggccaggaagcctgacactaggcaccccccaggcgagagctagtggggtgcagagggccccatgccagacagcccttggggctcgttgcactttaagaaataggatctgtggtgtattccagggggcctgatggacacctttcccgggcgtctgcagctgccctgcccgtgcccgcctgcagtggttggagacgggagtggcccttcggctcccgagctccctctggggacggctggctcactgtctccagttctcaatggccaacgaaggtgcttggaaacacctaaccttgcaagttttaccgccttttgaggaacacaaatcggagaacaaacccagggttcaggcgtgttttctgtgaatgttggatgatgaatttttgtctcttctggtggagctgtgcctggccctgtaggcccagggttggctggaaggtgacatctgtgtttcgttttagctgaggttggcagaaacgttcccaaactcccccagccctggaccccagcagatgaggaaacggccccatttactgaccccgcccccttttcgaggttatgctcacctggtcagctcctcacgtaattgggggtggagggaaagcatggtggtgccctgggccgtccctgtgtgaacgcaggcaaaagcagcccagtccccctcactgcttgagctaacactgccacctcttttgtgtgagcacaaaagccacgtcccaagccacctggcccgattccacagatgtatgtgcg

SEQ ID NO: 11599 - DNA, 1510 bp, Homo sapiens
tcatgcagagtgacatgggtcgggaagcagcatatggtgagtgcagaccccccctctcgccccacggaaccagggaatgcagagcccctatcacctgccctggtgagagtagactctcctaccccatcccactcccagtagtaagtatagaacccccattcttcccccaccagaagacacccctcccataggcactaggtccatctgaatgggtggcccaggacatggttatggtcccctcccctccgatctgattctcaaagatgcaggctagcccctggcacggccctgcctctgttcctgtctcctcaaccctggctttgctcccagaccatcccccgaccttggccctgttgctaccctgcctctcccgcaggcttcttcctgctgggcggcctgtgcgtggtgtggggcagcgcctcgtacgccgtgggcctggcggcgctgcgaggacccatgcagctgacgctggggggcgcggccgtgggcgcgggcgccgtgctggccgccagcctgctctgggcgtgcgccgtgggcctctacatggggcagctggagctggacgtggagctggtgcccgaggacgacgggacggcctccgcggaaggccctgatgaggcgggtcggccgccacccgagtgagcgacacggccgtggggcctggcaggcgctggacagcgcccgaggactgggacattaaacctgacctcccctcctccagatgcagagtattggttcgtgttccttgggaagggcggcgaggagcggactaactggagaggcaggagggcgggtggagggagaggggggtgaggacccgggggagacagaaatggacagaggagctcacagcccggagcccaaaccactgcagggagagccggcgtttaattctcagggctacgggcagagccgggcctactgtcctgggggaccccggttgtcgcagggtccggcgccggcagctctgccagtcctcagtcccccttccgcggcagcctggtgcccgcgggccccgggtagggcaggcccaggggcgggtaaaaggcctccgggagcgcggggcccggacccagcctctgcaggtgcgggtacaccaggcccagctccgcggggccgtagcggatggtgccgggtgtgcacaggccccgcaccaccggcggcaggaagcccgcgtgcaggagggtgggcggggggtccccgggaggcgccaggccccatggccgcaccggatcctgcttcaggacccctgcccggatgacagaggtgaactcgggcctcggtgtggccgggtggctggagggatcctcgtcgccactgtcctcggagcctttggtttccctcgggccgggctccactttgatgcgtttgccctgggtctggggggcctcgttctccgctggggcagcctgcttcccttccgtcggaggctccggctctggaagaggaagatgctgagggcctgtgtgtgtccccagccctcagtcttcccatctgtggaatggagctg

SEQ ID NO: 11600 - DNA, 1166 bp, Homo sapiens
gtggggtgaacaaggctcctatcccaccccaccccaaaaagagaaaaatgaaaaactcatagtttggagccaggaggcagggtgtcctacagggctgcacagccctgaggggtcagtgctgggatctggttggttggtttgtctttttgtctttttttttttttttttttttacacaatcattaatgagatttgtcttcagccaccagtgttggccttgaagcagagggcacagcccttggtgtttgtaaaataagtatgaatacacagtgtggcagtgttgtggtttttgttgttgtttttcctctccttttgagaattttcttttgtaaaagaaaaatattttttaaaccgaaatctgtggatgaaatagaagctggagccctcctcttggaatattcagcctaagaacctcataggactatgaattcacccgaaattctcatttgccatcaggccgagcttttaaagaaaaattgttctctaaccaggattgtaacaaaagtgtaaatactgtttcagagttgagagttggtggtgcaaatatgtatataatgaactgtatttttacaatgatcgccgcatgactatttcacaccctttttatactccatatctgtcttccagaaacgtcacctgcctttctcctgtggtctcttaatccagtaattgtattactgccattaaaggatgcagttattttaaaaagcttgtgggtctggtctctccaggctgccccagaccatcccttgccctgggaattaacgagggtggaaggtggctggggggtgaaacaaggacctattctctcagcggtcggcctcagggtaacatgaggacactgagggacaatttgtgcctccaaacagtgtcagctgtcctcagtggatggcagtagatcacctactagcaacatcccaaggtccctgagcttctgtgcgggccacgctcagcatttgggatccaggggtgacctgcacagtcctggatctgcccctgcagtgctcatagaaagaccattaacacagacaggacagctgggctggcttccagggacgggacgagctttagcaggcaccctacccatgtgatagccaggggtatcctctgaggaggggtctgttgtgatgttggaacttactttgaaatgcatcaacaaatatgaag

SEQ ID NO: 11601 - DNA, 1102 bp, Homo sapiens
caggtgacaccggaaactggtactcaagtgatgaggatgagggtggaagcagtgtcacctccatcctgaagaccttgaggcagcagacgtccagccgacccccggcttcagttggggagctgagcagcagtgggctgggggacccccgcctccagaagggacaccccacaggaagccggctggctgaccctcgcctcagccgggaccccagactcacccgccatgtggaggcttctggcgggtctggcccaggtgattcgggaccctccgatcctcggctggctcgcgccctgcccacctccaagcccgaaggcagccttcattccagccctgtgggccccagcagttccaaggggtctgggccgcccccaacggaggaggaggaaggggagcgggccctgcgggagaaggccgtgaacattcccctggacccactccccgggcaccctctgcgggacccacggtcacagctgcagcagttcagccacatcaagaaggacgtgaccctgagcaagcccagcttcgcccgcaccgtgctctggaatcccgaggacctgatccccctacccatccccaagcaggacgcagtgccccccgtgcccgcggccctgcaatccatgcccaccctggacccccggctgcaccgcgctgccacggcagggccccccaacgcccggcagcgcccgggcgcctccacggattccagcacacagggcgccaacctccccgactttgaacttctgtctcgcatcctcaagacagtcaatgccaccggctcctcggccgcccccggttccagcgacaaacccagtgacccccgggtgcggaaggcccccaccgaccctcggctgcagaaacccacagactctacggcctcctcccgggctgccaagcccggccctgctgaggcgccctctcccaccgccagcccgagtggggatgcctccccaccagccaccgctccctacgacccccgcgtgctggcggccggtggactgggccagggcggagggggcgggcagagcagtgtgctgagcggtatcagcctctacgacccgaggactcccaacgcggggggcaaagccacagagccggctgctga

SEQ ID NO: 11602 - DNA, 1190 bp, Homo sapiens
acaagaagatcccctccttgtttgagatcgtggtgcggcccacgggacagctggctgagaagctgggtgtgaggtgagtgccctggacccccgtgacaggcagtgggcgctgtcctgggcccagccaggctcctcttgttagggcaagcctggctgtgggagagtcctgcctctctccccagctgtgggagtcctggtctggggcccatgaccttcggctctgcagccctccgcctctcctctggggtgtggccactgccctcctcggcagcttccgtcacaggcaccttttccctcttctaggttccctggacccggtggacccccagggccaatgggccctgggcccaacatgggacccccagggccaatgggcggtccaatgcatcctgacatgcaccccgacatgcacccggacatgcaccctgacatgcacgcagacatgcacgcagacatgccgatgggccctggcatgaatcctggcccacccatgggccctggcggccctccaatgatgccctacggccctggagactccccacattctggaatgatgccccctatcccgccagcccagaacttctatgaaaacttctaccagcagcaggagggcatggagatggagcccggactcctgggggatgcaggtatgcgggactccaggtgtggctgcctggggctgcaggctttacccagtggagcagagttggggagatgtgatttttcttccttcgtccaagtctctttgaaagcatgactccatctctgtcccatttaatggttgaatgttttcagtgacataggatgtattctgttgaagaagaaaggagtattctgtgtattaccaatataggttatttctttttaattttgcaagctgtgcctggaatcggaagcatgggaagttagagggacgagtgtgcaagggtgtgaggctgagaggctggtgggcccatcaggactcagttagtggcctggccaaaaccatctctttccgggcagttctcggcttggagcaaccagtgtccaccccaggactctgcgggttctgtgcccattaccggccgttttcctgcctttttttccttttgcattggtaacaaatgtccagtgagcagaggggtttagatgacgctgctgcagccataggagatgtggtgtgcagccctctggaggagggccaggcacga

SEQ ID NO: 11603 - DNA, 1227 bp, Homo sapiens
ctgggattacaggtgtgcgccaccacacctggctaatttttctatttttagtagaaacaagatttcaccatgttggccaggatggtctcaaactcctgacctaaggtgatctgcccacctcagcctccgagagtgctgggattacaggcatgagccaccacacccagcctcttttttttttttttaactaagtctttgaagtccaatgtgtgttttggagtcttgtctaaatcacaggtccaaactacagggctagcttgtcttgtcagacttcaaggctagcatcttgtagtttggaccagacgtgttagttgcacattagcccatgggctggtgtttgccatattggacagtgcagttctaagtagacaagtccctgtgaggaaggggagtgagtactggagtagctgtgtgtctggggtgctgagggacccccattgagagaaccagagggtccagtagcctacctggggcatctaggaaggcttcttggaggaggaggaggaggagaaggaggaggaggcagctgaagtgattgacctcaggagcaaaatgtgggttgtcttctttcttgctggtggcatctgctcctgctggaggctcactatctgaatctccatgcaggcagccgaggccggggccggggctacaggggccgaggaagccgtggaggatcgcgaggccgcggcatgggcaggggcagccgaggcaggggcagaggctctatgggaggagaccacccggaggatgaagaggatttctacgaggaagagatggacgtaaggtttcctctggccctggggacgtcggggtgaggctggtgggctttccggggcgtgagcactgctggtagaggctgtgaggccaaggtaggaagacatacggcccttctgaaggaagggaagcctcagagcgcagatgtatgtgtttaaaaatattcatttatcattttggaatagataaaaccttcacgtggtttaaagtagaaaaggtatcggctgggcgcggtggctcacacctgtaatcccagtactttgggagcctgaggcaggtggatcacgaggtcaggagatggagaccatcctggctaacacggtgaaaccctgtctctactaaaaatacaaaaaattagccgggtgtggtagcacgcgcctgtagtcccagctattcatgcaggagtctgaggcaggagaatcacttgaacccgggaggtggaggttgcagtga

SEQ ID NO: 11604 - DNA, 1201 bp, Homo sapiens
gtgccaccacacccagctaatttttgtatttttagtagagatggggttccaccatgttggccaggatggtatgaatcctcagattcatatttgttaatgtagtttatattaggggctcagcctctatttggattaggtgcaataattacatttatagaaaggagtggagaagggatcagaagacgatggtttctgtagctagtgctggaatctgagatgggaaccatgcgatggggaaagcaagatgaaggggccagaattggtttcattgaactgagaggaaagacatgaccaagcccatatttactctttgctttgtagatttaaatgttgagaaagaaaaacagctggtcagaatgttgagttaaattacgctaacgaggggattctaaagagtgcagaaaccacaaaagagactgcagaaaaccacaaaagtggaactctcagactctccagcaaggcggcgttggagattttctttctcattttgtgtttgtgttggagtagtttggtgctgtaagtgtgatacagaggaattaagccctaattttagtgtctattcacagaaccataattatccagagtgaaccttggtgttttggccaaaacttgggtgcctttctttctttttgaggcccagtcaagatttatctgaatagctccgtgaatttggtggggggagataaattgttaacaaacggaggagtacaaaagctgctttgtgggtgctgtcagtttataaatcacaccctcttacaagtgtgacacttggccttggtgtgaagggttttatggcttaagggccttctctgattgaggcaggtctttcacattcaaatggagagagtgcctagctttgttagccattcacagctggaagtttccctggagtcagttctgatggtgcccactggggtggatctggaaacctcttttgggaaccactttatctcgctatgaggagaatgtgggcagcccaggcctttgcccaccattccggagggccctacaggcacagaggtttttgtgcagcctcttcctacgtggagctgagctggaaggtatcaaaatattccccagctgacattgttagtcagctgttacacttgaacaatgcaggctcggattccaaccccaagcccttaaggttacgaggcattcagtgcattcctgctgacaatccctgggattccaaaccttg

SEQ ID NO: 11605 - DNA, 1604 bp, Homo sapiens
cggagggagaagggagcatgagcctttgctttggatcctggtgggtttgtaattatgcctaagttgttgctaattagggggctgctaattagacgtatcattaggggccttgctgagggggctaattgtgcggtggccctttaagaatcacccctctcccccacccttgcctgcacacacacacacacacacacacacacacacacacgcacacaggcatgctcctcgcttgctctctccttcttgggaagttctgccaacacgctgcctccctcccccagaggagccagctcccagcccatgggtatgtaggtgtgagttggggacaggctgtgggttagactctcagaagaacttttcaagcaaatggaagcccctggaagaaatgaggctggtggcagaggggtctgggagggtggaggttcccaggacacctctcttcctctctccttctctttttgataagccactgggttaccatggcaacatgagggtggggcggaggagctcagagtcagggccactcttggagaggcgacctgggagccagagttggtgctggatgatgtgggcaagttccgtaacctctctgcgccttggtcctctcacctgtggaatggaggggtgctccccagagggggagggtgtcattttggatggggtgtttggggaagctgacatcagagtggaaacctgaaagggcagagagagcaaggctagcggatatgaggggaagagtgggcggggcacggtggcacgcacctgtgatcccagcactttgggaggccaaggcaggtggagcacctgaacccaggagttcaaaaacagcctgggcaacatagagactcccggctctacaataaattagctgggcatggtggcgcacgcctgtacttcccgctacttgggaggctgaggagggagggtcgcttgagccctggaggtcgaggctgcagtgagatgtgatggcaccactgcacttcagcctgggtggcagagtgagatcccgtctcaaaaatacataaatagagaagcgtgttcgaggaagggggaacagcaggtgccagggctccaaggcagaagcttgtctggtgaggctgaggagcagaggggaggagagggtggctgaggcagactgggcaagggggagagggtgggaaaagaggccagagagggagtcggggccaggttgggcaggacctcacgggccctggagaggacgctggtgctgtgagtgagatgggagctggcgggggttctgaacagtagggggatgaggcaagctgatttgtgggctttgtttttggttttgttttgtttttgaggcagagtctggttttgtcgcccagactggagtgcaatgacatgatctcggctcactgcaacctctgcctccctggctcaagcgattctcatgcttcagcctcccaagtgctgagattataggcacacgccaccacacctggcttttttttttttttttttttttttgtatttttagaagagacagggtttcaccatgttggccaggctggtctcaaactcctgacctcaagtgatccacccgcctcagcctcaaagtgctgggattacaggcgtgagcc

SEQ ID NO: 11606 - DNA, 1186 bp, Homo sapiens
ttgtttgtttgttttcgagacagagtcttgctctgtttcccaggctggagtgcagtttcccaggctggtgtgcagtggtgtgatctcagttcactgcaacctccaccttccaggttcaagtgattgtcctgcctcagcctccctagtagctgggatgacaggcacctgccaccaagcttggctaaattttatattccttttatattccttctaatctcacttccttacatttgggtctaggctttgtccctcccactagaaattcgcttaaggccactccccttcacccctgtcacagaggcccattcccatcccacacactgtggtctgctctctgccctcccacgtgggccgagctcctggcctttggagttgcttcactccagacggtcccgctgtggtcccacagctcttcctcagctccatccccctcattctcttgttccccacagcacagcctgattcaggcctcagagctggtcttgacccggcttcgacatcaagtggagcagaggagacgtcggctacaggggttggaggacggggcaggtgcagggcctgctgagaatgcagcctcttaagcacccatgcacccactcttcccagacctggggcgactcatggcgtgctcacctccagccgctggtggggggtgtcctgaaggacaggatgctctccccagacctccccagggtggtgaagctgtgccctggggccccagctaacccactcctctctctgtacgtcaatgtccctatttgaaagcagggatgatcccattccaccctgtccactctggatgagaattggccacctgatggttatttatacgtccagaagaacatcatttcccagttgtctcgattctttttttcggcaagcatttggtgagcacctgctgtatgcctggctctgtgttggatgctggattcacccagaggaattgagggagagggatttgggggagagggaatccaaggctagacccagatacaggccggaggttagatcccagggtagaacccaagagaaagaaatggggtgacaccttagcagaaaggctaaaagttaaaccactgtggaacagattacgtaaaatggaagggaaagagctgaggttagaccctagtggagagagctgacatgagaccccagtggaaagatctagatctaagggtagatccca

SEQ ID NO: 11607 - DNA, 1553 bp, Homo sapiens
cgcccaccaccacgcctggctaattttttgtatttttagtagagacggggtttcactgttagccaggatggtctcaatctcctgacctcgtgatccgcccgcctcagcctcccaaagtgctggtattacaggcgtgagctactgcgcccagccatggacctttttttttttttaaagctacaatatctttctcccccaagggaaatgatgtgcccagcatagtcaagacagacaagagggagctcccatggctgagttggggcctcaagccctccctctactcctcctcagagaccaggggtgacagagacagatcttgaaaaccttgggacaagtgcccttgggctgcagggttgggaacggggggagcatggccagcctatcacctggtgtgccctcaggtgaaggaatacgactccatctcccggctggaccagtggctcaccaccatgctgctgcgcatcaagaagaccatccagggcgatgaggaggacctgcgctaagccccacccagccccccagtgcccgtcttcctgtcccatctgctcagagagaggtggggccgagacttgctggagagcttccctcctttcccatctggggagtgccgcgggccacagtgggcaggtggcaccgggggtcagcatgcaggggcgccagaggcccaggctgctggccggacagtcaccctctgttctcgctacatcccttgccccctgtccatttatttaagcccccataggtgcccttcacccccaaaaccagctgtacagaatctttgatacagacctatttgctaggggtgctgccggggatttggggtcagcatctggccccctatctcctgaccagctgagtcatgaggccggtttctctctctctcccacttttgtcccccagccaagctctaaagcacatgtagccgctgagacctgctgtttctgctgggggcaggctcctcttcccccagccccgggagcctcccccagcttcctgcagccccgacctctcaggttagaccctgggccctggagcttaggggattctccccaccccagccccacacctgctccttccctaatgctttgaggttttcttggttggaagctgcagctggcccaagaaagaaaataaaaaacaacacttttgcatgagtctctcttcctcctcacctctgctacccactctgcccctgggccagtcaccagtccctctcacactcctggtcccccagactctgggcgagctcttgggaggtcaggcgcatgcatccttgaaacacgtgtgggctgggtcagtttctaggtgggggagacccagggacggtgggcctggggaggagctctggcttgggagtcccagagcgcccatcttgatctttctctgggttcttggggtccaggggccttgatttcctcaactgggatgcacggtggtgatgccacccctcagagccagtgggagggtcgaatgtgacggtcctcatgactgctttggatgagaatgggtggaagcccaccgaatctcccatgtccacatttctctggcaggaa

SEQ ID NO: 11608 - DNA, 1184 bp, Homo sapiens
tttccaagtgaagaaaccggcgagaccagccgcgggggcgggactaagttctgcgcagaactgtcaaacccgggcgtgggccccgagctgtcacgtgagtgtctgcggtcagctgactgtgccagagttccgcggggagggcgagtgggggaccccccgccccagcgcgagccgagggctcctgctgattggtggaggaggatccagcagcaacaccgtggggcggggcctcggcggggggtactgccattgccttccacagggtcacgtgggaggtgaggtacagagcgctggggagagagtggagcgccgttcgccggtatgtgcgcatgcgttgaggtctcttgacgccgattggggggtcacgagtcacgggcggcgtgcggcggctggtgggggcgtgtccggcggagcgggcgcggcgttacgaggccgctggttggccagcgctagtcacgtggttcctggccgcaagcgacgcgcgccggtgcgacgtcaacgcagccgggcgagttttaccgatctgtgttccgcggcccggccgcggctgagtcttcccagggtcagggtcaggcgctttgctgagtccctttgtggccgccatggacaattccgggaaggaagcggaggcgatggcgctgttggccgaggcggagcgcaaagtgaagaactcgcagtccttcttctctggcctctttgggtgagaaccgggctgaggggtcggccgggacctaggctgagaggacgaaggagtcacgctcggaggtggcgggttagggcacgcagagctcgggccgaggggacggagaggaacctgcaataaggtgacatggcctgaggcggcagaggggacgcaggctgagggccaagagcctgggccggggcaacacggtttgaggagagacggtctgacatggcggaagggatttgggctgaggacacacggaccgaggcgacactatcttgaggcgaggaaggggacccaggccgaagacaggccagcgggcgggggagaacctggaccgagggagtacgtcctgaagccttggaggggaccggcctggggggacggagggagtccgggagagaagccaggtccagaggcttttcggagctctaggggagtctgtttgaaggctctcaggcggcagtgatggggcctggggctgaggacgcctgcccga

SEQ ID NO: 11609 - DNA, 1211 bp, Homo sapiens
cgaggctggagtgtagtgaagtgctcgtagctccactctgcagcctcaaactcctgggctccagtgatcctctcacctcagcctcccaagtagctaagaccacaggcacatgctgccacccctgactaatttttcttttttaaaatttttttctcactgcgttgcccaggctggtctcaaactctttggctcaagccatccatcctcctacctcagcctcccaaagtgctgagattacaagcgtgaaccaccatgccaggagggaatgttctttcttgaacgtggctgccctgtcacctcagcattctttgcggcagctgtggcctaagcgtagccccttgctaacctcagctctttccttcccacctttcccggcctgcagctccatgtgcaagaagcttccggcaaccacctgaacccagagcccaaccagccggcccccagtgtggacctagacttcctggaagatgacatcctgggctctcctgcgacagggggcggcggcgggggcagtgggggcgctgaccagccctgtgacatcctccagcagagcctccaagaggccaacatcacggagcagacgctggaggccgaggctgagctggacctgggtcccttccagctgcccaccctgcagcctgcggatggcggggcaggcccgacgggcgctggaggggcagcggccgtggctgcggggccccaagccctcttcccaggcagcaccgacctgctggggctgcagggcccgcctaccgtgctgacccaccaggccctggtgccgccccaggacgtggtcaacaaggccctgagtgtgcagcccttcctgcagcctgtgggcctgggcaatgtgacactgcagcccatcccgggcctccaaggcctgcccaatggcagccctgggggtgccacggcggccacactgggcctggcgcccatccaggtggtgggccagcccgtcatggcgctcaacacgcccacctcccagctcctggccaagcaggtgcccgtcagcggctacctggcctcggcggctggcccctcggagcccgtgacgctggcgtcggccggtgtctcgccacagggggctggcctggtcatccagaagaacctctcggccgctgtggccaccacgctcaatgggaactctgtgttcggaggcgcgggggccgcctcggctcccaccgggacgccctcgggacagccgctggcgg

SEQ ID NO: 11610 - DNA, 1199 bp, Homo sapiens
caacaggcagcatttcttgagcacttactgtgcccgggtactgttccaagcactttgtcaacttgtttaatccttatgacaacccatcgttcggccccgtcatgtggatcaggaaacagtccagagtggaggagggaggagactgagcagggggtcgctggggctggaccgcaggagtctccatcccgcttccgcaggtggatagtgacaagggcatctcccttcgcttccctcggtttattcgagtccgtgaagacaagcagccggagcaggccaccaccagtgctcaggtgaggtcctgggaagcaggggtgggccgcccagctgcttggccctaccagctttttagcgtggtggcctctctggaaccttgtggaggtgggagcagccagggagcttctgaccaccccgtcccaccctctctccgcaggtggcctgtttgtaccggaagcaaagtcagattcagaaccaacaaggcgaggactcaggctctgaccctgaagatacctactaagccctcgccctcctagggcctgggtacagggcatgagttggacggaccccagggttattattgcctttgctttttagcaaatctgctgtggcaggctgtggattttgagagtcaggggaggggtgtgtgtgtgagggggtggcttactccggagtctgggattcatcccgtcatttctttcaataaataattattggatagctactttgtgacagggtctgtgctgggctctgggggcaaagctgtcatgggtgtcacctgcatagcatgtagccatgtagccatggcctaggaactgccagagccagtgccagccatggaactgcctgcagtggtgggcgtcttctctatctgctctgtgcagtgtgaccgccactggccacctgcaatgcccgagcccttgacaggtggccagcatgacagaggatgcgaatttgttttgttttgttttgttttgattttgttttgagacagagtctcgctctgttgcccaggctggagtgcgatgatgagatctcagctcactgcaacctccaccttccgggttcaagtgattctcttgcctcagcctcccatgtagctgggattacaggaatgtgacaccacgcctggctaatttttgtatttttagtagagatggggtttcgccatgttggccaggctgatcttgaactcttggcctcaa

SEQ ID NO: 11611 - DNA, 1186 bp, Homo sapiens
gatgaggctggatgcagtggctcacgcctgtaatcccaacactttgggaggctgaggtgggtggatctcttgtgatgtgcacctgtagtcccagctactcgggaggccgacgcaagacagtcgcttgaattcaggaggcggaggctgcagtcagccaagatcgcaccaccgcactccagcctgggcgacagagcgagattccgtctcaaaaaaacaaaaacaaaaaacaaaactgatgagatgcccgtaaagtgttaattcaagctccagcaaggccgcagccccccgtctgatgctcctgaagtcaccgactctaaatggtgtcgggccctcttgccagtgactagccccatgctttaagctctcagaatccttctgacatcagggttcttccctctcaaggctttccacgaaccctgtcactagttgtgacccgcacatgtcctgttcgcctcacatttagggcttattgtctttattctcacaaagatgtctcatctctcttctccctgccggccctgcagtccctggtacgtgagcccctttcccggcgccggcagctgctccgggagaactttgtggagacagagggcgagtttgtcttcgccacctccctggacaccaaggacatcgagcagatcgccgagttcctggagcagtcagtgaaaggtgagggtgctcacttttctctcctgaggtctgcagcttgcgctgaccccggcctcccagcctgtccccagtcctggaccgtttgaccagaatcctgcctgctccggcgcttgtgagccagggcttcccaaggaccacgcttctgtgtctccctcagactcctgcgaggggctgatggtgaagaccctggatgttgatgccacctacgagatcgccaagagatcgcacaactggctcaaggtgattctcgacccccaactgggccttctccaccccgggtctggaggtctgtcccagctaggcagtggatttcgagcctccactgtgtaccctgtctgagctcagggccccttttcacaatcccaccccagccccctgctgcaactgagttcagaccttctccctgctgcgagcccttgctcacgagttctgatggagaacagccccagcccaagcaccgcacatcccacgaggtgcagcgtgatgaggtgtctctctcctgagcctgccgcccgtg

SEQ ID NO: 11612 - DNA, 1280 bp, Homo sapiens
aacggaactcgggccctggcgcatctgcaggccctgacccccagcatgggattgtacccacccccgggtttccccaaactagacccagtggctccgatcacttccgagcccccgcaagccacgcccagcagtaacatctcctgagtagaacctacctccctgcccagtcagcaggctaggaactaagccccgcctccttcacgacaggctgtcaattacggttattatacttttcactccaacttccaataactgacaggtgattatttttgctgcactgtgtgcttaagcaaagcagccaatcaaagcagctagcagttgttaagtcttccccgccccttcgatgaacagccaatcaaagcgatttagctctgcttctgttccatttcttagtcccaccctcaccataaacatccaagtgtggtttggctgaggagctgagggtgtctgccaatcacagctgctcagctctggcttctgtaaaccgccaggtagaagagttaaagctgcgccctcccgagactatatatcattgtctttttcagcccgctccgggcaaactgcccatcatgtgcaccaaggccgttagccctgcctcctggcaaacgtccagtgacagctgctgggttccatcaactttgggcagccggttgtcgctgcagggaaggaaccaataagaatttctaaaggaaacctgatcttgctatcaattgctgctgcttaaatggcaggccaactggtcagctgctgatcagggtgtctaggctgaaggagttggagaccttgtgctaggtaggtgaaccagaaaccaccctcgccaccaagactcgctcccaacctggctcccggcaacctcaggtgccttcctcgcccaggtctttcaccctttctacagaaactacctcggtctggatctccccaccaccagcagcctgtgcaatatttattggtctatcaatttctcccgtctcctgtcccaaagtaataaatcatgtttaataagtctggatgaggctactcttaacgcactgcctttagggtaaccctgctctgtaggagtggttaaaaaattatttttaaaaatctagatgagtgggatggctgcaggagttggagggaaggaaagcatttgaatcctggaaagaggggagggactctagctaggtcttggggtcccagacagagaaagctgtagtcctaaaaagaggctgggttcatggtcggtgaaacaaagacagtcatagaagaggatcttagaaggatctgattccagaggagtc

SEQ ID NO: 11613 - DNA, 1251 bp, Homo sapiens
ctcaaaaaaagaaagaaagaaaattgccagtagtgagaaagggtaggaaggaaagaaaccaggaatgtatctgtgagtcctgggggacctccctccctgtggatctgcccatctagcgtgcctgccctgctctggctgtgggaggctgtcccctccctgcaggggccccagcggtaatgccctccctgttttctctcctcacagtcctaaaggggaagaagttgagtttgccggcatagccccggtcctctccatctctctcctcggcagcagcgggaggcagaggaaggcggcagaagatgaagagctttcccatccaggggtgacttttttaagaacccacctcttgtgctccccatcccgcctcctgccgggtttcagggggacagtggaggatccaggtcttggggagctcaggacttgggctgtttgtagttttttgccttttagacaagaaaaaaaaatctttccactctttagtttttgattctgatgactcgtttttcttctactctgtggccccaatttttataaagtgtttttgagtgtcctatgggccggggcagggtccaagatcttttcccttccccaggcccctcggctccctcccagatcccacccccagccccactggttgccaaacactaaatctgccgacacccatctgccccacctcctgccatggccatgaaccgcgacccccactaaatttctagattggggatagggagaaagggaggcccaggaaggtctcccctgattttttttcatagtaatttttttccccagagtttgaattttttggtcttctcctggttttttggcaaattaggggggcccggggctcaagtgcgggaagggggctggcccgaggatcccatggctctcacaccatgtttttgtacagaactgatggttgaatctttgttctcttgaaataaacagaagaaaatgaaacctttcttttgctgctccttgccactctgtccctggtgtgtatggggtcccgcccccgcccctctttctgcttctgcttttgccttattgactatctgtaggcgacgaggcctaggaggagcaggaagaggagaaactgggtctcccaagactctcagctgtgcagttcctcgccgtgctgctgggaagaggttttggagagaatcttgaagagtcttcttaccttggcacagaacttgtctgatggttctccaaaccctcagggttgcagaggaccttcaggagaattggctg

SEQ ID NO: 11614 - DNA, 1221 bp, Homo sapiens
ggggaggagctggtcatggacgaggaggcctatgtgctctaccaccgagcgcagactggtagggctgagtccggactccagggtcctgaggtggctgatcccgagcctttaacctgagaggtgctcgggaagagaaggctggggtctaagagaagtgatttcataccggaggcggttgatccatgagggaggtggggactgagctcttactgtcccgtcttaactcgtaaaccccgccttccatccccaggcgccccctgtctcagctttgacatagtccgggatcacctgggagacaaccggacagagcttcctcttacactttacttgtgtgctgggacccaggctgagagcgcccagagcaacaggtaagacccgaggcttttccaggaccaggaggctcagtttccagccccttcctcagcacccaggagttagggcttccagtttctgcctctcgcagatccaggagtctgggtttccagcctctctccttcctaagaatcctggaatctagtgcctaactcaccccacaatttctcccagactgatgatgcttcggatgcacaatctgcatgggacaaagcccccaccctcagagggcagtgatgaagaagaagaggaggaagatgaagaggatgaagaagagcggaaacctcagctggagctggccatggtgccccactatggtggcatcaaccgagttcgggtaagtatggtcccaggagcctgctctgcatactctgaaacacatctgacccatcccctgtgtccataactcccaacacctcctcatgttcttttttttttttttttttttgagacgtagtctcgctctgtcacccaggctggagtgcagtggcgcagcctcggctcactgcaacctctgcctcccaaagtgctgggattacaagcgtgagccaccgtgcctggcccattttttttttttttttttttgagatggagtctcgctctgttgtccaggctggagtgcagtggtgcgatcttggctcactgcaacctccccttcccaggttcaagggattctcctgcctcagcctcccaagtagctggggctataggcgcctgccaccaggcccttctaattttttgttttttggtttttttttgagatgaagtcttgctctgtcgcttagactggagggcaatggcatgatctcagctcactgcaacctctgcctcccaggttcaagcgattct

SEQ ID NO: 11615 - DNA, 1288 bp, Homo sapiens
tttatgagtcgcaccaaccggccgcctctgtccctttcccggatggtgagtggctggtccagagagcacggtagacctgggagccgctgggtcttgtctgtctggaagggaggcaggacttggagctctgggagcaaccagggcatcaagggtttgtctcagccagtcgcgagcgtagagcttggactgttggttggaactgagtgtccatgggcagtgggcaagtctcctggtcctcctctccttctctttgtgaggtggaggtgtcctggtggcttcaggagattgccccaagtcataactgagttttatgtcaaaggctctgctgagggaggccctattgaacagtctgcatttttttttttatctggagctttccccagctggacctgaggagaggcctgtggggtttaaggggtgtggtgtgagtggggggtcccgttagagggcacagctgccctggcctggggatgcctcaagcggggctgaatgtaaacaccagaacaacttacgacgtacatcctccccaccctaagatccggaagatgaagcttcctggccgggaaaacaagacggccgtggttgtggggaccataactgatgatgtgcgggttcaggaggtacccaaactgaaggtgagctggcgggggctgggcagacccatcagacccttgctgtactgtgctgtgctgtgctgtgctgtgctgtgctgtgctggtccatcctcagtcttgccaccgctggtgaggcaagcatcctgcctgtctgagtggctttgaggattggtgtgggtcgtctctggcatggttgatggtggggtcccctgggcaagcttcttctggggcaagttgtaaactgttagtgctggcccctagagccagacagcctgggctcaagtctagactcctttgtcacctctgcacaggtctttttttggcccagcttccttgctgtagtttctagcataacaccagggatgtggtggtgaaagttccggaagtgttgagaactgctgctgtcagcccagggtgctccgggtagtaaacgatagtgttggttaccagggctctgctgcgccaaggcagtggagggtgagtcctggcagcccctgggtgaccacgcaggggtctgacccgccagccttgtcctctccaccaggtatgtgcactgcgcgtgaccagccgggcccgcagccgcatcctcagggcagggggcaagatcctcactttcgaccagctggccctggactcccctaagggctgtggcactgtcctgctctccggtgagt

SEQ ID NO: 11616 - DNA, 1231 bp, Homo sapiens
ttccagatgccccgactagccctgccagccccgcctcctcacctccaacactgggcccgccgggtcctccgggagccactgagaggccgtcggcgtcgggccagagcgtcaccgcgcgacgcatcgtgctagctacacgcatctcgctcccagatccctttcttccggaaagctatcgagaacacggcctgggtagggccagagaggcccccgacgtgctggcccttccctcttggacgttgcgcttgttcctgcgctctatgctctctgccgttatcgcccggctagtcagtcgtccaactcaccacagagaagtccggatcgtggtagagcgccgcgtcgcacccatgtgacgtcacggcggcgccactcgcttgaggctttccccgcccaccccagcccgttctctctttccggacctggccgagcaggaggcgccatcatggtgagctcgctttgcggcgttcggggctggataatccgctgccatccgccgtggttttgggctaggggcacgctggagggcggcagggggtctgcggctgcccggagggagcaattcccgatactggggacctactctgggggccaggaaagcagggatgggtcagtcatagcctaccgcccccacttagtagatgaccaagtggaggtactcggaggctgatatgactgggtttacaaagccaggaagtggcagagccaggattccgacccaggtggctggacccgcagccactcttagttatttggctttgctgcctttatctggacctgtcactttctagtatgaaaagtcgggttcgatgggggccgcggcgggtgagaggatcgagagccgaataactggatttggggaccaggcaggtctctgagtctcaggccccttcccaccttgtgatggtttttgagcctttgccccagtgtctggctgttcgttgggtacacagtaatctcatctgacaagtttgtgaatttgggaagaaataattcacaggagatgctcatcacggggttttgcacacagtaagtgctgcataagtggagctattaaatagttcttgtaattgtcaacacagtctgaaaaacttaagttgctcagaaaggcagcagggcggtaggagcctggcgaggcggctcacgcttgttatcctagcactttgggaggccgaggcgggaggattccttgcccaggagatcaagaccagcctggccaatattgtgagaccct

SEQ ID NO: 11617 - DNA, 1108 bp, Homo sapiens
agtggccctagcaacgggtctagtggggtactaaagcctgggggccaccgttccaccgcgggagacccgtagttacctgtcctctgataacagaccccacatcagcccaaaatttcttcaccagggaccttacacatcccgtcctcggtcccctgagataccttgctatcctcttcccttcagatatcaacagtgatggtgtcctggatgagcaggagctggaggcactcttcaccaaggaggtgagcatcttggaagcctcgggcacctggagggacgcccaaatcagccacttgtttcctcctgcagtccccttaaatccccctggatgggagctcagtgaaaactacaactcccatcagcccctggggcaaaaacggctcccaggagtggtagcgtgcccaaaggactgctgggagttgaagttgtcgggaatgagctcgctggggacctctcaatgctgtctgcctctcgcttgctcctgcagctggagaaagtgtacgacccaaagaatgaggaggacgacatgcgggagatggaggaggagcgactgcgcatgcgggagcatgtgatgaagaatgtgaggtgggggccaggcgggggagaggacgggcccccagctctgtcactcacccttatctggctccccaggtggacaccaaccaggaccgcctcgtgaccctggaggagttcctcgcatccactcagaggaaggagtttggggacaccggggagggctgggaggtgagaacatgggggatactcggggtcctgaacctctctctcttctagccatgacctttctttcagaatcttaggccccttctctttctctctgggtccccgtccattctcctgggtcactgcatctctatctctgggtctctgttttcccctgtctctaggactcttatttatttatttatttatttatttatttatttatttattctgagacggagtctcactccatcgcccaggctgcagtgcagtggcacgatctcggctcactgcagcctccacctcccaggttcaagcaattctcctggctcatcctcttgagtagctgggattataggtgcgtgccaccacacccagctgatttttg

SEQ ID NO: 11618 - DNA, 1575 bp, Homo sapiens
gctggacccctgggtgtgagggaggaggggctgggcctctggggtcctgggggaggaggggttcggatgtcctgtgccaccattccctccctccatttccagacgatgtacctgtcccagctccagccggtgaccagaaggaggtggacacttcagaaaagaaacttctcgagcggctccctgaggttgaggtgccccagcatctgtgatcctccgggaccccagccctcaggattcctgatgctccaaggcgactgatgggcgctggatgaagtggcacagtcagcttccctgggggctggtgtcatgttgggctcctggggcgggggcacggcctggcatttcacgcattgctgccaccccaggtccacctgtctccactttcacagcctccaagtctgtggctcttcccttctgtcctccgaggggcttgccttctctcgtgtccagtgaggtgctcagtgatcggcttaacttagagaagcccgccccctccccttctccgtctgtcccaagagggtctgctctgagcctgcgttcctaggtggctcggcctcagctgcctgggttgtggccgccctagcatcctgtatgcccacagctactggaatccccgctgctgctccgggccaagcttctggttgattaatgagggcatggggtggtccctcaagaccttcccctaccttttgtggaaccagtgatgcctcaaagacagtgtcccctccacagctgggtgccaggggcaggggatcctcagtatagccggtgaaccctgataccaggagcctgggcctccctgaacccctggcttccagccatctcatcgccagcctcctcctggacctcttggcccccagccccttccccacacagccccagaagggtcccagagctgaccccactccaggacctaggcccagcccctcagcctcatctggagcccctgaagaccagtcccacccacctttctggcctcatctgacactgctccgcatcctgctgtgtgtcctgttccatgttccggttccatccaaatacactttctggaacaaatgcatggctccatgcctgtgtatctggactggtccctccaaaacgctattgccacgtcacctgccggagtcctcatctttgaagactggattcaagcatcacttctgagaggctcaatcctggtatttttccatctgcccctgatgagtctgcagccttcactcagggtcccttcagccacaaggacagaaaacccaaacctgggattaagcaattttttttttttttttttttgagatggagtcttactctgtcacccaggctggagggcagtggtgtaatctcagctcactgcaacctctgccttttgggatcaagcgattctcctgcctccgcctcccgagtagctgggattacagctgcctgccaccacgcccggccttctaatttttgcattgttttagtagtgatgggggtttcaccatattggccaggctggtcttgaactcctgacatcatgatctgcccaccttagcctcccaaagtgctgggattacaggagtgagccactgcacctgg

SEQ ID NO: 11619 - DNA, 2019 bp, Homo sapiens
cagaatcttactttcccgaggcaccccaggaccccagggtcatcagttcacagggctgttagtgctcccataaaactctagcctcccagagggaccccagcccccaccctcccgcccacgaacccctgcatttccagaatcagccccagggccccaacccccccaagcccccatttcacaacacgctggcgctacaggcgcgtgacttccccttgctttggggcggggggctgagactcctatgtgctccggattggtcaggcacggccttcggccccgcctcctgccaccgcagattggccgctagccctccccgagcgccctgcctccgagggccggcgcaccataaaagaagccgccctagccacgtcccctcgcagttcggcggtcccgcgggtctgtctcttgcttcaacagtgtttggacggaacagatccggggactctcttccagcctccgaccgccctccgatttcctctccgcttgcaacctccgggaccatcttctcggccatctcctgcttctgggacctgccagcaccgtttttgtggttagctccttcttgccaaccaaccatgagctcccagattcgtcagaattattccaccgacgtggaggcagccgtcaacagcctggtcaatttgtacctgcaggcctcctacacctacctctctctggtgagtccccaggacgcccctggccctaatttcctccagctgcgcacctccggccctcactgcacgcgccagccttctttgtgcggtcgggtaaacagagggcggagtccccttggcctcgcctcccgctaaccattgttgcctccatctcttcccgtagggcttctatttcgaccgcgatgatgtggctctggaaggcgtgagccacttcttccgcgaattggccgaggagaagcgcgagggctacgagcgtctcctgaagatgcaaaaccagcgtggcggccgcgctctcttccaggacatcaaggtaactagtgtgtgggtaatggactacatctcccagcaggccgtgcgcgcgaggagccttgatttgagggcgtaggtgtcgcgtgggcttctgggagattgagttcggtcttgtgagccctcttaaccgctggaaatagaggcgcacctcgtgcagtgcccacaacacgcggcagtccacaccgctgcgtggtcttagggacgtatagctgtaagagctaggacagggtgcggagagtgataaatacaagctgtcacatgtctttgtggcctgggcctctgacccccaacgactcttgggaaatgtaggtttagttctatgtgccgagtgtgtgtattctgagccatttctcccttctatatagaagccagctgaagatgagtggggtaaaaccccagacgccatgaaagctgccatggccctggagaaaaagctgaaccaggcccttttggatcttcatgccctgggttctgcccgcacggacccccatgtacgtacccgctgcatccatggctacccaaccatacccctcaagcctctgctccctttgggcaaatttccttcagagcctcatttcacacctgtcacattttaatctgcaactggctgctctctccccctcttttccagggattgggtttctaatttctccctcttctctctcagctctgtgacttcctggagactcacttcctagatgaggaagtgaagcttatcaagaagatgggtgaccacctgaccaacctccacaggctgggtggcccggaggctgggctgggcgagtatctcttcgaaaggctcactctcaagcacgactaagagccttctgagcccagcgacttctgaagggccccttgcaaagtaatagggcttctgcctaagcctctccctccagccaataggcagctttcttaactatcctaacaagccttggaccaaatggaaataaagctttttgatgcagctggtggttttgtgtgtggtgtggaagatgaggtgggatctgttctcataaagcttctggctgggttggga

SEQ ID NO: 11620 - DNA, 1116 bp, Homo sapiens
gctacgatgaggacgaggaggccgccaaggaccggcgcaacatccgtgcaccagagtggccgcgccgagcgtcctgcacctcctccaccagcggcagcaagcgcaactctgtggacacggccacctccagctcactcagcaccccgagcgagcccctcagccccaccagctccctgggcgaggagcgtaactaagtccgccccaccacactccccgcctgtcctgcctctctgctccagagagaggatgcagaggggtgctgctcctaaacccccgctccagatctgcactgggtgtggccccgcagtgcccccacccagtccgccaaacactccaccccctccagctccagtttccaagttcctgcactccagaatccacaaagccgtgcctttctctggctccagaatatgcataatcagcgccctggagtcccctgggcctggaccgcttcccagaggccaggaatctgccattactctgcggtggtgccagaggttttaggaaacctggcatggtgctttcaggtctggggcttttagagccccccgtgtggcttacaaattctacagcatacagagcaggccacgctcaggcccggcatgcgggccaccaagttctggaaaccacgtggtgtccctgcgaatggggcgatcaagtccagagccggggcactttcagagtttgaaggtaactgagagcagatggtcctccatttcaactccagaagtggggctctgggagggatgttctagccctccctggcatgtcagagccaggctctgcctggaggatccctccatccggctcctgtcatcccctacactttggccaagcaagaggtggtagaaccacttggctgctcattccttctggaggacacacagtctcagtccagatgccttcctgtctttctggccctttctggaccagatcctactcttcctttctaaatctgagatctccctccagggaatccgcctgcagaggacagagctggctgtcttcccccacccctaacctggcttattcccaactgctctgcccactgtgaaaccactaggttctaggtcctggcttctagatctggaaccttaccacgttactgcatactga

SEQ ID NO: 11621 - DNA, 1213 bp, Homo sapiens
aggttgtactagtgggaatccacaactcctggtgatcacttgggtttgttgccccacgtccggtgcatttgtggtctccttggctcccccagggtccgcatggctcatgaggaagtagggagttctctgtcccttccatgaccccttacccttcttgtggctcctgcagcggcagtctttcccccctgtgtgcacccacaatatgctggatgactcctcagaccccatcctgaccaccatccgccgaatcggcctcttcaatagcagtgccgacagggtgaaggtgagggcatttggtcagggctgggttgggcacggcagagggaaggggttgggtcctgggcctcacacactccattcccctataagttttatcaaaggtattgctgtggttagaaagaaccctggcttctgaggcaggcagacctgggtttgaacattggtcctgccaaacacatgctgtgtgatgctagacaagctttttaccctctctgggccaccttgggatctcagggcttagctaaataaggcacttgggctgagtccttctttttcactaccaggtgattttccacccggagttcctctcctccacaagccccctgctccctgtggactatgaggagtttgtccgtggctgtcaccttggagtcttcccctcctactatgagccttggggctacacaccgggtgagtgtagtgggcaggggacagcgtggtcatggcatcctagtcagagctagcatgtcttggggcgaggcactggccttctctgagcctgttgccttctttgcaaaacaggaacaatggtaatcacctgttctgctacagcgcgtgcttttgtgatacaatagctcatgtattgagaaactagaagactgggttttgaggactagtgaactggatgtcacagttcacactgctttctcccagaaagcagtggccccccaaatagtggcaatgaaatgcacaattcacaaatacagccgagtgtggccaagtctcctcgtaagacgttcccagtgcccatcaactccaccttcctcttgttggttcacattagccagtgtttttaaagctaaataaggctgggcgtggtggctcatgcctgtaatcccagcacttggggaggccaagatgggcagatcatgaggtcaggagtttgagaccagcctggccaatatagtgaaaccctgtctctactaaaaataca

SEQ ID NO: 11622 - DNA, 1050 bp, Homo sapiens
gctcacacctgtaatcccagcactttgggaggctgaggagggcagatcacttgaggtcaggagttcgagatcagcctggtcaacgtggtgaaatcccatcggtactaaaaatataaaaattagccagatgtggtggcgcacgcttgtaattgcagctactcaggaggctgaggcaggagaatttcttgaacctagaaagtggccgagattgcgccatcctgggcgacagagcaagactctgtctcaaaaaaaaaaaaaaaaaaaaaaaaaaaaaaaaaaaaaaaaagaaaagaaaaaagaaaaagagacaaagaaagaaaaataaatgaggccagagctatgggaggattttaagtggaggagtgaccgtggggctgttgtgtgacactgctagctttacttgtgtgcctaagtggtcctttctcagaatcttactttcttttcgtataaaatggggcttagcattgccatctgcaggacaagtacaagtcctaataatagctgacatttctggaaggcttgccatgtgtactttttggcatgacatcattgggtcctcatcgcaaacctctgaggttgattctattttcatcctcctctgaaaaatgagtcactgcagtcagagagggaaggccacctgtccctgaccacacagctgatgtcaggcacgtgggtcctaagccttccagggcctgccccctgggtccccatcctccagcctggaggccccagggcacggcttccctgctcacacctcagtttccttgctatcctagaaacctaagggtagctgggcgcggcagctcatgcctgtaattccagcactttgggaggccgaggtggccaattaccagccagaggtcaggagttcgagaccagcctggccaacgtggtgaaaccccgtctctactaaagttacaaaaattagccgggcatggtggcaggtgcctgtaatcccggctactcaggaggctgaggcaggagaattgcttgaacctgagaggcagaggttgcagtgagccaagatcgcaccactgcgctccagcctgg

SEQ ID NO: 11623 - DNA, 1233 bp, Homo sapiens
agccgggcgtggtggcgggccgctgtagtcccagctactcgggaggctgaggcaggagaatggtgtgaacccaggaggcagaggttgcagtgagccgagatcatgccacggcactccagcctgggcaacagagccagactccgtctcaagaaaaaaaaaaaattagccaggtgtgggagcgggtgcctgtaatcccagctacttgggaggctgaggcaggagaattgcttgaacccgggagacagaggttgcagtgagctgagatcgcaccactgcactccagcctgggccacagagtgagactccatctcaaaaaaaagaaagaaagaaagtaagcagggggcacggaaaatattgcaacagagatggaaaaaatgtgtagcaggaataaatcatgcaaatagagaagtaaggctaaggcagcaggtgagaaattagcagcagatatggaaacagaagataagagagctgaggcttaagtctatagacatctgcctgcaaatgggagaaccacggatgagtgaagatatgaggctgaagcccagagcctccctatggtgcctccccaaccccatcccaggtgtatttcgggcgctggctgatcgagggaggccctctggtggtgctcctggacgtgggtgcctcagcttgggccctggagcgctggaagggagagctctgggatacctgcaacatcggagtgccgtggtacgaccgcgaggccaacgacgctgtcctctttggctttctgaccacctggttcctgggtgaggtaggccccgtctgacacattccacccatacctgaaactacaatgaccatcagcccctgggccagaggatgggcttctccctgggcattctgggagtcatagggtcctttaatccaaggattagctctggcctttgaggacatgaacatccaagggcccaggctctactctcgatgccaacttcatttactctagtcttccaagcatagggattcttggaatcagcctcaaagtgaggctggcgggcttgcccgaggaattctaggagttgtagttctctagtgtgatattgctggactcagctctcagatgctgccctggatgctcatgaatccccagcctgacctggttttgacccccttctaggttttaagaggctcaagaagcttagtttccaggctgggcacggtggctcatgcctgtaatcccagcactttgggaggccgatgggggaagatcac

SEQ ID NO: 11624 - DNA, 1262 bp, Homo sapiens
aatttgagctttctaggtcacattgggttaagtttgtatgaccaaatgaatcttgtagggttctgttgggcttaactgtgtagaggtgtgtggctggacatttttcgtggccacagcgagttgagttgtgttgaattgtacaaccatatgagccttgtaaggccagttcagttgggtcatgccactgtttgagtctcatagggccatgctgaattgagttccattgagttgtgtcactatgtgagtcctacaggaagttgggttgagttggactgtgcgaacgagttccatagggccacatcgggctgttttgcatttagtggtagcaccaggacccaaaggaaatagcagtggggaagcatcatgtatctgggagcatgcagtggcgagggctctgggaggtgtgccgagctggctccccagctcgctgtagggggcgggactggattctgtatccatgggattgggtgttcatccagaggcgactgggtaaattaggaagaggtggatgctcctcctgtttaccccacatccacttcattgtgctgttcactcccattctcccctacagttttatgctcagacatggaggtcagagccacaagggaaaggggagagggggagaaaactgtactctgtccagacatgatagagggacagagccaaaaggatagagaaagagacccagaaaaaggaagaggtggaaacccagagagacagagacccaaagggagagaaacagagactcagggagagggagacaatgacctggagggtggggtatggcagagacgcagaagagaggaacagaaatccagagtggggagacagagaccaagagcaggggatagaagccgggcgaagtggcccatgcctgtaatctcagcactctgggagaccgaggaagggggattgattgaggccaggagttcaagaccagcctgggcaacatggtgagaccccatctctacaaaaaatacaaaaattagctgagtgtggtggcacatgcctgtgatcccagctactcaggaagctgaggcagaaagatcccttgaccctgagaggtagaggctgcattgagccatgattgcaccactgcactccagcctgggcaacagagggagcccccgtctcaacaaacaaacaaaaagagccagtgggggagggagggacagagacccagagggcagcgtcagacacccagagttggagacagaacaacagagtctcagggaaagagaaccacaatagaaaaaggcaga

SEQ ID NO: 11625 - DNA, 1186 bp, Homo sapiens
gcaggggccccgccaggccccctgggagtgtataacccgcctctctgctccctgccatttcctgaagatttctcccacccccttctggttcattttctgttctgatgtctgttccccccacactcacccccctccaaaaaaaacaaaaacagaaaaaaccggtgtggtctggggtgcggagcgtcccagctgggcctcctgccccggcttggtgtctcagggtgcatgcttggggttgtggaggagccccctcccccacagcagagtccagcgtggagttaaccttcagtttctttgcagcgattttggccgccctggcgggagggggctgttccatcatgtgggagaggaagggccggggagcctagggggtggcgggtgagggtggacgtctcccccgaccaggagtggttggggcgctgagaggaagcagacgctgagatggagcaggcccttcaccggtttgggagagggttggtctggctgtcagttgcctggctgtctgttgggcgtgtgcgtgtgcgtgatgatggggacacggggcggggattctgtagagctgggcctgtcctgactagaggaccctctggggactcctctcccctccccctccccacatctgttacagccgcttacaaacacgcagatggcaagaagattgatggcaggagggtccttgtggacgtggagaggggccgaaccgtgaagggctggaggccccggcggctaggtgagcacatcctgccttcgacgggctctcgggggccctgggcctggtggccttgttctcccttctctgctgctttctgcttctctgtctcctgccggcccacctctcccatcgcgtcctcatctccggcttctctctcttgtggccatcacatttctgacagctgcctgcctcctcgttctgggttactgtgaggagcaggggcaccagcctggagaggcctgagcccacatgctggcgtccgcccttgctagctgggggtccccttttcctgcctcattgtactcctcttagtggaaataaccccgagttcactgagctcagtgtactgggcgcccagcttggcagtgacgcatgctggggttgtaaatgtcactcgctcatctgcttctgctgcttgctgttgctcttgttcactcttttactgattcagcaagtacctattggatcaccagc

SEQ ID NO: 11626 - DNA, 1309 bp, Homo sapiens
gatgacacctcccgctacgatgagaggtaagattgggcgaccggtgtcctggggtggggggcggtcacggggggagcccagccacacaggtctgcccacctcatccaggcccggcccctccccgcttccgcacagggaccgggaccgggaccgtgagcgggagcgcagagagcggagccgggagcgagacaaggagcgagaacggcgacgctcccgctcccgggaccggcggaggcgctcacggagtcgcgacaaggaggagcggaggcgctccagggagcggagcaaggacaaggaccgggaccggaagcggcgaagcagccggagtcgggagcgggcccggcgggagcgggagcgcaaggaggagctgcgtggcggcggtggcgacatggcggagccctccgaggcgggtgacgcgccccctgatgatgggcctccaggggagctcgggcctgacggccctgacggtccagaggaaaagggccgggatcgtgaccgggagcgacggcggagccaccggagcgagcgcgagcggcgccgggaccgggatcgtgaccgtgaccgtgaccgcgagcacaaacggggggagcggggcagtgagcggggcagggatgaggcccgaggtgggggcggtggccaggacaacgggctggagggtctgggcaacgacagccgagacatgtacatggagtctgagggcggcgacggctacctggctccggagaatgggtatttgatggaggctgcgccggagtgaagaggtcgtcctctccatctgctgtgtttggacgcgttcctgcccagccccttgctgtcatcccctcccccaaccttggccacttgagtttgtcctccaagggtaggtgtctcatttgttctggccccttggatttaaaaataaaattaatttcctgttgatagtgggcacctcggtttcttcctcactgctctgttttccccagaaggttgttcctgacttgatagccctgcttggtttggtttccagggtgtacttaaaacttgagcgttaggacatgaggctggctctgcccagtagccagagctgttgaaagtggggtgaggcggcctctcgggctccttgtctcccttgtgtttttcacccttttttctttttcatctctgccacacattcctcagggctgaccatacccctgtcttggtggggggctgggaattaggagggggcttgattactcaggggaagccgcagttttgaatatgcaagggaagctaccatctgcaagggagagcggcacacagggtgaggaaaggcagaatacactgggca

SEQ ID NO: 11627 - DNA, 1122 bp, Homo sapiens
ggggtctgcaggaagggcagggcctaaagaaaaggctgggctggctctggaatacagatgtctagggaggggccaggcttggaaaaggtgaagcgagggtgcactagtaaggagactagagtgccctggtgactaggggagcgggtagatgcctgaagacggtgagggttggcctgaaaagaacgctgggcctgggcttgagagtcccagaaagaatccctttaacttttccctacaccccccagggctgcgcgcagggcctccagaagtggctgcacaacaaccttatttccatagtgggcatttgcctgggcgtcggcctactcgaggtgatctggccccgcccccacccgcgatcggccctaaatccctagatggccctgcccttcatttcgcgtccttcggttgcctgggaaggacgagctcagggcggagcgcagcccaccccggccctcccgccgctccacccagcaccggagggtgggggcggcccagcttcagggagccctgattgggtgtacgcagggaaagcctcctgctattggctgcgatctccctcccctttctccgcagatgactgtcatggtgctgagcgtacagctacagcgcagggcactccgccggaaatgcgagccgcacgtgccgggcgctggggattcgagccccgggcccagcctgatcgctgacggcggcggcgggcacagcggcagtctgtggggtggctggggcatggcgggtgcctgccccaactggggagacaaggcaccgcagggcaagctgcccatggccctggggctctggccgctgtgggttcaagacgaggaccagcctgacactggaagtgcgggcgcagaattagaggaggcacaattagaggctgaggcagagggggaagacagatgagcctccaaaataaaggaccctgggcttgcttccgaccttactccttctcagcctctacccccacttgtagcagctattcccgcctcatcagccagccctgcggcagttcccgtcgagccccgcccttttctacctatccccttctccagccccttcccgcccaattcacggccccacccctgacctttctcgcccgggtgggcatcacccccgtctcgc

SEQ ID NO: 11628 - DNA, 1539 bp, Homo sapiens
cccgattaaccctgagatgtgatacaccataactgccaacgctcagctgaggggtaacccccattgcccagggaactgacttttgggcatccctttctcctggggaacatgatatggtggcggcctgtttcctggagatggaaaagagcctgctgggtattccatgatagcttggcaggggggcacaggggtccctgccctcccttctaagcataagtcccttgtcctggccttcctggcaggtggtgacaaacagagacacccaggaactgctgctctgcaccgcctatgtcttcgaggtctccaccagcgagcgtggggcccagcatcacatttaccgcctggtcagggactgaagggggaccccaaaactggctcaccccccagaacaccctcctcccagggagggtcctccagctcacctcatgcttcttatttggggagagggctgtgatgtaaaggggttgacctcagaggcctaagcaactggggccatcccccccattagaggggcccccaaaacttggttggagagctgaacaggctgggactgaggaaaggataaaccccgatattgggacctcacagtgggtgtctgaaaggacagatcactccggagtatcagggattgtggggacaggagtgagacaaccccccaggtacagcactggcttttcttttcagcccctgacaggccacccccactcctctgcatgtcttggagagcgctagttacacattggcttgtcccctttactttttcccagccacccctccccctgaaatttctgcccctctctaccaccctcactccatgacctgtgagatcacaaagtgaagatgaaccctttctgtgcaggagcagagccaggtgggccctggacattttttttttttttaatataacgagatatttataagtgggtgctagggtcttgactttatctccgctgcacaagcagtgtgttgaactttctaatctcatccctctcctaagtgagccctgagctagacggtttccttcctcccctctcaaagtttgtttgtttgtgttctgacagaggataaagctattttaccaaaaacgcaggggatttatttgaggtttgggtgaaaaataatcttgtgggtggtggtaggccgacagatggggacaggaagctgtggacgaaagccccaggtcccgtgggagaggtgacagcagcaggggcacgcagccacgtgggtccccaggggaatgtgaaggcggagggctccaggcgaactggggattaaacaaatatttacaggcagcagggaagtgcccagcgcacgtgacgggggcggggcgggactttggggagggcggggcctaacggtatcgagcgagccggttgtagacgtggtccaggtttctgcacaggaatatcgagagcgtcatgaacccgagctatagagaaaggagatgaggtcagagaagtcgaaggggtgctggcgagacgggggtgatgcccacccgggcgagaaaggtcaggggtggggccgtgaattgggcgggaa

SEQ ID NO: 11629 - DNA, 1179 bp, Homo sapiens
gggctgacaggtaatgtgtagtatagagacttagagtcactgagattgagaagggtcttatggatatggagaggttcttagggcaagaaggttcagaagtcacacttacagttgctggagacttggggaagtctcaagtttagaagtcagagtttgaagacgtcatggaggggtctttggagggtatctgagggctgggaggttagaggagtccagaggtctttgggggttcagagaatcactttgaggggcttgtgatttgcaggctcagagatcctgattcggatctccgagggttcaggcccagtctccagtcactgtgggtggggtgatgaaaggaaggtggcagtgagagtgagtgtggtggcatcttagaggcacagggtggagctcaattcctggggtgacccgtgggtctctcagccaccattttcccaactcccttccccttggttcagacggaacgggcccagctggaggacggcagatttgtgtaccgcctgctgcgctcgcccatgtgcgagtacctggtgaatttcttgcacaagttgcggcagctgcctgagcgatacatgatgaacagcgtcctggaaaacttcaccatcctccaggtgatgcctggggctgggctggagtggggccccccagtgtggagggacagtacctataacagaccctcagtctaggggatctcctcacccaggaactgacacagcagggactccaaagtgagccctcagcctgaggctcttttaactaggaaactgatgcagcggggaccccaccattgacccttagtttaggggacccttcacccagggtggggatgtcacagcactctctctctttttttttttgagatggagtctcgctctgtcgcccaggctggagtgcagtggcaagatctcggctcactgcaacctctgcctcccgggttcaagtgattctcctgcctcagcctcccgagtagctgggattacaggcacgccccaccacgcctggctaatttttgtatttttagtagagatggggtttcaccatgttggccaggttggtcttgatctccgacctcaagtgatccacctgcctaggcctcccaaagtgctgggattacaggtgtgagccaccacgcccagccccacagcactcgcacataaggtgggtccctccttccctggt

SEQ ID NO: 11630 - DNA, 1148 bp, Homo sapiens
cccattcattcactcttccatccattgaccatttatgagcacctgttctatataggaccaggcctagggggtgtgagctttgccctggggctgctggggagctatgggagggccatgaccaggggagggtcaggggcaggtctggagccacatgagggatgaactggagaggcgaggttggaggctggggtgagggtgggaggcctgaggtgaggctgaggcagtgaggatggagttgggggagttgtggcagggagttggggactgtaggactgcagggctgcaggggactgggtgcagaagcaggagtggggacgatgggtggcagtcaggcccagtgctgggtggactgtgtggaacagctggccagagctgtggggatggtgacggcatttggtgggctcaggcagcacaggctggagatccagctcacctccgacttctcacccacggccaaccctcctcagtaccagaggcacctgttcgtgcacatcagccagcactgccccagccccggagcgccgccgctcgagagtgtggacgtccggcagatctacgacaaattccctgagaaaaagggtggcctccgagagctatatgatcgtggccccccccatgccttcttcctggtcaagttctgggtgagttctcacagcaaaatcaaaagtgctcacaaatcctgtggtgtcccagcaaaggcctctggccctgagagaatctgtcgcgggccctaccaggtcagcctgggacttaccagtcagtcctcatggcttggagtgtcagccccctttgcaacaaggaacaccgaggaggccagcccccagggtgggttggaggtgtctgggcctccctggatcccactagacattgccacatgtaactaatacggtgagttacctggccatgtagctaatagggtcctgggcatgggcttgccatgttccaggcttccctgtgccccacctgactgcaccaagccgtgctgctaaggaaagacccctccccgtagccagtggacttgtggagactggtttctaaagaggggactgatgctttgcatcagtttcaccagaccttgttgctagagaatgtctggctttgaggaagtgatgaaaagagccatggagtggctttgccaagtcctgtat

SEQ ID NO: 11631 - DNA, 1654 bp, Homo sapiens
aagaagtaattatgtattaggctagtttttcatttaaacaggaacttagctctggcaagtactgcgctgtgtctggagggtgactgcataggcagtggtgggaccctcaggcggctcggccctgctaagcctttccctccctctaggccggaaggtggtggtcgtacgctgtgaaggcatcaacatttctggcaatttctacagaaacaagtgtaagttaggacctgggaggagcactggagagggtctccctgtggggtgttgaggctctgaaagcaattgcagccgtgttgggagaggctacttggggtttctgagaaggcccttggaagtggggttttgggggtgctggtagactgggcaggcctcacactctcccctctccctagtgaagtacctggctttcctccgcaagcggatgaacaccaacccttcccgaggcccctaccacttccgggcccccagccgcatcttctggcggaccgtgcgaggtgagcagagcgtggggactgcaggtggtgacgggcaggcggccggtgatgagaacttctcccactcacattcgagtttcccgaccatgagatgactccacatgcactaccatctgaggccaccccatgggcccacctcagtggggtgggtgggcatccttatgaggccctctgactgggcctgctatctgtcacccaacaggtatgctgccccacaaaaccaagcgaggccaggccgctctggaccgtctcaaggtgtttgacggcatcccaccgccctacgacaaggtgagctatgccaaaccccacaggcagcggccttacctgtggcgtccatgatgttccgcaactacctacattgtttgatcctcatgaaagcagcactggctgagacgccagtccagccgacctccttccctgtctgtccctcccgggctcttaagcccctctctttctctaacagaaaaagcggatggtggttcctgctgccctcaaggtcgtgcgtctgaagcctacaagaaaggtgagtcccagcttacgctgcaccatctacttgggagatttcaggcctgctgagggacctggggacctggagcctggcagatgatgtccttatctcacgatggtctgcggatgtccctgtgggaatggcgacaatgccaatggcttagctgatgccaggaggcttgggtgggtgcttttctaacaggcctgcagagaacagttgcattatgatatgcccagctgtcagtcacctcccagctctcaacagctccggctcttcagggtgtgggggcttagatatccttacaacttcatttgttcaccccccccccccccccccgcagtttgcctatctggggcgcctggctcacgaggttggctggaagtaccaggcagtgacagccaccctggaggagaagaggaaagagaaagccaagatccactaccggaagaagaaacagctcatggtgaggccaggggctggtgctgaggggggcatctcactcctggacaggcctggcaggtgccttgctcacagagtactcttaactggcaaaggaccagccggggttggggtgggatgcagtccatgtaatgagggcaatgcaacccctcctgaccaccaccacctgcacttattcttggcagaggctacggaa

SEQ ID NO: 11632 - DNA, 1654 bp, Homo sapiens; identical to SEQ ID NO: 11631

SEQ ID NO: 11633 - DNA, 1654 bp, Homo sapiens; identical to SEQ ID NO: 11631

SEQ ID NO: 11634 - DNA, 1654 bp, Homo sapiens; identical to SEQ ID NO: 11631

SEQ ID NO: 11635 - DNA, 1654 bp, Homo sapiens; identical to SEQ ID NO: 11631

SEQ ID NO: 11636 - DNA, 1838 bp, Homo sapiens
aaggtttttttggagttctccggtcttcaggggtaattctgtggaaacggactcctaagggctaatccagggagcctgccgtctggtatttaattctgaatccttatgtactacataaggagtgaatcctgggtgggcgatcttgggtcttggagaatgatcctcgctgaaaggtgtccagggtgtgagagggttgatcctggtttagaggatgaattttgcaatccctgagaggccttctggagtatataaattgaaataacctcgggcttagatctgagtatgaattacaggtaaggtcagggtggtcatgtcttagagggtgattctggggcaccaggccttggacgccggcgctttgcaagtaaatgtagagcatggggtctgggaggttctgggaaggtctctagggctggttggctgccggcttcaaacttagcagctcatcagttttctcctcataatctgtagactgagcgtgcctaccaaaagcagccgaccatctttcaaaacaagaagagggtcctgctgggagaaactggcaaggagaagctcccgcggtactacaagaacatcggtctgggcttcaagacacccaaggaggtgcggggaacctcagaagaaagaaggggaacctggcgttcctgcacgtgtgcccacgacgagttgccctgcctgcatctaagtggcttctggggctgctgggaattgtagttgcttccctgaggccacgcccctggctcttttaaggaaccgcccgcccaaggctcactcctttatctttcctatcctttcaggctattgagggcacctacattgacaagaaatgccccttcactggtaatgtgtccattcgagggcggatcctctctggtaagtgcgggagttactggtgtctggggcctgaaatactgaaagaagggtcttggggcccagactcctgggtcctgggtgagaggggtggttaggaatgcaaacttgtaggtccaggtacattggcagatgatgtttgttttcacgatggtcttcagatgcccacgtgggcactgctgagaaagccacttggtaaaactgatgccggaaatggggctttttgggatccctgctcagctgcttctgagtcccagcatgccctgggttacctatggccctctttcccatgggacctgacctatgatcggcccccgctcctaggcgtggtgaccaagatgaagatgcagaggaccattgtcatccgccgagactatctgcactacatccgcaagtacaaccgcttcgagaagcgccacaagaacatgtctgtacacctgtccccctgcttcaggtgagcgcagtggcccatcaggttgctcaggccacgctctctcagccttcagattccagatcggaccaatttaaggccaactgagggagggaaagactgaggtggcatctctgggaagccccagaatctcaggatttgtatatcatatgttcttcagaatcaaagcgttctacagggtgaatatctctacctgaaatgcttggaaccagattttggaatgttctcgcatacatagtgagatgttttggggatgtgacataggtctaaacaagaagctcatttgtttcatatacaccttattcacatagcctgaaagtagtcttacgcagtgcgttttataattctgtgtgaaacaaagtttgcgtacattgaaccattggaaagcaaaggtgtcacgctggtattgaagaagtttcagattctagccaggcaccgtggctcaagccagtaatcccagcactgtaggaggctgaggcaggaggatcccttgagcccaggagtttgagaccagcct

SEQ ID NO: 11637 - DNA, 1838 bp, Homo sapiens; identical to SEQ ID NO: 11636

SEQ ID NO: 11638 - DNA, 1269 bp, Homo sapiens
cagagacccagagacccaaagagagaaggacagggaccaagacggggacagattcagagagaaagggacagaggcccagagaacaagggtcccagagacttcgggacacgcttggatgcagggagggcttttgaaagcagggccgtgttgtcccctctgaaccctgaccctccctccaggatgggcggctgagcaaagcggaaatcctgggtaattggaacatgtttgtgggcagtcaggccaccaactatggcgaggacctgacccggcaccacgatgagctgtgagcaccgcgcacctgccacagcctcagaggcccgcacaatgaccggaggaggggccgctgtggtctggccccctccctgtccaggccccgcaggaggcagatgcagtcccaggcatcctcctgcccctgggctctcagggaccccctgggtcggcttctgtccctgtcacacccccaaccccagggaggggctgtcatagtcccagaggataagcaatacctatttctgactgagtctcccagcccagacccagggacccttggccccaagctcagctctaagaaccgccccaacccctccagctccaaatctgagcctccaccacatagactgaaactcccctggccccagccctctcctgcctggcctggcctgggacacctcctctctgccaggaggcaataaaagccagcgccgggaccttgtgtgtctgtctgttgtctgcctgtctctatgaagggtaagggggccctggagatggtttgggggctgtgactgggagttgggggctgagacatgcaataggggaccaggcatttgaaggaggggtgctgggtgttggagggattggagggcgttcctcagtataaaacaaacaaacaaaaaaaattgggccaggcccggtggctcacgcctgtaagcccagcaatttgggaggctgaggcgggtagatcacgaggtcgggggtcctagaccagcctggccaacatggtgaaaccccgtctctactagaaatacaaaaattaaccaggcctggtgatgggcacctataatcccagctactctggaggctgaagcagaatcgcttgaacccgggaggtggaggttgtcgtgagccgaaatggcgccactgcactccagcctgggtgacagagggagactctgtctcaaaaaaaaaagggaaaaaaagcctggactctgcagcgcacaaaccagacaggaagccctgccctctcagagctccagttctgtaaggaagaga

SEQ ID NO: 11639 - DNA, 1180 bp, Homo sapiens
cggacgggaaggccttgggaaggtgggagggactggcgaagcaaggcctggacttccccccatccttggattcccggcttggtgacccctcccccccgcgccccaggcactgctcttgcaaaggtgggaagaagagaagaattagaacgcagatctggggggcgcgaaccccctctcaggtcctattgttccgggactgtgcgaggccgcgccactaggcgcccccccaagaattccgcgcgcagagtgggcacggggccccgcccccttcctaagctggggttgtgtgtgtgtaagggagggggtcaggcgtctgggacacgccccctttaatgcccccacccccaaaggcagagaatcctagttgatcgcaaggagtggagcgtttgccctcttgagtctggccacggactggtgccgttgcatgggaagagtcggatgtttcccgggtgtgtgtttgtgtgtctgagcgtgggccctgtgcgtgcgtggctggcagcgtgttcacctgtgaatctgcccctttcctgttgcttattggtgtggcgccctcacacttcacctatccccagcacctcccccccaacacacctggatttcccagcagggcataaccccaagtgtgtcaggattttccgtgtgggattcctccgtctatatcttttcttccccacgggtgagttggatacccgtttgcacacatacctggcattgcatgggcccatgcatttgaacctcaacccccggggatggtcggtgttcttgttcacacttgtacctggtactttccccaggtcttattccctcttctctccaccccccaaaccgttgccgcttgggaaccgatcttcctcctgctcccaacttgttctgcaccaccccatgaagttcagggcctatgtgttcccgtgtgtctacggaagaggaggcgtccatgtggacctctggcgttggccccatagcctgtgtcgccggaacgggggctggggggggtttgtggggtcgacgggggagggctctcatttgcaaatcaagacgcttgctctgccttggaccctcttctgtgtgttagtctcgtctctgagcatgcctgtttgtaaacgtgagactatccgggctctctttattcgggctctggagtgggggccatttctgtggctctttagttgagcaccccgat

SEQ ID NO: 11640 - DNA, 1134 bp, Homo sapiens
acctggctgactataacccctgtccccggccaggcctctctggactcttcgacactggcctccaccacgcgggctcagcagggcccgacgcctccgtcatgaaccttatctcggccctggaatcccggggcccccagcctggcccctccgcctcctctctcctctcccagttccgcagtccttcctggcaaacaggtaagcccagcgccggccctgcagggccagggtgggactggctcgctgttctctctgacgcgcggtcttcctcatctccagccatgcacacgccaggccccacggagctcttcatctcgggtgccctgccgggttccagcacctttccgtcctcatctgccctgtcggcttaccaacacccggcttccttcggcagccgccccttcccagtgccctcgtccctcagcctccaggaccccccattcagccctccagctaacgggctcctgtcccctcatgacgtgctgcacctgaagccctcgcaggcacccacggtgccctcttcactgggcttcgagcgcctggcagggggcggtgtcttggggccagctggtctcggtccagcccagacccccccttaccgccctggccccccagacccaccaccacctcctcgccacctcccaactcagttcaacctgctggcttcctcttccgctgccgccgccgctgccgagcagtcctccccacagctctataacttctcgggtgctgccccgggcccaccgccgcctgagcgggccctgccacgccaggacacggtcatcaagcactaccagcggccagccagtgcccagcccccaccacccccgccaccagcccatgcgctccagcactatctgagctgtggaggcagctacccctccatgggccaccgggccaacctggcctgcagccccctgggtggtggggagccctccccgggtgctggggagcctagcaaggctggtcccagcggagccacggctggggcatctggccgggccacgggccctgaggcagcagggggcggtggggctgggggtggtggtggaggttaccgccccatcattcagtcgcctgggtacaagacgggcaaaggtggttatggagcagctgccgggggtgccaccaggcccc

SEQ ID NO: 11641 - DNA, 1817 bp, Homo sapiens
tcccctcggtcctcagccatgcccccagtccctctcccagcgcctccaaagtcggcgtccacctccttgagccagccacccgcgatggggcaccccagccacctccaccgccacccccgcctccaccacccatgcccctgcagctcgaggcccacctccgcagccatggcctggagcccgcggcccccagcccccgcctgcgacccgaggagagcctggatccgccaggcgccatgcaggaattgctcggggctctggagccgctgcccccggcgcctggggatactggcgtaggcccaccaaactcggagggcaaggatcccgcaggcgcctaccgcagccccagcccgcaaggcaccaaggcgccgcgtttcgtgccgctcacctccatctgcttccctgactccttgctccaagacgaggagcgcagcttcttccccaccatggaggagatgttcggtggaggggccgcggacgactacggcaaggccgggccacctgaggacgagggggaccccaaggctggcgctgggccaccccccggcccccctgcttatgatccctatgggccctactgtcctggccgggcgtcgggagccgggcccgagacaccgggcctgggcctggaccccaacaaaccgcctgaactgccctccacggtcaacgccgagccgctgggcctgatccagagtggcccccaccaggcggcgccaccacccccgcctccgccaccgccgcctcccgcgccggcctccgaacccaagggtggcctcacctcgcccatcttctgctctaccaagccaaagaagctgctcaagacatcctccttccacctgctgcggcgccgcgacccacccttccagacccccaagaagctgtacgcccaggagtacgagttcgaggcggacgaggacaaggccgatgttcccgccgacatccgcctcaacccccggcgcttgcctgacctggtctccagctgccgctcccgtccggccctctcgccactgggggacatcgacttctgcccacccaacccaggacccgatggcccccggcgccgtggccgcaagcccacgaaggcgaaacgtgatgggccaccccggccacgggggaggccccggatccgccccctggaggtcccgaccactgcggggcccgcctcggcctccacgcccaccgatggcgccaagaaaccccggggccggggccgaggccggggtcgaaaggctgaggaggcagggggcacccggttggagcccctgaagccacttaaggtgaggggaaatggggtcttgtaggggataggggaggaggagctgtgtccgatgtttgagtcttttttttttttttttgagacagagtctcgctctgtcgtccaggctggagtgcagtggcacgatctcggttcactgcaagctccgcctcccgggttcacgccattctcctgcctcagcctcccgagtagctgggactacagttgcccgccaccacgcccggctagtttttttgtatttttagtagagacggggtttcaccgtattagtcaggatggtctcgatctcctggcctcgtgatccacccgcctcggcctcccaaagtgctgggattacagacctgagccaccgcgcccggcctcccgatgttttgagtcttaaaggacaggtttatggccgcaccttggcatttttggggcagggggataataaggtttacatttctaaaatctgtgaggaagttagcgtgaggaatttcagggtctcactgacagaaagacctaagaattgaaattctgaatctaggctgggcagtgtggttca

SEQ ID NO: 11642 - DNA, 1103 bp, Homo sapiens
cggcgaggagcggggcggcaagagcagccagaaggatcggcgccgctcgggggccgcctcctcctcctcctcttcccgggagaaggggtctcgtcggaaggcgctggacgggggtgaccgggatcgggacagggacagagatagggacagggacaggtcatccaagaaggcccggccccccaaggagtcggcgccttcctcagggcccccgccaaagccaccagtcagcagcggctcaggctcttcatcctcgtcgtcctcctgttcttcccggaaggtgaagctgcagtccaaggtggcggtgctgatccgcgagggtgtcagcagcaccaccccggccaaggatgccgcgtcagccggcctgggctccattggcgtcaaattcagccgtgaccgcgagagtcgctcccccttcctcaaacctgacgagcgggcccccactgagatggccaaagcagctccgggcagcaccaagcccaaaaagaccaaggtcaaggccaaggcaggggccaagaaaaccaaggggaccaagggaaagaccaagccatccaagaccaggaaaaaggtccgcagtggaggtggcagcgggggcagtggtggccaggtgtcgctgaagaagtccaaggcggatagctgcagccaggcggcaggcaccaagggggcggaggagacttcctggtccggggaggagcgggcagccaaggttcctagcaccccgccccccaaggcagccccaccaccccctgccctcactccggactcgcagaccgtggacagcagctgcaagacacctgaggtctccttcctgcccgaggaggccactgaggaggctggggtccgaggtggggcggaggaggaggaggaggaagaagaagaggaggaggaagaggaagaggaggaggagcagcagcctgctaccaccacggccaccagcactgctgcagccgccccaagcactgcccccagcgcggggtccacagccggtgactcgggggcggaggacgggccagcttcccgtgtctcccagctgcccacgttgcccccgcccatgccctggaatctgccagctggtgtggactgcaccaccagcggcgtcctggcct

SEQ ID NO: 11643 - DNA, 1134 bp, Homo sapiens
tctggccctttcttgaggtctaaccatacccctcttgcttcaaaccagtttaccccaggcccccagacacttagtagcaacccctccaggttcacagcccccgctggcctcccccagtatcgccgctacttccttaactccacctccaacccccctttgcccttccctgtgtctgcccccattttccttcccctcccctccccagctgtgggctgagctagagacggggtcagagagactggagagatggtaggcgtggctgaggtatcggggtgctcccctggatggtgctctgggggggtcctggaagtggaaaatggggttgttaggttttggggttcctgggggggcaagatggcaggcgggggctgtagggttgtcatggtatgattttgggggttctatactactcttcagggaaaagtagggcgctggaggtttaagaggctgtggggagcccccagatctgacccatgatcccatcggccccctcccaggtgtcctgtggccaggcggaaagcagtgagaagcccaacgctgaggacatgacatccaaagattactactttgactcctacgcacactttggcatccacgaggtcagtggggacagtccccaaggccccaatcttaggggggcttaaatgttggggaaggggtggaacctgttttcccacgcatgcgcactgcttcccctggccgcaggccgcccccctgcccctctgctgcgcacttcctagggtcgcctcgccaagccgttgccttggagaccgaggttagcctgaatctctgcaggggcctcgcgccgaaggctggggtgggagagcgcatgcgtgcctggggccttagccagaggtcgggcagggcccactggtctctgccgccctctagtgaccggcggtgggactgcgccccggctgctcccgccctaacagcttctgcacacttcagatctgactgaagacactgaaatcccagaacgaagctggggtggcattctaaggaattttcttttccccctgaggcctttttcataaaattgtggcaaaatatgcataaaattgccattttttatttttagagacggtctcgctctgtcgcccaggctagagtgcattggtgcaatcatggctc

SEQ ID NO: 11644 - DNA, 1145 bp, Homo sapiens
tggaagacctgaccttcacctccccgttctgcctgcaagtgaagcggaatgactacgtgcacgccctggtggcctacttcaacatcgagttcacacgctgccacaagaggaccggcttctccaccagtgaggcggggcccacagggctgggggccgttcccgagccagggcggaggcgcacccacgtagtggagggggtgacagaaacgggcagaaggaaccatggggacacgcgtgttccagtgtgagctctgccatgtagcagtcacgtggccttgggcaagtgacctgagtgtgcagtgcctcagtttcctcatccacaaaaggctgacacggtccctgtctccaaagctcaatgacagggaggtgactcgcggatagcagtcccatcagctgtcatgggggtgggcattccgacagagggaacgcaagggtggggttggggggggcagcaggccgaggccggctgacccgcccgcgcccccaggccccgagtccccgtacacgcactggaagcagacggtgttctacatggaggactacctgaccgtgaagacgggcgaggagatcttcggcaccatcggcatgcggcccaacgccaagaacaacgtgaggctccgggcagctgggtgggagggtggcagctagggcggggagtgtagattggggggggagtggtgggggaggaatggtggcagcgggggtaggggatgggggcagccggggtgggggatgggggcagctggcgggggcgagcacctctgcctattcccgggtccccaagcccctcagccccatgcctgtctacacagcaggattgcttgagcattcaccggaagttatgggcctggggacccaggctgaaaccctgccctcctggtgcttccactctagacaagggggtcagtgacatggtgatgccagttggaggtgacctctgtcaggctgggagcagggcagacaggtgttggtgtaggtgggctccagggcaagaggcagcccccagtagagtgcacggggttttctagcccagctgggaggcatgagaggagaaaggcagctttttgttttctgctcccctttctttttcctcctgagcacttggcaggagctgccatcacctgagatcagggggcttccggggg

SEQ ID NO: 11645 - DNA, 1208 bp, Homo sapiens
tatcttcatgggggatggcatgatcaccttccacatctccagcaaaaaatcaagcacaaaaacggtgagacaaacgtgtatacccaccaactccctctttcctcaggaaccaggagtctgggcccccagcccctcctccctcagacccaggattccaggccccagcccctcctccctcagacccaggagtccaggcccccagcccctcctccctcagacccgggagtccaggcccccagcccctcctccctcagacccgggagtccaggcccccagcccctcctccctcagactcgggagtccaggccccagctcctcctccctcagactcaggaatccaggcccttagccctcttgtttctcagcctccaggatcccatctcccagcttcccctggctctgacctgttctccttccaggattcccacaggctggggcagcacattgaggacgcactgctggatgtggcctccctgttccaggcgggacagcattttaagcgccggttcagagggtcagggaaggagaactccaggcacaggtgtggatttctctcccgccagactggggcctccaaggcctcaatgacatccaccgacttctgactccttccagcaggcagctggcctctccaaggaataagggtgaaattgccacagctggctgacacaggacaggggcaactggtttggcaaccccacatccaggccaataaagatgtgtgagctgggtgtgtggtgtctgctatgctcttgggcagggcaggggtagaagaggtaaggaccagggtggaggaggacagaagctcccatccattcccaggcccagccagggattcccagttgcagtcacagcttcaaccacagcccgcaacacctgcccagtgtacttcatttccagcttcactcataccaaacccaaccctccaaggccagtgccaatcaaacacaacctcacaagttctcctgagcctaattcctgctgccccaacaccactgtccacctcaaatccatctccaggccgggcgcggtggctcatgtctgtaatcccagaactttgggaggccaaggtgggcggatcatgaggtcaggagatcaagaccttcctggcgaacactgtgaaaccccgtctctattaaaaatacaaaaaaattagccgggcatggtggcgagcacctgtagtcccagctactcgggaggctgaggca

SEQ ID NO: 11646 - DNA, 1220 bp, Homo sapiens
cacccagtcccttagaaaatcccactctgtttctaatacctggagattcccccaacagcgcccatcacctgcgcaccagcgcagaaaccttgactgtcccacccccacagtcccaaccctctagagtctcgccccttcactgctccttacccagctgcctggggtcctgccagggacaccccacacacccaggtcagtgctggccatggcgcccgaggccccgtggcctcctcaccccacccctaaagcacgcacagtgacacatgtgcacacccctaaaccccatcttcccgactgcacacacatcccgaccctgtcccgctcctgagcctctgctctcaggtaccacctcccccaggggcctgacttgtctctcctctgcccctgcagggtgtggtcacggccgccgtcagcctcatcacctgtctctgcaagaagaacccagatgacttcaagacgtgcgtctctctggctgtgtcgcgcctgagccgggtgggtgtggcctagatattggctgctggaggtggccctggcatccctatgccctctgacacccctcaggcccccactctccctgagaggcagcccagcccaaggtttacaaactcaggctctgagctggattcatcctggctcggcctcttcctggctgggtggccctggacaagtggcttcacctccctggcctcagctgccccctgtgttcagtggggataataccggtgcccacctggaggcacagagcgctgtggatagagtgctcagaacagggcctcgcgggccgagcaccccgggagccagccgccctcatgacctcctccctctcccacttctctctctgtctcccactttccctcttctggctttgcctcccgcctctctctttcctgtgcagcctctcactcctgcctggcgtccctctcccacctttgctcctgtcctgcccaggaacatcccctgaggccttgtgcatgccaggctccatgtcgggtgacaccagggacacagatgagtcagaaccaagctctgctcttaaggagctccctgtccttctggcagggaggtgactcagtcacagattgtcagaaaaggggtgactcgtgctataatggaggtaggataggtcacccataggaggcacttaacacagcctgtgagtccacgaaggcttcctgggggcggcgatcccagaattgagacttagaatacacatgcgcatc

SEQ ID NO: 11647 - DNA, 1254 bp, Homo sapiens
ttggcctcccaaagtgctggattacaggcgtgagccgccacacccggctggattatttcatcaactcctgaggacattttacacatgtccttgtgttgagacagggcctcactcacccaagctggaatgcagtggcatgaacactgctcactgcagcctcgaacttctgggctcaaggcatcctcctgcctcagcctcccaagtagctgggactacaggtgcacatcaccatgcctggctaatttttttgtagagatggggtcttgccatgttgcccaggcttacacatgtccagaggctaagagaggttaagtggttgcccacagccactcaggtggttaagagctgggattcaaacccaagtcagcctccagagctaatactattatgtctcagtgcggtgtgacattgtggaaggccaaaggaggcacctagggggcgcctcagaggtttccatagtatgaactttgtagttgaaccttgtaggattgagtccaggattgcaccatggggtccctcaaagacctgcaggcgggagctgccgggagctctggggttcctgacccagacctcccgggggcccacctcctctgtctggcttccttgactcctggcgggcacagctggctgtgcagaccaagcgcgtggcggcgcaggtggacggcggcgcgcaggtgcagcaggtgctcaatatcgagtgcctgcgggacttcctgacgcccccgctgctgtccgtgcgcttccggtgagtcaggtacggcgcggccggtgggcggagcctccggggtgaggggcggggcctaatggagcctccctttcacctcatcaggtacggtggcgccccccaggccctcaccctgaagctcccagtgaccatcaacaagttcttccagcccaccgagatggcggcccaggatttcttccagcgctggaagcagctgagcctgtgaggggtggggagggggcggagccaaagccgcgcctctgggtgggcgggtcgggccgtccaggtccctgacttgaaccttcccggtccccagccctcaacaggaggcgcagaaaatcttcaaagccaaccaccccatggacgcagaagttactaaggccaaggtgagagaccgcgggcgtgtttgccggcctatggctgctttgcttctctgagcctctgttttcccatctgtaaagtggggccaattcccatccccaagggttttttgggatctgggatgccactgtgtggtaactaacagctct

SEQ ID NO: 11648 - DNA, 1112 bp, Homo sapiens
gttgcaggcctgagccaccacgcccggctcgttcggctttattgtactcagtcttcagaacccagtgcaggttttattgttagaggcctctctgctaggactctctgctaggactccctgcctttccagtactccctgttcacatgtggctggcggctcccacagaggccagggcagggccaaaggggaaggagtacagtgacttggggcaggaggaatgggttggggcagaggacgtcgccagggtctgggcctgcgaggactggatggtgagaatcctggggagtagcaggtttggggaggacacacagcaccgctgggacaaggtgggtggagggtggtgagtgccatccaggggacgggcgggcactctgagtgggtggcgatgatgtaggccgccaagcctcagccccctctgtcctgctctggcccgcagggcgcggatggcgtcggggcgccccgaggagctgtgggaggccgtggtgggggccgctgagcgcttccgggcccggactggcacggagctggtgctgctgaccgcggccccgccgccaccaccccgcccgggcccctgtgcctatgctgcccatggtcgaggagccctggcggaggcagcgcgccgttgcctccacgacatcgcactggcccacagggctgccactgctgctcggcctcctgcgcccccaccagcaccacagccacccagtcccacacccagcccaccccggcctaccctggccagagaggacaacgaggaggacgaggatgagcccacagagacagagacctccggggagcagctgggcattagtgataatggaggtgagagggtgggggcaggggcgggtgcggcccagcgcttgaggtgcccgcaggaggctttgtcggggtgggggcctgcttagcccagagtacttctacagaagtgcagtctcaggaccccagagccagacaggcttgcctggggcttgctgtgtgatctaaagccagtcccttccctgctctgagccttactggtcctggggccagctctgtgctgggagtggtgggcacaaggacacagagcaggctcgggcttttttctcaaggggctcccggtctagccaaggaac

SEQ ID NO: 11649 - DNA, 1175 bp, Homo sapiens
ctcccccaacccaggggcttcaagctccgcctttatggcggaccccggggtcctggaatgccaaggcagagaggagaaacaggagacgaggtccgagggaacggtatccccgccccttagaacaggaactggtaaacccttaccaattacagccacccccgactgccacctgtggctgccgtcgcgacctgtcgcctcccacgcatgttgtggctgcgcccgcccccgtcagggcgtgaccacggcgtggactacaacgaccgtgatgctccacggagccaggagcctttgacgaaaggcagcgtaggcgagggccttcatgggactcgtagtacaaggcccatcacaagggtgcgccgtggagaaaaggggtgatacccttcgcctccctctcttcctcaactccgtgggtccatgcacaaagctttctcttcaaaaagtacgctctgaaaagaagcaacctaggcaggttcgttcaatggaaatattggatttttactgagtagcgctagctctgctacccggtgcgcatgcgcatcacctgggcggcacccgcggtactgcgcctgcgcggtctcgcgccttcccaggtccgctccgcgagggcgagcgcgcgccagtcccactcgtgcgccgctcttcatgtccccgcggtcgaagacggtcacatacgcccccaagaaaacgtcgccgaggatccacacaggtactggaggcgaagcgatgtccaaggcccggaagccggacaagcagaggcggacgtcaccctgagcaaactgcaaggcgacaaggcggcaactgggtgtccaggccgcaggaaccaccatttccctgggagtccgtgctctctccgcccccaaccccggggacaagaaatgtttctgtggccccttccggccctagtgatgtccaactaccagctccaccctctcaactccagtcatattacatcactgtggcgtcattatgacggacacctacctggatgacgtaatcctgggccgtgagattaaaccagacccccccaatgaggagtgagactgcggggagctttgggatttctgagcaccggatgatgtactggtggaggagaggaacaagtgaagatgggagattcctgctctgctcaaatcccgtccgtggctccccagtgccatggagtaatgttcatattg

SEQ ID NO: 11650 - DNA, 1260 bp, Homo sapiens
aatgtcagtgtgagggaaacactgggccagtggcctcttcaggccgcagtctttccagcatgcatttgatgtagtcacttccttgtgcatgtccagaactctgagccagggaacccacttctttccacctgaccattgaggagccgccttatagtcccattttgcagatttgggaactgaggcccaggaggggcagagtggcttgtacataagcctatgccactgggaaatggcagaggcgggacccctcccccgccggcccacgttcactgcacatggcccccagggcttcactccgcatgattctctccccgacagagcgtcacggggttcggacgtcagatgatcgagaaaaccaagcagctggtggagtctaagtacacagtggagaatggctacagcaccagtgccaaggtcgggggctgcccaccgctgccctgagatgggcccagggcaggtggggggatggaagccgggccggacccccatgtccccgtgcctcctggtcacaccctgcccactctcctgttgcatccttgggtcccgttggcattagccacctgccaccccccgacaccagtagttgacagaagggaccctgcttctcacatacacacatccccaccgcccgcaggtggtgtatggtgacactgactccgtcatgtgccgattcggcgtgtcctcggtggctgaggcgatggccctggggcgggaggccgcggactgggtgtcaggtcacttcccgtcgcccatccggctggagtttgagaaggtgcgtggctgggtcaggggctctgcatttaggtgccctcatcagggtactcagggtgtcccgttctttgggttcacaaaagccacagtgtgaagggatgttgctgcttagattctcctgaggctggggccttggtttgggaagcctccaaggccttgggctttgttaccctggatggcatctgttctttgaaaaccctgtcgctgtccctggttttgaggtgtcacagtgtccctggttttgaggtttcccagtacctgtcagatgtggagctgccctccacgcagggaccctgatgggggtgcaccttagatctgtgcaccattgcccctggccctctgagtgcggcacacttggtcccaggaaaccttgcaccatattttcttttgaagagtctgggtctcgctctgtcgcccaggctggagtgcagtggcgagttcacagctcactgcagcctccaactcctgggctccggcgatcctcccgcc

SEQ ID NO: 11651 - DNA, 1268 bp, Homo sapiens
tgctacctcacatgttgtgttctattatagagaggcagcaaagtctagtgattaagagaataaaatctggagagagactgctggattcaaatctcagaactgtcatttattacttgtaaaaccttaaacaaatcactgaatctctctgtgtctcagtttcctcatctttaaaatggtcatatagaactactgggctgggcacagtggccacatctgtaatcacagcactttgggaggccaaggtgggaagattgcttgaggccaggagttcgagccagcctgggcaacatagcaagacctcatctctacagaaaaatttaaaagttagccaggtgtgatagcacatacctgtagttccagcttcttgggaggctgaggtaagaggattgcttgagcccaagagttcgagggtgcagtgagctgtgattatgccactgcactccagcctgagtaacagagattccatctctttaaaaaaatacaatacttaaccttgtagagttgtagaacataaattaagtaatacatgtaaagtgcctggcacttgcaattgcatggacaattgcatggcaaatatgaagggttaactctttggggacagcagagggaggatgtactgtgaccccatcctgacccctacctctgtcctcgttctctccagacatctccgtgagcctgctgtcggtcatcgtgacattctgtggcattgtccttctgggtgtctctctcttcgtgtcctggaagttgtgctgggtgccctggcgggacaagggaggctcggcagtgggcggtggccccctgcgcaaagacctaggccctggtgtcgggctggcaggcctggtaggcggaggcgggcaccacctggcggctggcctgggtggccatcctctgctgggcggcccacaccaccatgcccatgccgcccaccatccaccctttgctgagctgctggagccaggcagcctggggggttctgacacccctgagccctcctacttggacatggactcgtatccagaggctgcagcagcagcagtggccgctggggtcaaaccgagccaaacatcccctgagctgccctctgaggggggagcaggctctgggttgctcctgctgccccccagtggtgggggcttgcccagtgcccagtcacatcagcaggtcacaagcctggcacccactaccaggtgagagaggatactgggttgggggtccactctgaacttctgctcctcctctgtgtctctttcctatctatagctcttatg

SEQ ID NO: 11652 - DNA, 1164 bp, Homo sapiens
acttgagggggacagagaggtcactctggagggaggatgaggaaggggcgggggacattccggggtcaggaagcccacctggctagaggagggtgagaaggaggcgaaggccagccaggcgtgtcccgaggaagtgggggagaggctggcaacggcgggcagaggagttggacctgacccaggaggaagctgggagtcgcggaaggctcgtgagcggagggatgacacagtcccagctcagcctcaggaagctgaatcaggcggtgcgcgcaggaccgtgggagggggcagagccggaagccaggaggcaggagagggggctggttggggcagctgcgggcaggcagagggagcccccaaatgccctcttccttggaggacgccagtgctgggaaaccccccctcccccctgatgcaccgtcctcttcccccacccaaggacccctgtcctcccagaggtgtcccctccctccaccctcccctcctctcatgccctctgtgtacgcagctccagcgggacaccccgggaagggccagccgggggcacggggggctcagggggccccgggggctccctgggcagccgcgggaggcggaggaagctctactcagcggtacccggacgctccttcatggctgtgaagtcctaccaggcccaagccgagggggagatctccctgagcaagggcgagaagatcaaaggtacccagggtggaagcagggcctgggctgggctgggctgtgggggcgatcagggaaaatgtggagcagagagcagaccattctcgggcacctggagtatctcatgcactctggagacctcagagagccccaggacaccccttgaggcttggaggaccatagagtgtagctcagatgaccctgtcaggaggcagtgaagtgagccgtgtcccactgcgggacactgatgccgtgtgcagggcatggctggaacttctcaccaaatcgtctcattagactcctgatggccctttctggggagggaggtcatgggccccattgcatggttgaaggaacagaacctcacacaggtgaagccacttgcccaaggtcctcagtccaagcccacagtccttcctgccacctggtgcagagcgtgaggccgagcagccttaactttgcctcctgcatctgtccaggggt

SEQ ID NO: 11653 - DNA, 1226 bp, Homo sapiens
gagttcacactgtaaagtgaaagcaagtttactaagcaagtaaaggaacaaggcagggtgcagtggctcacgcctgtaatcccagcacattgagagaggctgaggtgggcagattgcttgaacccaggagttcaagagcaacctgggcaacattacaaaactctatctctacaaaaaatacaaaaattagccaagggtaatggtgtgcaccagtagtccaagctagttggaaggctgaggttggaaattgcttgagcctgggagaatttttttttttgaggcagtgtctggctccggtcacccaagcagtagtgcagtaatgccatctcggctcagactctaattcaacacggaatgttgagcttctgagcgtgatatagcggaagtgccttctcttccggtctctctggtcttggccgcagaagccagatgacgaagggaacgtcattgtttggaaagcgtcgcaataagacgcacacgttgtgttgccgccgtggctctaaggcctaccaccttcagaagtcgacctgtggcaaatgtggctacgctgccaagcgcaagagaaagtataactggagtgccaaggctaaaagacaaaataccaccggaactggtggaatgaggcacctaaaaattgtataccacagattcaggcatggattctatgaaggaacaatacttaaacccaagagggcagctgttgcagcatccagttcatcttaagaatgtctatgattagtcatgcaataaatgttctggttttaaaaaatacaaaaaaaaatactgaatgtttactcctgaaacttatgatgcctaggttgagaaagactcaattttcctcatgctaaatactttatacatgtcctttattcatgcatacataggacactttacacaatataattgttgaaagtgcttctgaaatactgttcaaattgtctataatatttttacacatgcactataaaaattaaatttatcagacaataaatattaaataatttaataaaattgcatttttcaaaggctctaacaatgcatatttgagttatcatattaaacattgtattctatgatttttcaactgtaatataattttttttgagatgggatcttgctctcttgcccaggctgcagtgtggtggtgcaatcacggctcatgcagcctccacctccccaggctcaagtgatcctctcacctcagtttttgtgtttttagtagagat

SEQ ID NO: 11654 - DNA, 1187 bp, Homo sapiens
ttaaaatcaggacttgctttatagaattcagtgaggaagaacaagcacccctggtacaacacggaggtcctgcctagtacacacagtgagtagatgttctacacagtgtcagtgatgatcattgcactttgagaggctaagaactttctcctcagaaagcaacgtgtgtaattttaaggtttatggaccccagtgaaactccttcaaggacccctaaataagaacctttgtggaaggcacgctgacagagaccttctgctggctggcataatattacgtttttcctttgagtcattcattgcaaccatttttaaaggctattttaatgaaggtcgggatgggtaatagggaagttttctctgaggagatgagcccatgatggggtgcaggatggggctccagggctgcggatggtggagagggagctgtccagtgactttgtgttctcaccacagccaccgctggagtcgctggccacagtggaggagacagtggtgcgggacaaggcagtggagtccttacgggccatctcacacgagcactcgccctctgacctggaggcgcactttgtgccgctagtgaagcggctggcgggcggcgactggttcacctcccgcacctcggcctgcggcctcttctccgtctgctacccccgagtgtccagtgctgtgaaggcggaacttcgacagtgagtctctgcctccttggaagctccaagctcccatctcagctccaaccttctctaaagcctcagactccttttggtctagctggggcccaaatgcccctgaactctctccactcccactcctgcttaccacctgataggccacatcctcgagagttggtctctggacacggccacgtgtcagtttacccacctctgcccccttgctcacttaggaattgagatgatgacaggtcctccttcccactggttaatgtgaggatttaaaagaattatcacacataaagtgcttagagcaaaatctggaacataaaaactttcagcaacttacatctgatggtatctccagcctgtcccaggtccagtgcctttggcagataaaccacctcagttttcagcctcctgctcgtctactttgcaaacgattgaccgtcaagcccgggtttgagcctgactcactccagaactctggtttatggctgtacacttgcttagatac

SEQ ID NO: 11655 - DNA, 1190 bp, Homo sapiens
gccttagcctctcaaatagctgggaccacaggtgtgcaacaccacgctgggctcattttttatttttggcagagatggggtctcactatgttgctcaggctggtcttgaactcctgggctcaagcaatcctcctgccttggtcttccaaagtgttcagattacaggtatgagccactgtgcctggctcgttggttaagcaatttttatgggaatgatgtaatcgtcagcacttagcattgactagatttattatgcgcaatctgcgaagtgtctcacacacactattttcatttaaacctcatgcggacctgtggggtaggtactgttactatcagctccgtttcatagggctgggaagacagagagggggtcatcacttgcccaaggtcattcagctaaaacctggacccacacaactgcagagtctgtgcttgctcctctctgccatactgcctgctgcctcaggatccccgtccccgactcccaggtacttccggaacctgtgctcagatgacacccccatggtgcggcgggccgcagcctccaagctgggggagtttgccaaggtgctggagctggacaacgtcaagagtgagatcatccccatgttctccaacctggcctctgacgagcaggtgagttttgcttcctggccctctgctctcccgtccttctggtggttcctgcccatgaaagagaatcccagagctcagcaaggcctctgctgccctcccactgttcctctcctctccctaggactcggtgcggctgctggcggtggaggcgtgcgtgaacatcgcccagcttctgccccaggaggatctggaggccctggtgatgcccactctgcgccaggccgctgaagacaagtcctggcgcgtccgctacatggtggctgacaagttcacagaggtagatgagcgaccgttgacattgtcccactggtggggacactgacactctcagaagggaagcatataggagctgaggtttccattaggccgatggaaccattgggcgtttgagcaataagatctctatgatcatctaactgcgtctcgcttcgtgtgccaatcctggttgattgacatggcatcttaaagtgctgccttgagaaagattctgaggcaaagttaaggctacgtggaggaaagtgccacaggagcagagaagggtagcacatgtgggg

SEQ ID NO: 11656 - DNA, 1298 bp, Homo sapiens
gtcacccgcctgtgcagtgatcagagatttctaattcctgtgtgtgccctggattcttgagactcctcccaccttgggtttggtgtatccgtgtctgtgtacactctcttgcccaagagccctgtgcccacctgttgccccagtccatcctggctcaccctctctctccctgtctcctttcgctttccagcaccttgcagagtgaagtcaagcccatcctagagaagctgacccaggaccaggatgtggacgtcaaatactttgcccaggaggctctgactggtaagacctagaaagcacggagccctagcaggagggtggactttgaggacaggcactgggcctgtgggcagcagcttctgggagggggaggtaccttggcattgtgggcagagagagggctctggttctgattcttgcctgttcctgttttcctagttctgtctctcgcctgatgctggaagaggagcaaacactggcctctggtgtccaccctccaacccccacaagtccctctttggggagacactggggggcctttggctgtcactccctgtgcatggtctgaccccaggccccttcccccagcacggttcctcctctccccagcctgggaagatgtctcactgtccacctcccaacgggctaggggagcacggggttggacaggacagtgaccttgggaggaaggggctactccgcccacgtcagggagagatgtgagcatcccgggtcactggatcctgctgctgtaatgggaacccctcccccatttacttctccacctcccgtcctccccatcattggtttttttttgtgtgtcaactgtgccgtttttattttattccttttattttcccccttttcacagagaaataaaggtctagaagtagttggtcctctggccttagtcatcagcttggaggagggggcaccaccccagagccacaacatctgcgcttttctctggagaagatcttgttacaggacccattatacccctatgtcccgaaagaatactctggggatccccccaggagtgctgctggcctttggggtagagggtccatgaggtgctctgggtggtgtcctgtagtgcagttcagattcatagatgtcggccgagtatttggggggttaagagcaggtgccttggaaccagactgcctgggtccaaattgtggctccttcagttaatagacgtgtgactaggagtagcttgttaagtctttatgagctcagttttgtattgtgtaaaatgagagttacagtaatacctagattgcagggtgggtggc

SEQ ID NO: 11657 - DNA, 1820 bp, Homo sapiens
ccttataatgtcaaaacccacatttctaagaaatatctcaaagattttatctcttctttattactcacacaggggcaaaaagcaaataattggggaagcccttacaaatctaatggatgtggcatggtctttcctcaaaattcacaccttgcaagtcatcagagaagtcatactaaagagaaaccttacaaatgttatgagtgtggcaaagcctttagaacacgttcaaacctaactacccatcaggtgatccatactggcgaaaaacgttacaaatgtaatgagtgtggtaaggtctttagtcgaaattcacaactctcacaacatcagaaaattcacactggagagaaaccttataaatgtaacgaatgtggcaaggtcttcactcagaattcacaccttgtaagacatcgaggaattcatactggagagaaaccttacaagtgtaatgagtgtgggaaagcctttagagctcgttcaagcttagctatccatcaggcaacccacagtggagaaaaaccttacaaatgtaatgaatgtggcaaggtcttcactcaaaattcacaccttacaaatcactggagaattcacactggagagaaaccttacaagtgtaatgagtgcggcaaagcctttggtgttcgttcaagcctagctattcatctggtaattcacaccggagaaaagccttacaaatgtcatgaatgcggcaaggtctttaggcgtaattcacaccttgcaaggcatcagctaattcatactggagagaaaccttataagtgtaatgagtgtggcaaagcctttagagcacattcaaacctaactacccatcaggtcatccatactggagaaaagccttacaaatgtaatgaatgtggcaaggtcttcactcaaaattcacaccttgcaaatcatcaaagaattcatactggagtgaagccttatatgtgtaatgagtgcggcaaagccttcagtgtgtattcaagcctaactacccatcaggtcatccatactggagaaaaaccttacaaatgtaatgagtgtggcaaggtcttcactcagaattcacaccttgcaagacatcggggaattcatactggagagaaaccttataaatgtaatgaatgtggcaaggtctttaggcataattcatacctttcaaggcatcagcgaattcatactggagagaaaccttacaagtataatgagtatggcaaagcctttagtgaacattcaaacctaactacccatcaggtcatccatactggtgaaaaaccttacaaatgtaatgagtgtggcaaggtcttcactcagaattcacaccttgcaagacatcggagagttcatactggaggtaaaccttaccagtgtaatgaatgtggcaaagcctttagtcaaacatcaaagcttgcaaggcatcagagagttcatactggagagaaaccatatgagtgtaatcagtgtgggaaagcctttagtgtccgttcaagcctaactacccatcaggcaatccatactggaaaaaaaccttacaaatgcaatgagtgtgggaaggtcttcactcagaattcacaccttgcaagacatcggggaattcatactggagagaaaccttacaagtgtaatgagtgtggcaaagcctttagtcaaacttcaaaacttgcaaggcatcagagaattcataccggagagaaaccatatgagtgtgggaaaccctttagtatctgttcaagcctaactacccatcagacaatccatactggtgggaaaccttacaaatgtaacgtgtggaaagttctaaagtcagagttcaaaccttg

SEQ ID NO: 11658 - DNA, 1342 bp, Homo sapiens
ggagccatcggcagacgccgcggcctcccttgagccccgacccccgtcgtcagaacaaccccgggcccactcccccaaccccacttccgcttcgcgccgctatcgcgatagcgcccgggcccggggcgcgagaaaaaggcggcgggcgctcgcctcccccgcctgtcgcgatacgctcctcagcggcggcgccagctcctgtggtgagagcgtcaggctcgactgggccggaccccttcccttcctccccccggcgccatcggccgccctccccgccgcctcccgccctggcgacaccgccgtctgtcgcgacatggcctcccctcgcctgccccctgccgccgcctctgcagcgcggggctcccggcggggggcggctccctccctctcgccctcccgttcctgcgcctctttcacgttcctcagcgcctcccgggggtccttccgcgacccggaccccgggccccgcccgccgccgcctccccgcgtggcatcgcgtcgggccccccggtaggggtgtgagggtgcgaagcctcccgggcgcgaggtgcccgcccctctccgcgtcggtattggctcctggctggaaggatggaggcgcccctggtcccaggtgcccgccctctcggggctcaggtgcctgcccccctcggcctcggtccttcgcgttgtggggcagcctccgcgccggggcttctccctcgacggtggcggggagggggggtggtggtcgggacgaggaccccagctgggtgggggagtcacccttcccaggaccgaggccgccctccgcatccctcctcactgctcccgggagcgcagcctcccctggatctcaggttccagctgcccgtctgtatcggatgggagcctcttgggagaggagtggaggagaaactccccgttagttggagcctttgccgaagtttccacctctgtagtctgcagctcttccctctcatagcgagtagcgccctgggtggctccagcctcgccatcccgctgcactgggcgcctgcctttttgggggagtttggctttcccccacctggggtacaggaccgtcctcagtgtggcccacgtctggtctcagctctcacacttctttgatcctggcgtctgcccctggctttgcagccttgaactcccctgcatcgtgactctccgaccttctgggtgtgggcgtctcccagtgatatcaggaccactgtggtcttgttgctgggggctgctgggatcccctggcgctcaggtgcctggtgaaagacactaagccgccacgctgtccatgttagtgagctcccactgcgggcagcaccagcccctctttctgagcagtccc

SEQ ID NO: 11659 - DNA, 1114 bp, Homo sapiens
gcaagctcctcacaaatgggggttatcattgttactgctggagcaggtcggagggtatctgtatgccagaggcagtcacagtggtgggcgggctcagttgagaaatctgggctgtcaggtgaggtgcagatggaggccaagtcgtgggatggcacaaggacctctgggtcttttagaggtttccaaggactcctggagccagaaaggtgtggggagaggagggagcagtgggatcccaagatgtcaaggctaagattggtccccacagggctcagagggtgggtggaccccatactgccccaccccgaaggggatggcgtggaggctttgggtctccacaggggtcagggactgaggacaggttctgtgggggcaggaggggccaagcaggtgctctgcagcccctgagcctggccctgggctcgccagcagaagcaggaccggattgagggcttgaagcggcacatcgagaagcaccgctaccacgtgcgcatgctagagaccatcctgcgcatgctggacaatgactccatcctcgttgacgccatccgcaagatcaaggacgacgttgagtactatgttgactcatcccaggaccccgacttcgaggagaacgagtttctctacgatgacctggacctcgaggacattcgtgaggccctggggctgatcgtggcacaggaagtgagggcccagaatgggctgtgtgagccagctaagcatgcccttcttctgcccccacagcacaggcgctggtcgccacctcccctcccagccacagccacatggaggatgagatcttcaaccagtccagcagcacgcccacctcaaccacctccagctctcccatcccgcccagcccagccaactgtaccacggtgaggccccacgggacactagtaccttgtgtttccagcagggcaggactcgaggagacaaatctgggtcactccaaagtggctatgggagcgtaattgaggaaacacagatctaggtatccagggtctaggctcttggagcacacgctaaggtcctatatctgggtccctaaaggacataaagagcaatagggtgcatcccgcgccagtttaggtcctggatctgggaagtggga

SEQ ID NO: 11660 - DNA, 1153 bp, Homo sapiens
aaaatgtccctgcagagtgcttggatttagactctgagactgttccattctctagaacaagggtgacagtacccactgcctcgaggtctttgtgaagattaaatgctaggctgtgcatcctgtactcacgtgagaggtgctcaaaagccacagccctcgaggaaacgaaggctgtgcactcacacctggggctggggccccgttctggcagctggcttcggtggaacctctgcggccccctccgtttcctcctcgctgaagtggcatgataacatttcctacccaagaagaaccttgtgaggatggatgagagtgtgtgcgtgcagggcagctggcccggtgcctgacacatccacagccctaagaattgtcccctttgtctgttggtccggcccagatcccagaccacctcctcgtccactcactgaccgccttctcccccggccagggcacctacatctactttgactacgagaagtggggccagcggaagaaggaaggcttcacctttgagtaccgctacctggaggaccgggacctccagtgacaccggcccctccctctacccacccccttcccccgcatgctgatccccctgcccaggtgagggccctgccctggaagactggagggaggccccaagccacggggcatccccctctcccaggaagcagggagggggccgggaggttttcctctcagccccaccctgggggcccgggggcgagggctgccccctcctcccctccccagtgagggacattttttggtaaacctattttcattttggaaaatatttatgaataaatagttttatatgacggctggcagcagcggcctctcctgtaccccctcaggagtcagtgagtaaggtgagggtcctgctggcgggggcgccgggccagctgggggttgaattgggagttgtaccgccgccgccggtcatccgtctcgtcttcttccggctgaccctcctgtagtgcccggccttggacccgggccagcagggcctctgcccgagacctctcagctgcttccctccgcagacgttcagctcgaagctggtccagggatggaggcctgtggggagaggagtgaggtcagaaagctggtagcccctaggaggccattcccccaacctctcccatagagg

SEQ ID NO: 11661 - DNA, 1176 bp, Homo sapiens
ctgagtggggagggcctggggcctggtctcctggatctgagggaggagggaggtggggtctggtctcctggatctgagggaggagggaagtggggtctggactcctggatctgagggaggagggaggtggggtctggtctcctgggtctgagggaggagggactggggcctgatctcctgggtctgagggaggaaggggtggggtctggactcctgggtctgagggaggaggggctgggcctgcacttctcggtctgagggaggaggggctggggtcctggactcctggatctgggggcagtgggcactggggacctggactcgtaggtcctgactcccagcctcctcctcaggagcgcctggaccatgctgctgagcgcctactggcacggcctccacccgggctactacctgagcttcctgaccatcccgctgtgcctggctgccgagggccggctggagtcagccctgcgggggcggctgagcccagggggccagaaggcctgggactgggtgcactggttcctgaagatgcgcgcctatgactacatgtgcatgggcttcgtgctgctctccttggccgacacccttcggtactgggcctccatctacttctgtatccacttcctggccctggcagccctggggctggggctggctttaggtgggggcagccccagccggcggaaggcagcatcccagcccaccagccttgccccagagaagctccgggaggagtaagctgtcacgacgctccctctgccagctggtcccgggaattctgtgaaccaggctgctgtctcctccccagaaagagtccttaccttggagagggtcctggagagaatttcctcttccccagctaaataccctgcctgcaactgaagcagacccgggggtgtcctccctgccctctgcccagaggccacctccactcctacaaaatcaaagtattgtccagacaagagtcactggcccctgctccagcttctgggtatccagagagcactgcacttccccaaaacggaaggggcccctgggcagtgggttttgggcaaattccctttctttgcatccacaatgtggggtcggagcttgggggcaggtcctgggagtgggaagcctcttccttgtgtctttcgctccacttttagctcatcgcaccaatattgcaga

SEQ ID NO: 11662 - DNA, 1251 bp, Homo sapiens
ctctcagatgaggaggcaggtgtattttgccctcctgtcatctgcagtttactatgaatgatgacctgacaaccatagggtagtttggttttttgtattgttttgttttgtgacagggcctcactctgtcgcccaggctggagtgcagtggccccatctcaggtcactgcaacctccgcctcctgggttcaagcagttttccttcctcagcctcctgaatagctgggattacaggcagtgcgccaacggcctggctaatttttcgtaatcttagtggagacgggctttcgccatgttggccgggctggtctctcaaactcctgacctcaagtgatccgtctcggactcccgaagtgctgggattacaggtgtgagccaccactcccagcccgtagggtggttttgacagtgacatgggtcacggtgatggcgctgtactacttgtgcctcaccgccgcggcatggagctaccaagaggcggagccaggatttgaacccaagaagcctgaggtcagaaggcggaatcagtgtttcctcccactcttcccaggcaacgccctgctgcggcggctggtccgcattggggtgctggatgagggcaagatgaagctggattacatcctgggcctgaagatagaggatttcttagagagacgcctgcagacccaggtcttcaagctgggcttggccaagtccatccaccacgctcgcgtgctgatccgccagcgccatatcaggtaccacctcggatgggcacctgaatcttcctccacctgcccctctgatggttgccctcactaagcctgctgtccctatctcctatgcagccctcggaggtgatgggtgtgaactcacccagagggtacagattcacccttgcacacagctcaccagggagctggggcagcctcttgccccaatagcccagcgcaagggtcactgcggctctagccgtacaccttgtgaaggcctctgccaggcatgtgggcagctggacaggtaacagctcttggtgtccccagtggagggagagaaccagcctcacctcgcttgggtggtgggttcagctgtctcctggctcgcttgtgaagttgattccagaccccgatccatgactgcgttctgggtactcagtgtgccctttctgtaatgtggcaccattgagggggaggagctgtacagaaagagggcaagatgtttgcgtttagaatcttcgccccagcccttcactaaccctgtgagccgtaggca

SEQ ID NO: 11663 - DNA, 1149 bp, Homo sapiens
ttgtgtgtcaatgctttcgtcggagacgtagcctcgggttgctgtgttattgtgggcattgctgctgcacgtggtaatacagctcagtgtcaggtgtggggttcacgatatttcagactcggaacttgggggctctcacatggccatctcatttgctttgtggtcttaggtgggatactttcagatttctcctataaaatggggttgagaaagtcatctgaagcatttttggggattaaggtgataccctaaaaccccggagggcgcacgtaggatcaggtgcacccttcctgcagcgccttggtgtctgcagccgtggcggcctcacggggtgggtggagaggaaagagtggtgcggtagctggggttagcgtccgtttctcctccagtccacctcaccttgtcgcttcttccagggtccgcaagcaggtggtgaacatcccgtccttcattgtccgcctggattcccagaagcacatcgacttctctctgcgctctccctacgggggtggccgcccgggccgcgtgaagaggaagaatgccaagaagggccagggtggggctggggctggagacgacgaggaggaggattaagtccacctgtccctcctgggctgctggattgtctcgttttcctgccaaataaacaggatcagcgctttacaattggtgtgtgggggtctctcatccttgactctttcccctgctctaaacatgcagccttccctgggaggctcactcacttgggagtgcctaccagctagtggtccctggcctctcagtactattctacagtagtgaacacacatctttaccagaaacttctgtcatcaggggagagacgagtggtatttttggaaaaactgtgtcaaaaccagaaggaaattccaagtaagccggtgtttgcatataggggtgggagggagccggtcattgctaggcagggcaggcgccgagtggaggtgggggccttccctgcctgctggccctgggaccctgaccccgccaggcaagagacaggtgggacgggagctgaccagaggctgacgggttgctggggaaggtgaactgttggtgattgttggggaacacttcacagaatttgcttgctagtttcaaagcttgtgatgcggttgatgttgggcaagt

SEQ ID NO: 11664 - DNA, 1179 bp, Homo sapiens
aggtccccgacgcgccacttccgcagaaggtactgaggctcccggctggggctgtgtgtgagggagggggaggcgtttcaggcctgaccctcctgcttcttcctgcagtgactcccactcagactccgacagctcctactcagggaatgagtgtcaccctgtgggccgcaggaacccgccccctaagggccggggcggtcgaggggcccatatggatcggggccgaggcagggcgcagcgtgggaagaggtgagactgtgtgagggctcgacacacgggccagggtggaggagggtactggggacccatgggagaaggaggaggagggccggacaggtggacagccagctgccaaaggggcgaggctgaaggggggctggagacgcctgtcgcgctcactgcccctcatcccttcctaggcacgatctggcgcccaccaagcgcagtcgaaagaagatggcggcgctggagtgtgaggacccggagcgagagctgaagaagcagaagcgggcagcccgcttccagcacggacactcccgccgcctgcgcctcgagcccctggtgctgcagatgagcagcctggagagcagtggggctgaccctgactggcaggagctgcagatcgtgggcacctgccctgacatcaccaagcactacctgcgcctcacctgtgcccccgacccgtccaccgtgcgccctgtggcagtaagtgcccagcagggcagttctgctctgtgaggccgtgctggctcaggacttggggagccaacccagggagggtggcagaggccacacgggggctctggtatggcaggggaagctcggccagagacgcctcggctggtcggcgttctgagaggagcgcaaaggcgctctgctgccctggagccccgcgtggcgggtgtgcagcttggccggcgaatcgcttgacctctgggccgtggttcctggcttaggtgacacggagcataaagccttctcccaggcccgtgggctgtggggcgtggggggctgtgcttccagtgtttggcgtagtcactgttctgctgcagaacctgtgaacagccatgtgcttatagggaaatgggtgtggaggtggccactcttaacccatgtcttgtgggtttgttttctctttttttgggagagagtctggctctgtcgcccaagctggagtgc

SEQ ID NO: 11665 - DNA, 1392 bp, Homo sapiens
ctcctggaactggagagattcgtgagtaggggcagtggggatgggggccagaggcgtccccagcctcacatccctaagtttggaccaagggagccacattgcccttcccagctggcccctggccttcccctgccctcctcagcctcactcagtttctgcactttccctgttcattccaggagcgcagggccctggaacgcaaggccgcagagctggaggaggagctgaaggtgggggctgtgggggctgtgggcagagggccgagggtgggtgggggtgcaacccgccagggctgcccagctgacccttgccgtcccccaggccctgtctgacctccgcgctgacaaccagcgcctcaaggatgagaatgcagcgttgatccgcgtcatcagcaaactctccaagtgacccggagggactttcccgcacccgtatttatacagctgcttctgccacacgcaccccttcccccgtgtgaacacgagtgacagggctccgggggaagtctcagagaagccatagcccccctgggacctccggactgggaggggagcagagtccccaggagccgagggggccacccgaggccaggatggaggtgggaggccgagccaagcagggggacgttgccagaggggaccagggccagagacgggaccaggaaggaactgaggaccaagaagtgcaaggatcagtagccaggaccagagtggccgcctggaggtccccatctcacgtgtgatgccaccccgtcacccctcccctcctgagcagggatccaagaatgtgccaagagtcccgccagcctcagccaggtgggcctgtatatagggtccatgtgcaatagggagggacgtcttctattttttgctgccccctccccgcccactgtctggggcagggggagaaggtattttcgagataaagcacaggcaccacaaataaaagtcgtgaagttgccactcaagctctgtgttcccagccagagggagggcactgtttcctgctcctgctggggggccgtgcgtgtccatgaccaaaccactgggccacttgggtgggtgccgggggatgggctggtgcttactcacctgtgtggtgaaggagcttcaggatgagcccccagcgggagcgaaggctccaagacggagcccgcgtgatcgcaggcggggggctgaggggaagctgatggggcaggagggatcagcgggcaagacctctggggccaaggatgtggagctggggagtttgggttttgccatcagtgtctttgaaacaaatttagtcaattgccaacatttaacatttggagaaatttgtgtgtaaaaatctggaattttggccgggtgtggtggctcacgcctgtaatcccagcactttgggaggccgagg

SEQ ID NO: 11666 - DNA, 1271 bp, Homo sapiens
tatgtgagtttgaccgtgatccttaaatagcagcacagacccatttgcaaaccgtggattgatgtggccccagcggagcaggggagacggagatgcagggggggtgttgtgtgcttggtggagggactgggttctgcaggctgggacggccttcccggtcctggacccccagtcagtgtttttctgcccgcctgtgcctctaggtcccagccgtcggttcaagcgagtggtggagaccatccaggcacagctcctgagcactcatgaccagccctccgtgcaggccctggcaggtgggtggtggggccgtgggtggtggggggcgtgggtggcgggggccgtgggtggcggggggcgtgggtggcggggggcgtgggtggcggggggcgtgggtggcgggggcggtgggtggcgggcagaggtccagcatgagcaggtgctctggggtttggtttgcagaggacgcccagctggtgggctccttcaccattgtcgtagctgaggtcttatctgcagagttgtgagcaggttccccgagaggctggggcctgaggagggtctccttagcaacctgaggactggctcccaggagtccctaagaagatgacaggctctgtgttgggggtcagggaacatcctgccaacagaggttctggacctctgtccaggaggacggtgacccaccgtcctggtttgcttgggactgaagggtgtttctgggatgcagggctttgagtctaaacccaggacaaattggtcaccatctttgcaggtctcacaagtcacctcaccctggggctagggcctaatggtccctagcaaccagaattctaagctgagttcatgggaatgtgcaagatcttgctctggggaatccggccttcccgggctcccagtcctggtcatcaaagactcaaattctctagcaatcaggagagcagagggtttgttgcaaaggtgtcttagttcgttcaggctactataagaaaataccatacactgggcaacttacaaataacagaaatttattgctgacaattctggaggctgggaagtccaagatcaagctgccagcagcgttggtgcctggtgagagctgcttcctgggtcacagacagcacgttggtgctgtgtcttcacatggcagaaggggcaagggaactctctggggcctctttcctaaggacactaatcccattcatgaaggccccaccctcatgacctcatcacctcctaacataacctcctaataccatcaccttgggattggg

SEQ ID NO: 11667 - DNA, 2952 bp, Homo sapiens
ccaaaggcagggccagagcacacacagattgggctgtggagtgaggcaggcctcagagaagcgggggcggcccgcagcaggcagagctcggacctcagctgccaaggcacagtctggcggggggcaggcagctcaggaggggatgggcttgggtgtggcagaggaggtggggcttggcacggggccacagaggctggagggagtggtcaccactgctggcactgcacgctgccagaaggtcaggttagatcatcgtcctgcagggaggggtggaaaccagccagtgggtggattgtccaggggctacaggcaaaggacaggccctcggcaaggcagccgcctcggaatgccacttttaggggctcagctgttgccccattccaggagaggacgctccgggccagggtgcccggccaggtgtggggagtgggtgagccctcccctgtgccctgggccagggcgctgagtgggcttggccctcagtttgtgcctgcagatgggaacgcagcctgcgtgaaggtgctccgggacattgagcctggggacgaggtgacatgcttctacggcgagggcttcttcggcgagaagaatgagcactgtgaatgccacacctgtgagaggtgggaccgggcgagaggcggctgggttcgggtcgtctgggcttcttgagcccagaaacgcaccctcgggacccatccctgagtgtgtccaaccccagcctctcatctcccttccacccggcctcatctccccttcacccggtctcccaggaaaggtgaaggagctttccgaaccaggcctagggagcccgcgttgccaccacggcccctggacaagtaccagctgcgtgagaccaagcggcggctgcagcaaggcctggacagtggcagccgacagggcctgctgggccctcgggcctgcgtgcacccatccccgctgcgccgggacccattctgcggtgagcacccctccctgccatcccagcagcccctcccctgtctgctcctggtcatctgtctcctttcttctgagctctctgcctagcctggaaccctccctcccaccctcagtcgctggcaggcctcgctgttgagcagttcggccgcatcattcctctggggagcgcagggcagggctgcctccttgtccagaggaggaccggcccagcttgcactgacttcacctctcctttgttcctcctctccctgccacctgggccttcacagccgcctgccagcccctgcgcctgccagcctgcagcgcccgcccagacacctcacccctctggctccagtggctgcctcagccccagccccgagtgcggccccggaagcgccgacgcccccggccccggagggccccagtgctctccacccaccacgctgcccgcgtctccctgcaccgatggggaggctgtggcccccactgccgcctgcgaggagaggccctggtggccctgggccagcccccccacgcccgctgggcccctcagcaggactggcactgggcccggcgctatgggctgccttacgtggtgcgtgtggaccttcgtcgcctggccccagccccaccagctaccccagcccctgctgggaccccaggccccatcctgatcccgaagcaggccctcgccttcgcccccttctccccacccaagcgcctacggctggtggtcagccacggctccatcgacctggatgtcggcggtgaagagctgtgacaggccggacggggaggcccagcagggagagagggtctctctcctagctgctacccaggacctccagaaggagcccttggacctctgggagggagctgacccttgactccagcatagctctgaccctggaatggggttggtttggacacccccagggatctgagccctgaccctttgtgactgctgacccctgagccacccccactcccacagggagccccggccatttgctgccctccccacccctgccccagcctcaggactgcaggagccatccgcccccctcagccccttcctccccagggagcaaagccataaggggcaggggccaccccacggcatctccccagaagtacaggcctcaggaggaggtggaactgatgtagggggtggcactccccagagactgccctcacgaggggactgggttcgctctcagctctgcagctgtctgcggtggggggaaggttggggggtgtctggaggcatgttcccctcaccaccccccgtgggtctcagggaggccgggtgtgacctcatctttctcatggtgctatcctggtgctattggggtggggagctccctcccctcccccacaccagaaaggggtatgttgggggcttggaagcacttgaactttttattttattaaaaccttgttataagcagcacccttggcggttttttgttttggcttatgttttgaagggatgtgaggagggtgagaccctcagctgtgctgatgagagggggaggaggcaacacaggccttcagccctgagagctgtcgggagagggatttgggagcgtgatggactaggggactgaggctggagccccatccccactcaggctgtgcttgtaaaaatgccttgagacccatactctcctaggagtgggtcctcccattttccaggcgaggtcaacatcgtttagcaagcagagtgacttgccaaggccacgtggggacttgagggcccttctcccttctcgcgcttctcaatgagatgcccctcccacatctcactccaaacggagagagactgctgggggcctggctgagtgagggtgtgggggctgcccaggacaccagagccgagcctgggggaggcggcgctgacaggaccttcctcagctgtggcatcttgggctttgccgtgtgtgagaccaggaagatgaatcttgtttcttcaggtccgctccaggatctggattttgccagggcgtctta

SEQ ID NO: 11668 - DNA, 1342 bp, Homo sapiens
cattcaccagttcattcataaaacaaatgtttgttgagcgcccatcatatgccaatcacagtgacaagtgctgggtgagcaatactggagagataacgctgaggtatgggtcccaggacctctcgaattggagccactcggaaatccagcggtagagtttcgaaaacttccgaacggttcccggaatacgctctcggccctctaaccgaagagttccgaatattcccgagcgttgagcgaattttcggcggaagcagccgaacatcatcgagccgcctcggaggtggggaccgacaactcctgtcgtgcccgcccggagaggaagcggaaatgcgtgtacggtattaaaggcgtcgcctcgcccctcgccttcctctttccgtctcaggtcgccgctgcgaagggaggtgagcgttcgtcttcctcgcgtggtcgccatctccggcccgccgcgcactccctctcagtcctctgcctgccttctccccttgcgcctcaagggtcattggcggaccccaacccctccccgtgaagtcgttgtgaattttcaagttattttcccctcactctcattcgccgcagctagtctcggctgcctgaattcggtcccgccgccttaggtcactcagtcccgcctgacaagagttctaggtcgctgtctgccctcaggggtctcccattcacccaagttcccagtcgctctcttcctctgctgtccgagcgtggcccgtggcctaacgctgctttagttctctgtgtctgacgctttccctgtgcccgtttccccgcagccgccgccatgtctgcgcatctgcaatggatggtcgtgcggaactgctccagtttcctgatcaagaggaataagcagacctacagcactgtaagtggggcccggatgcgtggctcctgcgggaggagggtcctgagtctcttgactctgggtcagagggcgggaccttcgcatgtctccgggtcccttattcacgatgccttgtgccgcctccttcccaggagcccaataacttgaaggcccgcaattccttccgctacaacggactgattcaccgcaagactgtgggcgtggagccggcagccgacggcaaaggtgtcgtggtggtcattaagcggagatccggtgagttttgtctggtttgggccagagagcggcccctttcccgggtctgggagctgtgattttttactgtcaggcaggaagagcggtaactgccatcgcggcgggcatccctggcgccagggtgttggtctgggtaccggcttccctctcggccgacttgtcagctctgtgagccgcgcgcgtctgagcccgtgtcctcacctgtaa

SEQ ID NO: 11669 - DNA, 1203 bp, Homo sapiens
ccgcccttcctgcctcctggcgcctgttgctccccacactctgccgccccccgcccgccctccccagcctctctgcccacccatctctacgtttctcaccctctgaccgtttctctcccgcccagcgctccaacctctgctctcgttctccccgcagcctggcggcccagtgcgaccccctgcaagccccatgccggccctcctgctcctcgtactcctggcctctagcgccggccaggccagggcgcgcccgtccaacgccacgagcgccgagcccgcgggcccgctgcccgccctgctggcgcacctgcggcgcctgaccggggcgctgacgggcggcgggggcgcggcgagcccaggcgccaacggcaccaggaccggccccgcgggcggggcgggcgcggcggcccgggcgccccctcccgccgagctctgccacggctactacgatgtcatgggccagtacgacgccaccttcaactgcagcaccggctcctaccgcttctgctgtggcacctgccactaccgcttctgctgtgagcaccgtcacatgcgcctggcgcaggcctcctgctccaactacgacacgccgcgctgggccaccacgccgccgccgctagctgggggcgccgggggcgctgggggtgcgggcggggggccagggcccggccaggccgggtggttggaagggggccggactgggggtgccgggggccgcgggggcgagggccccgggggcagcacagcctacgtcgtgtgcggggtcatcagcttcgccctggccgtgggcgtcggcgccaaagtggccttcagcaaggcgtcccgtgcgccccgggcgcaccgggatatcaacgtgcccaggtgcgtgtgctctcgggcgggaggactgcgagcctggggcggggcccagcaagggaggtggagccatccgaggaggaggggctgcagggatagggcgtggtggtcagagacccaggtggcggccgccggcgtagctgaaggtgggcaggggctgagaaagtcgcgccagagccggcccggctgttgcggagtgatgcagggagagggagaagcccagactctcattcattcgacacatatttcttgagcaccttctgtgggccaggagctggggatacaccagtgaacaaaacaaggtctctgccctggtggaaaagcctgacttccaaatccaagttcaca

SEQ ID NO: 11670 - DNA, 1136 bp, Homo sapiens
agcctgggtgagagtgaggggtggatgcccagatggggctaggcagaaggaagggggaaggcaggaaagcaagaagaggtggaggtggggcccctgggcccaggaggagacccctgaggcagtggtctgaagtgggggtctgggttggtttattttcccaggggctgccaggaagggagtggacaggttgggggctcctggagagggctgtagagccgtcgtggaggggcctctggcttgtcctgggttctgggctgggttgtgattggcctcatggggagctggtcccccaaccctcggggatcccctgagaatcccaggcacgaggcacctcccagcagtccacccaaccccagtcgggagccacgagatcagcctcttcccccagggcatgctggggaaggggcagggggccgcagaaatgtgggacctgcctcaggtccagctggcccaggtcgcgatgggacagacccggcgctggcaggggagcatcagaaccagaggaggggtcccatggcattgaggcacactctggggtgagcgcaatgttgtcaaagaggtcgagggtagaggtgtccagggcagcgagactcaggctggcgctggcatggggagcctcagtgggggccacagcacaggccactcccaggaagggggatggaggcggtgggggtggcttttggagcgagggtctctggggaggtgcctcctgggacaggatggagagggccaggcgctgggtggcagcctcaatcttggtgaactgcctgtaaagacagatgtgagcaggctggtctctaacgcctgaactcaagcgatcctcctgcctcggcctttcaaggtgctgggattgcaggcttgagccaccacccccggccagcatatttgcaagggtcacctatgtggtcgcatcacaccgtgctagttatttattttggtgattcctgaccgtccgccacccccatgaaaacacaacctccacgacagcaaggaactttatctgctttgctaactggcctggcacacagtaggcactcaataaatgcacgttgactgttgctggcatccagccctgggggctgctcctctctgtctgtacctggtctcccccagccaagggtgctggttgctccttc

SEQ ID NO: 11671 - DNA, 1112 bp, Homo sapiens
aggtccctggaatgagtgtgggtagccgtaagtccccaagacatggggactttgcagtgagcaatgggtctccacaagtacctctcatcttgagagccctaatactaaaagatgggcacccacccccaccaagggaagactgccccattccctgagagccatcattcctaacgaccttgatctggagaatgtggagggagcatgtccctgaattttcctagatccctccaaatgccacccaccagagtcactggtgaccccagaaaatggatatagccgaaatctgcctttcccctttttcattccctgtgctgaaagagggaccagggtagatgccccctgccctcgaatcccccctccccgactgtggaatggatcgaccctaacgatcttccccgccccaaacactagaatagactggcctgaaatccccttgcccagtagaatggactgatctatgtgcacacacccccatcacatggaatgggctggtctaggctgtggcctgccaccttccttagagtgaatagggcggacactcctctcttttcctgtagcgtgtggaccggtccacgcaattctttatcctgtgaactcatctgagtgggaggtggtggacactggggtttccttccctctctccgtagcatccgttggtctttctctccatctctgttggtttgtctgtctctgtcttcctcccaatccctaggggaagggggcatttggctagggggtgcccctgtgagcctcgaccttgccccctcgtccctctccccagtgtttccaggacccccaataaaccttgtcctgtcagtcgctgatgcctcattttctgatccttggctccaggcgggggggatggggaatctcttaggacagactccctaaatagagacgggtcctcgttttctcctgagaagtttcaaagctttgaatagtacatgcccttttaaattagagtcggtttaggctgggcttggtggctcacgcttgtaatcccagcacttggggaggccgaggcagataacctgaggtcaggagttcaagaccgtgcctggccaacatggggaaaccctgtttctactaaaaatacaaaaattagccgggtg

SEQ ID NO: 11672 - DNA, 1139 bp, Homo sapiens
gctctggagggggctgactggccagggaggcaaacacaggccataaggatgcagggaatagggggtgatttagggcgctatggggagggagggcaagagtgtttggggaaagaagcccctgactagcttgtctccactagagcacaggttaatcgtagctgtcactgactggacatctcctagaggcccgccacggttctaagcacgttacacatattaattcactgactccccacaactctaaataggggcagctgttcccgccgttggataaattagaaaactaaggcatggagaggcaaagtgagttgccatggtcacggagtaggagtctggatcaatgggcttgaaccccattcccacccttgcccccacagcagtgtttcactgggctgttccccgagtgaacaaaggtgaggggagaactatcaggataagagctttatttagggatgtcttctgggttatgaggggtgtctatacaaggggcctggtgggagagggtggtggttactttctcttctgcctacagtgttcttcgccagatttcaacaagactccctctggagcctccttgggtctctactcagcactccccaccccatcactctccagtccctcatccagccgcaggtgtttcattatagttattgccaccaactcatgtcattccttttctgtgtgtttactgtttggcccctctctaggaaagcaaggacttggcctgtcttgctcgcccctgtgaccccagcacttagcgtagcactggcccagtgtgggtgcttgacaaatatctgctggtatgtgaaaaggaaacaccaccttcctaaattaccaatgggtccacaaagaaatcatacattagaaaatgctggccaggtgcggtggcccacacctgtaatcccggcactttgggaggccaaggcaggaggatcacctgaggttaggagttcgacaccagtctggcctacatggcgaaaccccgtctctactaaaaatacaaaaattagccaggcttggtggtgggcgcctgtaatcccagctacttgggaggctgaggcaggagaatcgcttgaactcgggaggtggaggttgcagtgagctgagatcgtgccactgcactccagcctgggcaacaa

SEQ ID NO: 11673 - DNA, 1164 bp, Homo sapiens
ccacgaccgctccccctcccacccgcgggacaaagggcgggggcggggggggcgcacccccacgcgtgacctttccccgtactgcgcacgcgcccagcccccaccaccgggggacggtccgcccgcccacgcgagtgcgggggaggggtgtgggggccccgaaggtagaggaggcagcgcgcacgggctggacctcctcctaccctgggaagttggggcagtttccccctgcacctgcctcttccttaggcctggcagtggcccgcgatgagagagggtccttccccttcaggctaggtgtccctggtcaggcgaccccttggggcacccagcaatttagggcttcagcttccttttccttcgatacccaggagcccacgtccccagctcacttctcccccaggacctaggcggctgggccccctgcccctgactccaggagcccaggagtttgaagcccaggcgcgttttgcctcagtcctggggtccaggctccctcctccctcagaccaggggtccaggccagaaggtccctcctgtctcacttcacctcccccaggatggaccctccagtccatctgcgtctctccatttgtggctgccgtttctgtccagtgcccctgaggccctcggctgctggggtccgtaggaagccgcgccatgaatgaccggagcagtcggaggcggacaagtgaggaagctgggtccccttccctaccctgggtcccagtgcggtcggctccaggctgccgtggttggggggtggcctgagaggcccggggaattctctggggtaacccggggcctctcctctccagtgaaggacgatgagaccttcgagatctccattcccttcgatgaggcaccccacctagacccacagatcttttacagtctgagcccctctcggagaaacttcgagggtgagctgagggggtgtggagggactggagtcagctgggaagccaagccctgagtcccagggtgtgacctggtccccccaccctcgctgtgtccctagagcctccggaggctgcgtcctccgccctggctctgatgaacagcgtcaagacccagctgcacatggctctggagaggaactcctggctgcagaagcgcatcgaggacctggaggaagagagggacttcctgcggtgccagctg

SEQ ID NO: 11674 - DNA, 1194 bp, Homo sapiens
gaggctctcagatggtgcttcaccggttctcccggggtttcccttttggtgctggtagggcagtccctgagacctggcacggctcctgggttggcggagctgctcccataagatgaccacaatacagtgttttgagcaaacgaagctctcattgtttttacctgtccagcatcagtgtgtgggagagggttcttgccataggggaagctctgcccgcgtgtcactgcctgtagtctttgtctctgcggaggacgggccagcttctgtacgtgtcgccttctgcttcagtcctttcctctgctacctgtatctacagggaatttccttgtctatatcccaggcacccagcgggcatcattgctttctctgcgtgggttcctgtctgcctgcttgcctgtttcagagccttagcagcagaaagggctcttggggctcacagcctgtccatcttataagcgaggagctgtgcccagtgccgtgcctgtgtgcccgctgctctacactgctggcctgtcctgccgattgttcctcccaatttcagtttttgattttggggtttttggccttcaaggggacaattatattgtcattaatggttctagccagacctgagtgttctgcctgatccacattcgagagtatggcctcgtgcttaactcactgatgtcagagtgtttaaattctggtgtcaccatttcctagctgtttgaccttggtaattgtgatctctctataccttagtttccttacccattatgtcagcccccagcagtgtttttccgaagcagtagtgaggattaagaacaaacaaaacaatttagtacagattccggttgtaggaagcatctcaatatttgttgctgtttttttccctgctgggtgcatatttttctgagtgttggtggttttggaattgtgatgcttttccagacattcacattgcatcgcaaaaacgtgagacaaaacactgtgggtgaggctgaagtttaacatcctccctcagtgccctttcctcctcttgtccccagggatgatcactccaggagatgcgtgttaacatatataagcaccttaacgtgtgcatctgttttgtgtgtgtgcttcatggctagctgagaaatctgggtgtctttgaattaaggaaatggtgtggcggtgctcatgaacccccccgcccccccatgctcatggttt

SEQ ID NO: 11675 - DNA, 1158 bp, Homo sapiens
ctcttttctcctcccctcccgtccctgcccctcctccctacactcctcctctcctgcccctgcactcttgacttcctcctcctcgctcgtctctgtcctgctctccctttctgtcctttgctcgtctctgcccctgcctgccacttcctttctactttcctgccacttttctgtctgtctccactgggtggcccttcctgtgtgctctgtctcttcatctcttgtgtttcgtgtttttcttcattttgtgttgtcatcatgccctctgccttttcttgaacaatcttctcctttcccctgattttttggggcccctgtggctgtcccccaacgcctgtccatcgcctgcccttggccgtctcttgctactgcttcctccccattttctctcttgcttctgttcttactattgacttctacacccccacccatattccactgttccttccccccctcctccctcccctcatccctctccccttacccccaaacccctctgtgtctccctctctcacccttcccctcctctctccacctcccttcccccgcccccccccttgtctcctattccctctgcaggaggccatgatggatttcttcaacgcccagatgcgcctgggggggctgacccaggcccctggcaacccagtgttggctgtgcagattaaccaggacaagaattttgcctttttggaggtgagctgggggagtgagtgaggtccaggaaacgtgtgtgatgtgagggcccagcccttaggctgatgttgtgtggagctgccttgtgctgtttccaccaggccctctgcagcctcttctccacccggtcgctgaagtgagccctgttatagcattacagatctgatcctactttctgccttccatttgctttctgtgtgacctgagaggcctgtttggcctctgtagacctctttggccttttccagaccattccggcccagtcctctctgcactctggccacactgaccttcccagaacctaccatgctcctgcctgcttggctagagttctttacaccagctaactgatgttcctaactagtcttctgttaccccagctaactgatgttcctaactagtcttctgtgtctgtgtttctcaactgtcgggaaaaggccttggtttttgattttcgactct

SEQ ID NO: 11676 - DNA, 1177 bp, Homo sapiens
ttttccaggctcttaatcccctttgccttcccctcttcccccaccaatgccccggcttgggggtaggtgtcgggctcctggtccctgaccccacctctccccgcaccccccgacccctcatcctccaaacacaggccattgcggggctgaacggcatgcagctgggggataagaagctgctggtccagagggcgagtgtgggagccaagaatgccacgctggtgagccccccggcacgtcatcttccattggcttgagggaccctgggggtgggaggggctggctagtaggggacaagtgttcctgatctttctcccagctttcatgggaaggcatttggggggcattcagtgcagtgttggggagtcgggctttaggtgttggaagtggagagatggcctttcccctgggggggcatgtgaggggcctaggcttgagcagagggagactgggtctgggccccctgtgacgccgctgcctcccctggccccacagagcaccatcaatcagacgcctgtgaccctgcaagtgccgggcttgatgagctcccaggtgcagatgggcggccacccgactgaggtcctgtgcctcatgaacatggtgctgcctgaggagctgctggacgacgaggagtatgaggagatcgtggaggacgtgcgggacgagtgcagcaagtacgggcttgtcaagtccatcgagatcccccggcctgtggacggcgtcgaggtgcccggctgcggaaaggtcaggaggcctcgggctcagtgctctctcaccctctgcccctcctcttctccgcgccctctttcttcctctcttgctccctcaccctctccccctcctcttctccgcgcgctctttcttcctctctctctcctctcgcagcgcgtgcgtataggtgtatgccatcactgagtgccgccctcaggccgggccatgggagatgttggtgaccctgaggggtttgtggccctgtgggggcccaagacctgcaggcgagacagtagttggggaatgtagctctgtatcgctgtagaacttggccctgctcccccttatatggcctggcttgtgcaaatggttttgcctggtctgtggagtggggaagagtgccgggaacagtcccgagacacctgctggtgtctcctgtgtgccaggcaccctgccgaagctgtgt

SEQ ID NO: 11677 - DNA, 1310 bp, Homo sapiens
ctgcctctcctttccccacagatctttgtggagttcacctctgtgtttgactgccagaaagccatgcagggcctgacgggccgcaagttcgccaacagagtggttgtcacaaaatactgtgaccccgactcttatcaccgccgggacttctggtagaggcggctgggggagggtgggggcagggctggctgggggcttctccccactcccgccccccccttatccccctctgaagacgatgggcagaggagtgacagccgcagacacacgacagccggcagcaactggaatggcagcaattaagggtggggggcgggggttggggggttggggggttagggcagggaggggactggggaagtgcgcacacagcccacacagacaacacgcacccacacagacacagagggaaggggttgggatggggacagggtgcacagcagggcggggtaggaccccagcccctcccaaaacagcctctccttctcccatagacccctttcttctccccttccccacggtaggaacatagcgtgtttatattttatggccaaactattttgaattttgttgtccggccctcagtgccctgccctctcccttaccaggaccacagctctgttccttcggcctctggtcctctctggtcccctcctgggtttcttacgtagttgatttttcctctttagtctcccccgacctgcgcccagccccgtggcccctgcccctctcctactctctgtggcagtttcatatttgctaagacgaatttgctcattaaacattttgttgtattttactttatggagcggctgtgtgtccagtatgtccgaccctcttcctcggttctgggctcgggtgggggttcccttggcaaactgcgggcccctggctgggacgcccctgctgccggcgccggcagcctcgaggccttccctgcttgcgcggtgcccttctcggggtcggcacaggcacagccccgggggacgtgaggttcccgagtgctctcccaccccgccgacaggagggatggtggccgagcgggccggggcgggcgtggcgtgggtgtgccaggagctccgcggttgccgccaagcgagctggagctgactctcggcgttccgtgagcaccgcgcggatcccccgctgcagcgggcggaagtgacgtagaggcgcctagcaacggggcccagcgcgccggaagtgatgccttccaggttggcttggctgcggaagcgactcctgccagggcggggtgcggcacgggagggcggggagcgcggcaatttccgcttccggtccgtcgcctc

SEQ ID NO: 11678 - DNA, 1310 bp, Homo sapiens; identical to SEQ ID NO: 11677

SEQ ID NO: 11679 - DNA, 1881 bp, Homo sapiens
tctgtgctgtctgtccacttggaagctccctctggggctgtgtactcaaggagcgtctgagggcaggctcctctgagcctggaggcacctgtgaacacgcccccgctgccttcccccgcgggcctatagaccctggacggccccaccctgaagcagttgctgccctctggttgtcagagggtgacacctgcttctgtcatccctcttgtgtttgctcactggaatcagacccaccttatgggaatctgggctgacgtgaggttttggcctgggcaagcgatgcttccgctctgcacctcagttcctccttcccgaggcctctgggcaccgggctctttgaagcgccccctatgatggcctatactgctcccgggttggagcctcactgctgtctgccctgtctgagcccctctcccggatccttccaggagagctggagctgctggcaggagaggtgccggcccgaagccctggggcgtttgacatgagtggggtcaggggatctctggctgaggctgtgggcagccccccacctgcagccacaccaactcccacgccccccacccggaagacgccggagtcattcctggggcccaatgcagccctcgtcgacctggactcgctggtgagccggccgggccccacgccgcctggagccaaggcctccaaccccttcctgccaggcggtgagtgtgggcccatcacctgctcaagtccttcctgtgggttccaccagaggaggtgcctcacggggcagggacacttcgccctttgcctgcacatgctggatggacacaggtgggctgcgccactgactccactccgtgtctctggtttactcttcctgcaggaggcccagccactggcccttccgtcaccaaccccttccagcccgcgcctcccgcgacgctcaccctgaaccagctccgtctcagtcctgtgcctcccgtccctggagcgccacccacgtacatctctccccttggcgggggccctggcctgccccccatgatgcccccgggccccccggcccccaacactaatcccttcctcctataatccagggcggaagggggcctggctccatccggctgccccattccggctccctgggagatcagtgttgtgagtgcatgtgaaatgggggatccccacccccagtgcccttccccttcctggggcccactcacactacaccctcttcctttcccaccccacctccccggagagaaactggacatggggcctggggaggggagctggccagaggaggacccctttcccgtggcattagaagggggaggggtggctggggcccccacccattccccctccctccaaactcccaacccccagtcagtgtttgagcctcctcgttcccctcacgcacccgctcacgcaccctcggtgaatccttggtgatgattttggcaactttgggaataaatggcaattcccacgggcttggcactcccagattcccatctgtgatttcgtgtgtcccccagagccccttcatccagggacccagggctcaggtcacatctctttctcgggggtggctggcaaccagcccctctgtctcagaagccctgatttccctgaccctcccaggtcaagggatggctgggttgagggtggactgtgcgaggcctggcggagctgtagcccacacaggtccaggtggtcgggaggccactcatggccagacgcttccggtgcaggaggccttgctcttgtgttgaggggacaccaggatgaggtcagagagtgcactggggttcagggaggagaagaatcctgagagatggcacatgtgcaacacaggtcaccgtcgccatcgcccgggcccaccgcaagcatcactaatccatccctgca

SEQ ID NO: 11680 - DNA, 1286 bp, Homo sapiens
ttgcactccagcctgggcaacagagtgagactttgtcttgaaaaaaataaaaaataggctgggcgtagtggctcaagcctgtaatcccagcactttgagaggccgaggcaggcggatcacctgaggtcaggagtttgagaccagccttaccaacatggagaaaccccgtctctactaaaaatacaaaattagctgggcacagtggcacgtgcctgtaatcccagctattcgggaggctgaggaagggagaatagcttgaacctgggaggtggaggttgcagtgagccgagatcacaccattgcactccagcatgggcaacaagagcaaaactccatctcaaaaaaaattaattaaaaaataaagataccttcaatcacaccagacactttccccgcctccgctatcattcctctctcaagccaacagataccacgtggtctaagctgttcacaggagtggacaaaacagtggcccgtcaggaaggaataaaggaaactccagttaatgctgctgaaccttctcccgctgttccactttcctcgagagaggcagactctctctattccccgcctcttgcaggttggtaaagtgtcatctcaccgccgcgtgctgtgagagtctgtcctgtgtgatctcgaggagcagacacctgaagagcctggatctcacggacaatgccctgggtgacggtggggttgctgcgctgtgcgagggactgaagcaaaagaacagtgttctggcgagactcgggtaacttcctggggcgcctctttgcgggccgggctgggaggaggtgggggaccccagcatgaggttgcttgaacagggatgatgatgatctggtttccatgagtccctcaagttagatggagtgcaaccttcgcagcaccacagatctgggtataagttccagctcggctcctatggatgagacggatgaagtggcaaatgcttgggaacaaggtctggaggtagaaaaccctcaactgccgattgaacgacccctgcgtgctagtcctggtgctaaatggcggaagtatggaagtgaaaagacctttgtgttgtagtgtgaacagtctagagacaaagacgggcagaaagcaagtgattacctgagtggtccttaaaacttcagtgagcatcagagccagccaggggcttaagacagagctccaatatagtggactatggttcagccatgaaaagaaaagtgctgaggctgggcacaggggctcacgcctgtaacaccagcactttgggaggccaaggtgggcagatcacttga

SEQ ID NO: 11681 - DNA, 1412 bp, Homo sapiens
acatatactctcctcttatcttgttcattcttgtttctgtgcacaggtttatgattataactgtgtcaaaatgtatattcaaaatagctgttacattacctttgtggaattatggttaaatactttcactttaattttttcaaatgttccctataataatgtcctgataacagtgtattatgtgtgtctccattggtgtgcataatacatacccagaggaaaaattagaaaataaagtaaattattttaaaaaattacctatattcccaacacctaacaactactgctaacatcttgatctgtttcctctatcttgtttcagtgcacacgcttgtgataacagtgttaaatatgtgtgcataaagtcttaaatgaaaagatgtggaaaataactaaaatagtgttgtcattgtgggaatttggttaaatattttgtctcaaattccttaaataatctttggtgttttggtaataaattttatgtatgtattttccattacaaatataatacatactcatacaaaactttggaaattcagtaaagaaaattcacacatattcccaacacccaacaacaattaactgttaacatcttgatctgtgcactagtctgtgattattagggtgttagtgataagtatgcataaatgtcaaagatgggaagaaagatgaaaaacaagaaatagttgtgtggttgttgtgggattatggttattttgtttcggtttccttgaaaggtcatcattctagtgttttggtagtccacctttactacatatatttccattatatatgaaatgtgttcattatagaaactttgaagttacagaaatgtagaagagaaactcacccatgttttcaccatccaaagagtgtggttaacatcttgatatattttcttcatcttgtttctgtgcacaggtttttggtttgttaatatggttgtggtcattctatctgtaatagtgtcaacaataaaaataaagttaaaaataaatatttctcagtctcttttgtctgttttgtttttggggctttaaatatgttattttgttagagttataaatccaaaagcttagttcctcctttagcctaaaaagtttggtttgcaaatcttactctatttttaagtattatctatttcaacaattacttctaagggatttttaaatactgtttgatttcacatttgtaactgcccttatgaaactaaaacatatgttccaacaatttttttaaagttgataatgaccgcaagtacatcttagttacttgagtgggcatttttaattggaaatgtgagattgtctcaaacataaaaaatcacagacaataataaacccttaacataaaagtgttgatactatgttatagaatctcaagtgtttattcctgactcttgcctgaggtta

SEQ ID NO: 11682 - DNA, 1851 bp, Homo sapiens
agtgctcaggctacatcgaacgtgccagcaccagcacaggtggtgccaatcaagctgatgagaagtacttcaaatgtgacgtctgtgggcagctcttcaatgaccgcctgtccctcgccagacaccagaatacccacactggctgagggcatggggtaaaggttagaaaaccttcacctaggacttgacccttaccaaaccacagagaatccaaaccaatccatgataatgtcagtaggagacttaaccttagtgtgttacacacctgacttaacatctctaaactcagattgaaaagagaccgaatgtgcagattccacagtcttaagctttccccttcagatgtcagtgtctgcatgtgggaaagccatagcacacatcttacctttccaagtaatcagattgagaaaaccctatgagtattccagactacagagtttgcccaaatcaactgtaaatgacacttgtgtaacgtatatatagtgtttcatgaggtgtatataaaatagcaaattatgacagaacagtgatcacatatatttggatttatatgatatacagttacagtttactctgcagaggtaccttacctggtattctttgaattttttttttttttggaggaggaagagagcaacaaatttgattatatttttaagtgtcttagatcctgagaaagatttattgtgcattatttgaaccctgtcaatatctttttgagtaattgttttgtttcttacccttaaatagtcttgtgaagctgtaggcatgatagataacatggcttttactccttactgtttgaaaagataagtactttagcttctttctgcagccatttcatctgcgccaacactttggaacctaatactgtgtaaggctttacaatatacggattggctttttgtgacccagattgattggttgccacatgttatgtttgttgaagtggttctcatgcaaaaatattacacatttgtgttctgggttttttttttttttaaccaactcaatatgtgtttgatgatagtgaattgataaaacccgaagcttttccctgtaaatcttacatctttgcctttaaagaatgggttacaaccatcactagatcacagtagtgcctaatgaaggttgagaaccgtaggagaggctctcatgctgtaaataatgttgcaggctaataacctttcatcacttcctttgtgcgcttcctgccttaagtgacaagtagcaacatggcttgggtcccctgtgcagcatcagcttatgctgccacaagtcagtttgcaccctaggtgcccaggagctagtatccttagatctttctatcgctaacttaattctcttcgttatttatctgaccctctaactccatgtctaacttgcattaaaaaaaaaaaaattctttacagtcaacccaagcttaacatggactcaggttccccagcagccttaatttgttttgttaacatctgttccttctttttcagctctcctagagtatttctgagtgttgtgttcatctaatcttagtattcttttaattacaaattgacctcacagcttgaggtttcttgtgtcctattctgtggactacctgtgctcctttgcttcccctcccctcgcataataactatattaagaaattttttttggccttgagttggctggaaaaaaaatataaaatttaaaaaatttaaaaaaaaagatttgcaaaatgtaagtgtagatcatttgaacaagcaaaattaaagtacccactgggggaaatgtgtctgaatcttactcttctggatctgcaggattagggcttggaagtatgtcaaagatgcagggagtgtcaaagtttag

SEQ ID NO: 11683 - DNA, 1163 bp, Homo sapiens
agtgtggaggaggaccccagcactgactggactcaaagaagggagaagccattgggctgagccttcctttccttcacatatcagtacccatcccatgtcagaaagcaggcctaggccctggggggcacagcagtgagcaacacagagaggggccctgccctgagaagcttttgacagttgcacaaataagtattgacacaaatgttgtatataactgctcatcattctcagtgtcctcaaggaaaaatagagagttaacaagaaattgtaacaagggccttgatttggattgaagggaaatgtcttggaggcattaacagttgccatttagagccaggagcacgccgggtcaggtgttgggggaggggaccccaggcattagggagagctcagctaaagttgtgggatgggaaccaaaccaagggccaggtggctgggatataggaagaaggctggaggcatgtgtgggcctggccactggtgtcttggtagttgggctttgtcttgttttgctttttaaatgcccttccttgacaatgtgtgaagaattggcatccgagccccatgtctgcataattaaaagtctggaagctactgattcctactgactcagtatggtggtaacaccagcagcaaatgacacaaattacattttgaaggtgtacacaacagaaaattctctcatcttttagcttcatgtgtaaatttcttaattgttcacatgtatagatcatgttgtgaaaactacattgagccatactagcattgttttcagaacagcatctcttccattgaacttgattgcagtttgtatgcattaagatgtcattgttgattacaaacacaaagcgaacaaccaatttagggctgcccactggcctagattttaattttcaatcaaagcgtgctttttctttcatgtgaaaaaagaattttatctgtgaagctctgctgtgtttccttgccctacttagtttttgttgttgtttctgcttttttgtggcaggacacaggcagttcatggataaggcttccctcttaaacccagatacccgtacctctttgtctttgcttactcagcaagtcctcttttttttgctacatttttcatgttgctccatgcctcttcccagcaatagaactatggtagatttaatatcaag

SEQ ID NO: 11684 - DNA, 1163 bp, Homo sapiens; identical to SEQ ID NO: 11683

SEQ ID NO: 11685 - DNA, 1257 bp, Homo sapiens
caccctgggccagcgctcgcatccgaggggagccgccggatgtggaagaagactcggctttcctgcagccatttagtgccgccccatgctaggttatttgacattgtgcagtgtagagttgccttaaagtgcgtgatctgccagtgctttcttcaagtcacccttgccccgattcctcctgtttgcgctccccagggttgctcaagtggaaattttgtcagctgtttagccttttcgtacttggcgtgatgtcaacttcacttctaatctgcaaaagcagaagctgtttcctagtttacctcgcgtgtgtttacctatatggagtagctcgcagagatcacagaaatgcttgcagcctaaggcagggttttcagaccgtgggtcccagcccatttagtaaaatgggaaatcaattagcaagtggtcaccagcattacacagcaatgaagcagaataaagtaggccagaatgcatcatgtagtaaaggcaaatactgttttgtgaaacttttcacccatacatctaaatgtgagaactggttgcaatgtaagacatttcttgctgggaagttgtgagcaaaataagttgaaaacactaataaagatctgtctgtctgagcaaaggagactaaactccttgggctacataaggtgatcttttcattgattgcatttattctcaagattacagtatcattcccattgcctgcgcataaacttaactgctccctgcgcataaacttaactgctccctgtagatacagaaactggtgcctctttttctgtcactgtgtttgagcaggcagtctgttgtaatgacccccaaatcacagagacttagtaagtacttattcatgggccgggcgtggtggctcacacctgtaatcccaacactttgtgaggctgaggcaggcagatcatggagtttgagaccagcctggccaacatggtgaaaccctgtctctactaaaaatacaaaaaattagccagctgtggtgatgcgtgcctgtaatcccagctactcaggaggctgaggcaggagaattgcttgaacctgggaggcggaggttgcagtaagccaagattgtgccactgcaccctagcctaggtgacagtgcaagactccatctcagaaaaaaaagaaaaaaagaaaaaaaaattatttactaacagtcgattgtcctgtgttggtgttgctgttgcttatatattggtttgcactctgctccatacagtgattcagggatccaggccccat

SEQ ID NO: 11686 - DNA, 1055 bp, Homo sapiens
gtactgcacacaccacagaatgtgtgagattttcctgtttgaatgtatgtctgcattatactcctgcaataatgctgaggactcgttgcaggagggcaaactaggtgaataaattacctgtgaatgaacaatgaagtcgttcctcttaagactgaaacaagcaggccagatgtggtggctcacgcctgtaatcctagcactttgggaggccgaggcggccagatcacaaggttaggagttcaagaccagcctggccagcatggtgaaaccccatctctaccaaaaatacaggaaattatctgggcatagtagtgtgtgcctgtaatcccagctacttgggaagctgaggcaggagaattgcttgaacctgggaggtggaggttgcagtgagctaagatcgcaccactgcactccagcctgggtgacagagcgagactccatttcaaaaaaaaagactgaaacaagcttgtgctaagatggaaagggctgcttctaacagatgtggtttgttgctttagttgttgaagcaaaaatactgagttgttatgtttatgttatcaccccaccactacctccatggttgttcatttaggatgcttctaattcagccactgtgaaccattataaaggttttattgccatgttgaaaatgtttataatatggcaaaaaggggcatcaaatagaagatttactattattccagccatgtaaaaatatgtgcacatatggatgtatgttgaaagtggatgatggagaaataaaatgtggttttctttggggactggaattttgtatcatatttttttctctgttacagatacttgttggcataataatttggtaataaattaaaaagtgaagccaaaaggaggttaatttggggtttctttggacctttagtagtagggactggatcagggcaacagggaagctgtaagtgtggatggaggggcattgggcagtagcgtctctggaatcagcatcccaaagcccagggcatgagaataacttccttctttgggacttgggttataaggggttgtcagtgtagaag

SEQ ID NO: 11687 - DNA, 1110 bp, Homo sapiens
gggatgccagagggataaaaatgaagcacttcatctgtgtgcttccatcagaagcccacgaagggctaaagaatgcaagggtttcagtggctctgactcaggaacacgtgggcaacatggatgtccttggtctgtatggagcggacacaatccttcccatgaccttcctaggaagcctggagttcttatctcccccacagggtactccaagacaccctcattaagctgtccctctacccacccttctacttaccttcctcctcagacatccaggtcacaccctctaccagggccaccacctcttggcagttctctgggtgctgcgattccacccatgtccggagcttcacaggcagtgcacctaggaactgctccagcaccagcagctccaggatctgctccttggagcgtgccttaggctgtagccactggtgacacagctctcggagctggtccagggctcccggggacctgtcatgtccttataacggaactgccggaacctctggcgcgcggcctcagggtcacctggatgcttgccctgctgttggacctgctcactgggggcatctgcactcaggcttccatcttcagcatatagggcctggatctgggcattccggggaccagccacctcctggttcagtgtgaggacctcaacaacctcaatgttcattaggggactctcagcaggaagaggatccaatttagggtccagctggagctcaggatactctgtaagtcaaaagcagagcaagacaaatgagaacaagcacatgaaaagatgctcaacgccattattcactagggaaatgcaagtcaaaaccacagtggaatatgcttcaaacccactagcatggctgttaccaaagacagatgataacaggagaggatgtggaaaaactagaatgctcacacactgttggtgggaacataaaatgctgtaccactctgcaaaacaggttggtaaatcctcagaagttaaacacatagttatccatgacccagacattccccccaagtatatatagctaagaaaattgaaagcatatgtccccaaaaacttctataagaatgttcaccaaagtgttatccataatagccaacaag

SEQ ID NO: 11688 - DNA, 2876 bp, Homo sapiens
agtgaaacctgtctctactaaaaatacaaaaaaactagctaggcttggtggcaggcccctataatcctagctactcgggaggttgaggcaggagaaccatttgaacctcggagtcgtaggttgcagtgagctaagatggcaccactgcacaccagcctgggtgacagtgagagactcaaaaaaaaaaaaactgaaggggttgccagtggcataccagatggctgttaaacatcctatagtgtgcaggacagccccccagacaattatctggtccaaaatctagtctccttagattcccactcttccattacgaaggaagtgtactttttagcgacttggtaaagtcacctgttcagggtttttttcctcatggtggatggggcttacatccaagtcccctgttgaggcataccaggatcccagacagctgttggactaccccgaatgggtacttgatctctcctctggtgtctggccaacgcccatgctgctcctgaccattttcccttcatttcctgctccctgctgccccaggattacattgcagtgaaggagaagtatgccaagtacctgcctcacagtgcagggcggtatgccgccaaacgcttccgcaaagctcagtgtcccattgtggagcgcctcactaactccatgatgatgcacggccgcaacaacggcaagaagctcatgactgtgcgcatcgtcaagcatgccttcgagatcatacacctgctcacaggcgaggtagggctctgtggcctggtgagggcaggctgtgccctcagtacacccgaaagccccacggagtgtatgtcaggcttatcccctgtgtggtgtggtcactcttgttttaggtatgaggaaaggggaggaatgcatggggctggatgtcaggctcatatcccccttctctctagaaccctctgcaggtcctggtgaacgccatcatcaacagtggtccccgggaggactccacacgcattgggcgcgccgggactgtgagacgacaggctgtggatgtgtcccccctgcgccgtgtgaaccaggtgagcctggggcttatgcacgtggcagggtggacacagccacgggagtgggtggggtcttgcctggggcaggaaggctcctctctgtctgcatgttttacctgcagcatcacttcctctaggaagccttcctggattcccaccctgcataggggctgatccaggctctgggtcctcttcgggaacacatttggcagaggtcttctttctttcctttgggtgtatatttttacactgtgtgtatatgtactttttttttttttcttggacattttgagaatcagttgcagacattttgattgtgttttccctgaacactgcaggtgtctttaaaaacaaagatgacctacccccgtcgtcacccccaggaaggaatttatattcacagcaatagtcgttgttccatttagcatctgtccccagaatgccagaatgccctttatagtggcgcattgtcaattgggtccaagttaaaagcaaatatattgccttgttttttagaaataattgagatggaatctcagggtgttcttgaattcctggtctcaaatgatcctgtcccctcagcctcccaaagtgctaggattacaggcatgagccaccacacctggccgccttttttgttgtcgtcggtttttttgtttgtagaggtggggtttcaccaagttgctcaggctggtctcaaactccctgccaaagtgttcctcctgcctcagcatcccgaagtgttacaggcgcaagccaccgtgcccggccgtctagcagtttgctgttgaggcaggtctcaatctcctgtcactggggacgcaacttcagcctgtgtgtgtgtgtgtctggacacttgctcttgtgaccctctatctgattgcaaatcaggcatgatgccaccacctcttgtctcagtgggcctatgggtgacaacgtggctggcagcatcagttgggagtggccccagggtgctggaggaccgcagtctgtccttctagcctgacccctgctgtcttcctaggccatctggctgctgtgcacaggcgctcgtgaggctgccttccggaacattaagaccattgctgagtgcctggcagatgagctcatcaatgctgccaaggtgggtgagggcactccggttggggggtcttaagttgggcatttgtgggggtccttcagaattcagagctgtgtgtctccttgcagggctcctcgaactcctatgccattaagaagaaggacgagctggagcgtgtggccaagtccaaccgctgattttcccagctgctgcccaataaacctgtctgccctttggggcagtcccagccacctgtgctgttgtctgtcttcggtggggggatgtgggtggcatagccctggtggccttgggagctgctcaccttcctgacctgttggcctgtggggacctggaagtattgctgactcagaaccatggcaccccagggctagcaggtggggcactggatgcaggccaggctgcctggagtgtcccagcaggtactggaaatgagatggggttatccataacttctgagggcgtggcacatgagatgttgctgtggtctgggtggatgggtggcttgggtgcctgtgaggtctgggtagtcacaagaccatcctgagaggcttgtcaccttgaagtagcactggggagaggaggaaagctcagctgtttagggcacacgatttcagacccctagcttcacccccctcttggagtgtggggtggtttcacactggcgaggttgtgctcctggttacctccccggctacactggttgtggctgcaccctgggcctgcacacccagtttctgtgggct

SEQ ID NO: 11689 - DNA, 1319 bp, Homo sapiens
ctcctgaacgttgccacgggaacagctggaggcgggcggatatgccctagcgttatctaggggctggcccggggaatggcgtgggggcggcggggccaagcaagcgccacctctgattgggcaaaaccccctcccctcacctgccaatagaaaccggcccactgtacagacgcgcaagtttataacccgggaagagctgctctcagagcggagggagaccatataaccctgggactctgccgtacctcctagaggaacagagcgcctctcaggcgtcagaggctgctgcaaatgcgggtcagcgggtcacggtcgcgcctgtcttgctgatgctcatgggaaatgtagttcaaagggcatgggcggtgccttcggtgcaggcgagagattggtcagcgcggcgtcgccggggcaacacccggctgaggcgccccgcgttgtgcggcgccacatccgggaagcggcctccaagcaaccgctccgggttgaggtgagcgcaggctgccagagtgggcgcagcctttccaccccgtgggagggcttggggtcgccctctggggcctgaacggctcctgctgtcggcgccctggagggcccgcccacttcccgacaggccgcgcgcgtcacctcagccttcgctcaggcctttcctaccctcaacgccgttccggggggccgggcctggcaagtcctcttggaacgcctccctcttgccttccccttttggggacagatcccgaagttcgagcatccctcggataggccgggtgtcaggcctggtctctcaggcccgtccaggtgggcgtctttcactgcagaccttcagggccgggatgctgtggccatccctcgactccgcgcaacgtggagctttggccccgtttttcttggcctttgcttttcgttttcacatgcacgggccccggcagtgtgagtcgcccacggctcgctgtggtcagcgagcacgatgtccacgtgccccctccccagagccattcctaaaggaggtcccacccagtcaacctccccgagattgtggagggcgactcgtccccgtacattacagcctggccccaccttctacccgcccaccctggtccactctcctcgcacctcggctagacactgtggctcctcagcctggcgctggaactctgtgatgactgtctttctccacctctttagcgtcatctcccagcagtcccctgctggacccaactgtttgcaatttccaggaagctccctggacaccttgcgtccaagcatttgtccctgaggcttcctcctgctctcatttgccatcattgtttgggtcctgt

SEQ ID NO: 11690 - DNA, 1186 bp, Homo sapiens
ctggccgctgagatgggacatctgactaaagttggagaaaagaaggctcggggaggggaggggctggttcgctgcgggataatggtcgggggcccacccagcaggggaatggtgggggccataacctgggtgggaacttgtaacagtctcccacatccctgcttctcgaagtggtggactgtcccgtgtgcaagcaacagtgcttctccaaagacatcgtggagaattatttcatgcgtgatagtggcagcaaggctgccaccgacgcccaggatgcgaaccaggtgcgtcctatctcagcaaccacaaggaggtttctggggagggggcatctgcgcaggaggagcttggcaccagctccaggctgttactccactttcccaaggctctgggtgggctgcctaggttgggtcaagggaccaatcttaaatctccggttgtattttctgggatgtaaacgtggatctatcaagttgtcttgccttctctgaccctgcctttgtctggcagtgctgcactagctgtgaggataatgccccagccaccagctactgtgtggagtgctcggagcctctgtgtgagacctgtgtagaggcgcaccagcgggtgaagtacaccaaggaccatactgtgcgctctactggtacatgaggctgaggggggctgttggagttgttctcccatgtgtgccctcagttgcttttatgatgttggttgcatctggtggatgggtcctagagttctctagggggtgccgcccgaagggcccgagggcagaactccagaagcagaaaaactggggttgtggtgtgtagtctctagggcctaggtgggagagggtgggaaggggaaataagggagaccttaatgtgctgcagggaggtacaaagggtttgagaaggcttatcagggagttgtcagacctggtggtgaagggctcagcatatgcaaacagggaaaggcatggtgtgaagggctttctgggtttgtggttccctggcacacatctggtataagatgctgctagggaaagtagactgtgggtccatggattataagtgatgatgatttttggaagtgttttagcttttgagttggcagagacttacccaaagtttggtttggcatttccagcttttcacagacacagctagctttggtttggaaggagcttgagagtcttttg

SEQ ID NO: 11691 - DNA, 1103 bp, Homo sapiens
ctacaaggtttcctctgggcccttggattgtaagagaccctggtgttctcttgtcagggaagagggaggaagttaaccatgaaaggagaagaaaaggaatccagggtggtgtgtaggcagaattctgagtatgtccacttggagaagtgttcagtaaagggaacagtgtggggaagggtcagcgggggtggggggtggggtggggtggtcctctttttctagacgctgttatccttacccttacattgttgttatctctagaagctagaagaaagggatgtgtttctcagctatgttggggcagaggattctgggagcaaggagttgggcttgcaggcctgtgttcttccctggccacaccctctacatcttcccaataaatggcccagtgtcacagaacaggccggaaatgaggccccaactcattctgcttcctgagttgggggtggtgaagggcaaggtccagccttatgattcccactccccagggccagccaagtctcgggatggtgaacgtactgtctattgcaacgtacacaagcatgaaccccttgtgctgttttgtgagagctgtgatactctcacctgccgagactgccagctcaatgcccacaaggaccaccagtgagtcccaaggcatagtggttgggtgggtgggtgccaccccttccgtagcttagtgctcaggaacacatctgtctgctctcaggtaccagttcttagaggatgcagtgaggaaccagcgcaagctcctggcctcactggtgaagcgccttggggacaaacatgcaacattgcagaagagcaccaaggaggttcgcagctcgtaagtgtgggttctggggctgtgggggtggcccagggcagcaagaccctacctagcctgacctgctgtgtcccctagaatccgccaggtgtctgacgtacagaagcgtgtgcaagtggatgtcaagatggccatcctgcagatcatgaaggagctgaataagcggggccgtgtgctggtcaatgatgcccaggtaagccttgtgccggtgagaagggtccctgagccccctctgctgattgatgatgctgtctggggtgaggagtgatcctagtat

SEQ ID NO: 11692 - DNA, 2596 bp, Homo sapiens
gattgtggcagagcgtcctggcactaactcaacaggccctgcacccatggcccctccaagagccccagggcccctgagcaagcagggctctggcagcagccaggtgagcaggagagaggacccaggaaggggtgggcagggaatggggtccagtagcaggagagaggacccaggcagggggggtgggcagggaatggggtccagtagggttcctgtcccactgaggcagagggttctgctttgttcacagcccatggaggtgcaggaaggctatggctttgggtcaggtgagtgggtctgcctagtgggtggggaagggccccagtgctgtttctaccccaacctgccagtcttctttctccattttctaaggagatgatccctactcaagtgcagagccccatgtgtcaggtgtgaaacggtaagtatggcacctcccctgggggtgaggtggatggagggtgggggtgtactcatgccaggttgctgcatctacaggtcccgctcaggtgagggcgaggtgagcggccttatgcgcaaggtgccacgagtgagccttgaacgcctggacctggacctcacagctgacagccagccacccgtcttcaaggtcttcccaggcagtaccactgaggactacaaccttattgttattgaacgtggcgctgccgctgcagctaccggccagccagggactgcgcctgcaggaacccctggtgccccacccctggctggcatggccattgtcaaggtaagcctgtcccaaggaactatagctgtaggatgaagcctgtagtccaggtctggaccctgttgaacacccctcatcaccaccttgcaggaggaggagacggaggctgccattggagcccctcctactgccactgagggccctgagaccaaacctgtgcttatggctcttgcggagggtcctggtgctgagggtccccgcctggcctcacctagtggcagcaccagctcagggctggaggtggtggctcctgagggtacctcagccccaggtggtggcccgggaaccctggatgacagtgccaccatttgccgtgtctgccagaagccaggcgatctggttatgtgcaaccagtgtgagttttgtttccacctggactgtcacctgccggccctgcaggatgtaccagggtgagtgtgaggctggtgggggtcaagtctgggtgttgggctgtctggacaggatcatgtgcagacccttattttcttcaccctagggaggagtggagctgctcactctgccatgtgctccctgacctgaaggaggaggatggcagcctcagcctggatggtgcagacagcactggcgtggtggccaagctctcaccagccaaccagcgggtgagggctggggttacttaggtggggttgcccagagaggctttataggtgctgcccagagctgtgacatcccttacaatgtttgtagaaatgtgagcgtgtactgctggccctattctgtcacgaaccctgccgccccctgcatcagctggctaccgactccaccttctccctggtgagtcctaggatgggaaaggggaagggggtggtggctgctgggtctcgccctcaacctgtgcatgtatatgtgtgtctttgtgtgtgtatgtgtgatctctgcctgcaggaccagcccggtggcaccctggatctgaccctgatccgtgcccgcctccaggagaagttgtcacctccctacagctccccacaggagtttgcccaggatgtgggccgcatgttcaagcaattcaacaagttaactgaggtgagccagtggaatggagaggctgtgggcagggggagatgtgaaggaaagaactaggacccattcatccactgcattcctgcttggcccaggacaaggcagacgtgcagtccatcatcggcctgcagcgcttcttcgagacgcgcatgaacgaggccttcggtgacaccaagttctctgctgtgctggtggagcccccgccgatgagcctgcctggtgctggcctgagttcccaggagctgtctggtggccctggtgatggcccctgaggctggagcccccatggccagcccagcctggctctgttctctgtcctgtcaccccatccccactcccctggtggcctgactcccactccctggtggccccatcccccagttcctcacgatatggtttttacttctgtggatttaataaaaacttcaccagttcctcaggcgttggctggttgggggactgtggtcctggggcctggtttattgactgtatctactagtcagccttatcaagcactggtggcacaagggaggggggtcttgtcccccacctatcgaagcccatgtgtatggatgcctagggagtggggaagactgcctccttgccctttctgggtatggggagggtcacccagggcaaaggatgtacacactagaggcttgttgggtaccctgtgggatactgggtaggtgtgacctacatccctgtgtaggcagggttagccccaggtgtagcacagccactctactgaatgcttcctaaattttggtgctgtagctgtttctcatcttcagaaggtcccac

SEQ ID NO: 11693 - DNA, 1191 bp, Homo sapiens
aatttaggctattgtgctgtgaacctcagagtcagagggggtggggtagggtggcgggggttggggacttgagagtgtgggggtcacatggaaagctgggtctgagagacagagaagaggaaggacagtgaggactgagggttggtgggggtgggcaggatctttgagtttgggtgaacaggtagatactgtagagtggaggtcatggatggggagcctggggtttagggcggtcagaggatgtttgggagtgggggcatttgggagctgtggatacagaaaagttgggggtcaccctgggccaggagttgggacacgcatacacagctgaacatgcatgtttggggtatgctgtgtatccacaagagccaagctggggagcagggagagggctggaggtgtggagcacagcccaggagaggcgcctgggggtccaggaggagacgatgggggctctgctaacaaacacccgccctaagtgtcctgctggctccctctctctctctcttcccctccctctttctgttcccgactctctgctacccaaacccagacataaacgagctgaacctgcccaagacgtgtgatatcagcttctcagatccagacgacctcctcaacttcaagctggtcatctgtcctgatgaggtgagggtgcatatggctgaattcccaggagcaaaccaagggtgtccccactgagaggagggagacatgttctgcccatcgggccccacaggatggaaccctaaaattttcttctcccccttttcctcccagggcttctacaagagtgggaagtttgtgttcagttttaaggtgagtcccaggcgggcagggatggctccctggacagaggaggcagcagctgaggcccttccaggcacctacccatctctcttttcttttcctggagccaggtgggccagggttacccgcatgatccccccaaggtgaagtgtgagacaatggtctatcaccccaacattgacctcgagggcaacgtctgcctcaacatcctcaggtgaggacactggccctctaatgccctcctcagcgctgcctgccaggcctccctcatggtcttgtgggcactacatcagactctgtcccttcccacccctttgttgtctgtggtttcttgatttcccagtcatcttcctcatggcctgaccttggttttctccttgg

SEQ ID NO: 11694 - DNA, 1485 bp, Homo sapiens
ctgacctgagtatccaccatgtgccaggcacagtgctgggcacacgaggcaccaaggtccgggccacctgcccgcagcaaggcccagctgaggtggtggagggagcccctgaggtcaggggccgtttcggttcagggtggcaggtgtccagcactggggtatggcgtcgaggcttccatggggtgggggaggccagcttccttctgacaggatgggcgcatacagtgcctggtgtgatttgtgcacaacccgtgttccaggtgcacatcctcccaaggagacacccagacccttccagcacgggccggccaagttgctgcggcggaggcagcatttcagctgtgaggaaggtcattggattcatgtgttttatctgtaaaaatggttgtcttaacttcttaacctcatattggtaagtgattgataaaaattggttggtgtttcatgacatgtggacttcttttgaaatagcaagtcaaatgtagtgaccaaattgtggaagagatttctgtcaaataggaaatgtgtaagttcgtctaaaagctgatggttatgtaagttgctcaggcactcagatgacagcagattctgggttctgggagtgttctgtgcctcttacatgccctggaggcctcatggtctcagtgctgaggcggcacacctgtagcacacctgcgtaatgtgcggtctgggccagtcacaaggaattgtgttgtctaagccaaagggggaagctgactgtgatttaccaaaaaaaattctgtaattcaaaccaaaatgtctgcggaatcaccagtttgatactctctgtaatcagaacagtgggcagtgcctgggtgaacgtgtctagcagccactgtgcgggatcgctgtaacaggagtggaatgtacatatttatttacttttctaactgctccaacagccaaatgccttttttatgaccattgtattcagttcattaccaaagaaatgtttgcactttgtaatgatgcctttcagttcaaataaatgggtcacattttcaaatggagaatggctttatttttttttacctgaaaccagtacatgaggctaaaacttttccaggtgagatcaaaagcctgagaagggaaggaggtaggtccaggaagaagccccagaactgtcctagtcactaatcattttgtgactaaatgtgaaaaaattactaaaaataaggtattagataaagttgacttccttttccgaagcagctgggatgctttaacccgactgaattttggcaggtgggagtgagctcttgggaaaaacctctggcaaataaatgcccttgtctcctggaatctttgtgctgtggagaaggacatttctttgtcagagaggagtgtacaagcaattcacacaccgaggtgtctgagatgggcagatgcttttccagaagcaagagcgcaggtcaggagggcacagtgcacggaagacagacactccctttccaggcctgagct

SEQ ID NO: 11695 - DNA, 1205 bp, Homo sapiens
gtcagctcaggtgcccatcctggctacccaatggaccaatgagcgctgcgactgtgttactcaactttgcagcgtctcatcggtaaaatggaagtgtaacagcttattcatagggttggatgaagctccttatggcagtgcgtgtgaagcgctggcccagcgctcaggaacgccaagtacatacaaatgacaatacatggcggcgcccaactacggcgtgagcgattcttagatgcgatggctagctaaggctaatcgccgcttgctcccgacggcctgcgctcggagccggcctccacccacagccggcctccgcggcccgctccgcccaccaacttatttcctctgggccgggttctcacctccaggagtccccgcgctgagagcccggatgtgagcccaagtggccatgcgcacaagccagcgccgctgccattggtcgctggtgaggaacagattgatgacacatccgaaaaataggaagtggccactacggaagctgttctgggccagaaagacttccagtttggagtcgtttgctgcggggagggaatgaatgggcgctgggaacacgcccgcgaggtggggacgcgccggccgtagcgaggtccttagcgtgtgagtggccggggtcgggtcgcttccccgcagcatggaggacgatgcaccagtgatctacgggctggagttccaggtgggtcactgggagggcggcaggtgctgctcggcctggctgttgatagcatgcgcggtcccatggtgacttcggtttgcagatctcccaccagccctgcaaggacccgtgtctgttccctagttcccattttgcagagaagtaaactgaggctttaggaggttaaacggttgtactggataacagggttggccacagccggcctgcctccttccccttcacatcctgtcccgaacatgacttctgacctggaagttatcactcactttggtggactcatttatttacacgcccaccttttcctctagaatttgagttcctgaaggtaggaactgtatgttgtttaaaataaaaatgtttgattttgaaacaatttaaagtatttagaagagttgtaaaaatacatagaaagttcttctttaccctccacccagcttcccttaatgttaacactttacataaccatcgtacatttatcacagcttagaaattaacattggtacactaatat

SEQ ID NO: 11696 - DNA, 1271 bp, Homo sapiens
gaagttggttttcttcggcctccttctctctcccaggcccagggctgggacgaggccggttcccgcctgcaacctgcactgaagacgggaaccttgggagccggtaccggaacgctcggaaacggcaccaaagtacgaatcctagggcggaaaagcgttaccaagacactcgtccccagagccgcttcctgggactctctagcctcctaccgcttctcagtgatgttccggtttccgccctcctcctcgcgctgtttccgcctcttgccttcggacgccggattttgacgtgctctcgcgagatttgggtctcttcctaagccggcgctcggcaaggtaggttggcggcctgctctccgacagaacttttcttcttgggttgaggaaaacgccttttggagtcaggccctggaggggcgagccttgctcacagggtggggatacagccgattacccgccctgtgctttccgatggcttctgcggggcgagcggggcctggccggggggtgcgggcgggagggcgagccagcggcgcctgcagcccgggccgcgtaacgctgaccgctgtgccttcagttctcccaggagaaagccatgttcagttcgagcgccaagatcgtgaagcccaatggcgagaagccggacgagttcgagtccggcatctcccaggtgagagggtttccctggggtctggggtggggggaggcgccccgcccgggaggggaggcggccgcgcgtgtgttgggcccggggtgctcggacgcgcgctcagggtcggtcctgctgttcgttgcttcttaggctcttctggagctggagatgaactcggacctcaaggctcagctcagggagctgaatattacggcagctaaggtaagctggcgctccctcggctgggagggaggttgcggcgcgtctccccgcgcagtgcctgagagggttggacctgggttacggttgatgatgacttgccgcctggccgcctaacctgaactcaggttcggccgtgttgtttgggagtgataccgcccaggtgcggggagtggggttgcaggtaccctgcggcttaagctgtccacatgcgggcggtggagaaacgtggagtagggagggcctgggcccatttcggaccttatttgcccttacttagttatagatacggcaaagagctgtggggagctcaggatgagattctctctacccttagcccggagttgccgcaagtgggggtgcagaagtggtagtgattggcctcctggcctgaacagtc

SEQ ID NO: 11697 - DNA, 1299 bp, Homo sapiens
gctccatggagaggatgcagcgcggcgtgattcacgctggaggactggtgcgggagtgcttagcagaaacgcaacggaatgccagatcctagctgccttgttggttttgaaggatttccatctttttacaagataagaagtcacagttaatctcccccattcagatgaaacccttgttttcaaaatggttacagtttggtttttcctcccgtggttcacgtggctctgaagctaccgtctcaaagattgagaaaagattttgcagttaattaggatttgcatttcaaataggaactgctcaggtttctgtttgtttgtttgttgtttttaagcactgacttaaaagatgcacctaaagttatcttacagcaaactgtagtttgcctccaagacaccattgtctctttaatcttctcttttgaatatatttgttacacacggtgttctttgttccttttcataagcttataccactccagggattttgtttttaaggcatactgacagcatgctttacttagtagccggttcccatttcccatttgccatctacagtgtagattctgcttaaagtaacttcttttttgcttatgcatttgcatgactattagtgcttcaaagtcaattttttttaaatgcacaagttataaatatagaagaaagagcaacccactaaacctaacaaggacccccgaacattttcatactaagactgtaagtacatcttagctccgcgtttaagttggtcaaaacatctggaagaaaatgactaaaactgtttgcatctttgtatctatttattacttgatgtaataaagcttattttccttaataaaaggaagtgcatgaggtctgtcttgcttttgtggctctgagaggggatcttaaggaaacttactgttctctatttctctttgtttctccagattcttgcacaggagtggaaaaactatgacccatcgccagtttttgtatggactgcgagctaaaggttcttacatttttaaatagcaaaatcaaaagattgatatttattgtgtatgacattatataaaattcaaactttagtgtccttgagtaaagttttattgttcaacttggcactattgacactttgggttgcatgattctttcctgtggggagggaaggttctgtgcattgacctttagccgcatccttggcctctacccagtaggggccagcagcaccccttctccattcctgacaatcaaagtcttctgcatatcttgccaaaagtgtccgggaaggcaaaatcactccctggtgagaaccgcctt

SEQ ID NO: 11698 - DNA, 1253 bp, Homo sapiens
catccagctgtgcccaagaagccaccctggtctgttctccaactcttttaaatggtgcccaacttttctaagtgagcttagcaatgagaagaaaaaaaaacatgaattctttttctggaaaatcagggagacatgggtaataataggtactaataaatatttatagatgagtgaatgaggaaataattacatcaaaaaggtcagtgacaattgataaatgacaaggaaatatttaattaggtaaaactaaatcattgctctctatactaggatagactttatctacttcatctgttcctaagtcagcatgttagttctggggaaggatcataagaaaggaaatactttttaaaaaaaaatttggaaacatgtaacaaagcaagggtaaaatatatatatatatctatataagtgctgtgactgtaaaagtgtactttccattaattattagccgagttaagagaatggtcacattgaagtactgtgtggactagaaatgtaccctgtcatcatgcaatgaaatattgttatcgttttaacatagctcatttatgtagaatgaattctggtggtttaccccaagtcacagttaggacggtagatggtgagatcgcagatgcgctattatctagattcagtgttacattttcgatgtttatcactcagtgggtttttattaatatgctgattaagttatttactgggccagtcattgtgctaaatagttgctcttttgtgtttcattgccttgatgtttgagtgtaatctagcattttaatacagtgtttattttgcatgatctttaacaaatgttttaagcaattttaaaaaggcaggatgttattgacattatacactgaagtcttaacattttaacatttatagtgcttatttgcaaaattgtataattaggaattatttcagagacaatgttttctttttcaggtgagtagttgccgcgtaatatcattggagtacattctttatactgtttgtgaaattaatactagcatattaagtgtacaaatagatttagaaaacaataaaaaattgcatgctattctgactcatgaatttttattcactatgatgattcacattttgattaaaaataaaagtagtttgtgtgtttgttttgtcacatgtctgaagtttgttaaagactttcaggttcatgtacagtcatgcagttggcagaagtgttctgaactgctcccaactagtctttttaagagaatgtggctcgtaagtcc

SEQ ID NO: 11699 - DNA, 1251 bp, Homo sapiens
gaagttttagatcccttggatacaatatgatgaagatctgaaaacttcagctcttgtaaccattgaggtagtctgtagaaacactcaaagttgcttaattgtctagtataggtactttaaaattattttgtaggtttattttttgtattcatataatattggcatcagtagttttccatctttttgcgtgtgtgttttttttaacctctcttcttcctcttattaagcacggcacccttctctcttgagattaggcagtaaacatttgagaagttgacctaggctttgttcatgaaatgttctgttttcttagaaaaaatggttttgaccaggctgtatcagctgtaataaaagctactcattaggttataacagtaactaaatctgttccctaatggtatttccttaccatgctaaacatatttgtttttttttactttacttcatggtataacttaatgagtttttctctgtcacatgacctcattatagatggcattaaatgcttattcatacctgtatttttccttgacttctctaggggtcaggcccagccccaggcccagtggtattactgaattcactgaatgtggatgcagtatgtgagaagctgaaacaaatagaagggctggaccagagtatgctgcctcagtattgtaccacgatcaaaaaggtgaggcagccacttacacacggaccagagacagcgctgggggcggaagacaggactgtgtgggtcgtgtaaactttatgtatagcttcccaaacatgcattccctgttaaaatgggaaagctctaaatggaaaacataattcttactagtttgtattctaaaattgccctgttttctcttattttataaatggataaaataaaataaagtagctgtcttaccatgttcttttttaaatgacgtaatacaagtaaagaatgccttgatgagaaagagaaagctctgagggattcccattgggataaacagaactcatctttccagtgtggaaccgaaaacctttgtgttacatttttttctaattgtaatatttgttagtgtgatttagtgattatcaaagtaagccacacttgcctcattttctccaaattctcattttcatgtcatgtaggacttaggatcatgtcacatttgatgaaaccacataggtttgggtttgcaaggttaatgcatttgcatagtttttttttcttctaagatcctattgcaattctagcagctatcaggaagttggcta

SEQ ID NO: 11700 - DNA, 1211 bp, Homo sapiens
gggtaagtgatgcaaagatgacatacattgaagttatttgttactttagataataaagtaatgtttgatttgttcttttcttcaaggtttttgtttacagattacaatagactgtccagtgtaggtggagaaacttctctggctgaaatgattgcaaccctctcggatgcttgtgaaagagagtttggctttttggcaaccaggctttttcgagtattcaagactgaagatactcagggtaggatttccttccttccttctttgtgtgtaagggatgggggtgggatagatgttcagtttattttcatgaaaacacaccttgaacattagactcatcaggtattgtgactataatgttaggattttctagatccttgatatgttaattattaaaaccatttgttgcattacaggtaaaaagaaatggaaaaaaacatgttgtctcccatcttttgtcatcttcctttttatcattggctgcattatatctggaattactcttctggctatatttagagttgacccaaagcatctgactgtaaatgctgtcctcatatcaatcgcatctgtagtgggattggcctttgtgttgaactgtcgtacatggtggcaagtgctggactcgctcctgaattcccaaagaaaacgcctccataatgcagcctccaaactgcacaaattgaaaagtgaaggattcatgaaagtaagcactcattggttattagaaaaaattgtaatgcgaatatgttgccactgccatgctcatttgggctttaggaagtacactctctaaatgttaaagtgttgcatttattttagtttaatttgttcattcattcattcgttcattcaagactataatttaaggtagttttaagttcacggtaaaatttagagggaagtgcaaagatatcccatatacccacttcccccacacatacacagcctccccaattggcacgattacccaccagagcagtacatttgttacaattgatgaacttaggctgacacatcataatcacccagcatccatagtttacagtagggttcactcttggtgtggtacattctgtgggcttggacaaatgtataacatgtatccaccattatagtcttatacagagtagatttattgccctcaaaatcttctgtgcttcacctcttcacacctgttcacccctccctccaccctcctccctaacccctgg

SEQ ID NO: 11701 - DNA, 1100 bp, Homo sapiens
acaaacaatgtttgcaatcagaatcaagaaatagcctcgagacattcatcactaaagcagtgatcgggaaggctctgagggctgttttttttttttgatgttaacagaaaccaatcttagcaccttttcaaggggtttgagtttgttggaaaagcagttaactggggggaaatggacagttatagataaggaatttcctgtacaccagattggaaatggagtgaaacaagccctcccatgccatgtctccgtgggccacgccttatgtaagaatatttccatatttcagtgggcactcccaacctcagcacttgtccgtagggtcacacgcgtgccctgttgctgaatgtatgttgcgtatcccaaggcactgaagaggtggaaaaataatcgtgtcaatctggatgatagagagaaattaacttttccaaatgaatgtcttgccttaaaccctctatttcctaaaatattgttcctaaatggtattttcaagtgtaatattgtgagaacgctactgcagtagttgatgttgtgtgctgtaaaggattttaggaggaatttgaaacaggatatttaagagtgtggatatttttaaaatgcaataaacatctcagtatttgaagggttttcttaaagtatgtcaaatgactacaatccatagtgaaactgtaaacagtaatggacgccaaattataggtagctgattttgctggagagtttaattaccttgtgcagtcaaagagcgcttccagaaggaatctcttaaaacataatgagaggtttggtaatgtgatattttaagcttattctttttcttaaaagagagaggtgacgaaggaaggcaggaatgaagaagcactgcgtggcctccggtggaatgcacggggcacagccgcgactctgcaggcagcttcccccccatgccagggctctgcgccgtcatgtgagacttaaaaaaaaagttgaatgacttcgtgatactttggacttctaaattaaatttatcaggcataaattatgtagaattagaggctttgaaaataatactggtaggttgctcaaaggttttgaaagagaaatcgctaggtaggttactatct

SEQ ID NO: 11702 - DNA, 1113 bp, Homo sapiens
ttttcttttgtaaattctaatatttagcactttttgttgttttgtcagtcatattgttaaaaaggtaaaggcagagtacaaagttggtactggagaaactagtttggggaaacaaccgatgttctgtcaggacgatcctgaaattcatattaattactttttaaaataattgtgccttgagttatgaagaaagctataatcctgagccatgtaatcccacacggcttccatgcagccaggagacatggagtgctgggcactgggcatggctttaggccttgttttttccccccagctcttctggagcctgtggtatgggactctctctttagggtgtccacaggattttaagctcctgaagtttcattccttatttttttttctgggaatactgtgttatgcataagtattttttagcttaattcacttcagcttgatgtttgtgacttggcatccctcttctaatagtgctcttactttttataggtatgccttacactttcttgtacaaagtggaatttcctactgtatcatgatcatcataggagtggagaacatgcacaagtaagtattcactttgttcacatgaaaatatatatttcacttgaatagaactgcatcaaaatagaattttatttattacattaaaagtaattatgaattgtgataattttttaaagaagaattgtcataaatacaaaaataaaatcattggtatgcatcattcttctttttacttaaagcaccgttgacattttgggatggatgattcattgacattcagtactaacctgtgccttctaggatgttaggcagcattcctggcttttaccacctagatgccagtagcaccccttgagctgtgacgaccataaatgtttccagatattttcacatgtctcttggagaagcgaaattgcctgctgtgaagaaccactggcttagtctgtaggtgatagcagtggagagatgcagtgaactgagtagactggagagagagttagaaggaccggtaggaaataaggtgtcaaggatgacttccgtgtttccagcttgaggagtagagtagatggaagcactgtcttctgaggtggggagtcctgaaagtgggga

SEQ ID NO: 11703 - DNA, 1150 bp, Homo sapiens
gcatcccaccagatcctccaggccctggtgcccttatagtctcagggaacttggggacattgacccctcccagagcttttgcgaagaaatttagtgctcctctttttcacgggttacagggttccctcagtcattaaaacacgtttctcttccctttaaccgataggtgccctgggctttttgtttctgtgtctgcagaccagtgtcaatcagatttttccaggtgtccttctacacctctccccacgtggccacacctgtctcctgccaggtctagcagagacagtattggtgggcattggcccatcacttggaacttgaggctcatccttgggatttccctcaatttttgtttttgttttgttaacttggaaggtcaatttttgtgtaaccttggtgtttttgtcctgagaatttcaatgtaacatgatatgaaaaattcaggtctgtgttgctaatacaaaattttaatttttctttacaggtcaactttgtagtgtgccaactctttgccttgctagcagccatttggtttcgaacttatctacattcaagcaaaactagctcttttataagacatgtagttgctacccttttgggcctttatcttgcacttttttgctttggatggtaagtaattattttgatccttttaaaatgaagactatttggatgtatttgagaattgagtgtgtggaaagatacattatgtagggttttgttcttatatttacttaaaaagttttttctccaggccaactttcatatttttatttttgaaacaaaaaataacgaatgggaaatgggcttgctctctctttagtcttagaggaaaatttactatttataatttgtggaaagacagatgaagaggatataaaggcatttgattctgtcatgagtagttctttacacctattttgcaaatcttttatactgacagaaaagccatttaaatgtgtttttgtttgcctgttttttctctgggcaagtagcttttaagagcctgataaagactatggatagaactttattgccattttttagattctgccattaccaaaaagaggctttttgtttgttcatttgtctgttcttcctggggaagaattatttatgatggaaagcttttatttctgacttttcaaat

SEQ ID NO: 11704 - DNA, 1158 bp, Homo sapiens
ttcctcactgcttcaagagctctttgtctccctgctttaaaaatgcttcctatgttgttactgcctctgtaggtacaaacagccttcatctccttcaactcggtttattgggtccatcagggccaactttccagggaaataaaaacaactcacactcagcttttggctccagttggtttaacaggtgggactctacaatgatagcacttggtaagattcctttaaaataaaagcagccataaatacgaccctcagcagagtggtcttttaatgatttttatgcgtgctatgggtgattgaagcaggcttttctcagtatgtagtgtgtggcaactggggcagctgatgggtggaaaggtaggctcaggattcaggagatcggaacaggcactggtgacgtgcctcttctaccatggcttcccaatcctaaccgtccttcctgtatccactgcaccttgcacacgaatctttttctgaatcccatctgatgtgactgcttccttatttgagccacgagagtattttggatttggcattgttctggcatttacattctgcttaatgttatacgtatcattcagggttctgctaagagatacagattgaagtaggtaactaaggcaaccaggtaacttaaagagctatttacaaagatgtgggcaggtcttgggaaatcagcaaggaatagcgaagttcccgagccagctgcactagatgtggagggtcaagagggaaggaaggagcagaaccccaagatagtggctgtggagcaggggctgcttcacagcaggggaggaagagctatggcctccagttgaaggacgcagccagcctacagcgaacctgagtgagggctgcggccgggagagcatgcccctgcctctcgcttctcccatcctctcatctcctgctggggtctacttcagaggacaagttggtgctttgggggcacagaatagagaggagagtggatctggaggggcatttaaatacaatccaggacgttagggttgcttcaatatgacttacttctctacccgatgaatacaaataaaaaacctgttgtcagactcctttatgcacattgttattttgtctctttcttctcagtcatacattttgaaagaatagttgatttcctaattccagttcactttt

SEQ ID NO: 11705 - DNA, 1098 bp, Homo sapiens
gtgggctgagatccactcagccaagggcccaatcccaccctattagggtatcagcagctttctatctgatgcacagtggtggggatgcatgtggaaggcatgctctttgcttctgccagccccaggctggattgctgtgtcatattatggaatggggcacaaagggggcattgatttgctggcaatcctgccatggaatcccttggtcacggcttttccatgccctgtctccagcatactcagactgatccagtgtgcccaaccagccgtttccacaggtctggcccggccagggaccttcttgccacattctgggctctgcccactggagagttcaggacaggacccgggtgcagaccggaggcccaggcgcagagttgttatgctcagggccatatggaaaatgtgaacagggcctgaacaaactgcacagctcacttcttggcatttgcaagtgggactcaccaagatgcaatgcagaggcggccagtgaggtcaactttggctgagaaccccgaacagactgggagagtccaggagagaaaggaagggacactggagcaaacataacggggtgtagccctgttttaaaaacaccaacagagaaagcaacctttggaggaaaagtgcatggctccaaatcccaggggggcccactcttgtcgggggtctgatatctgacccctgggctgcccagaagcattcactaaatgctgctctccaaccaagttaaaagaaaacaactcccaaactctttgcaaagagagtcacacacatggccttgcagactttgggaattccgcagaactgagaaaatgaagtctctgtttcgagccatgactaggtctcttatatgactaagggttattacttctgcttagaggcaggaaacatccacagctccaaatcctacaggccaaccaaccactctctgtgtggcggttaggcaagcactttcagagtgaatgttgggcacttacagatcccttgggaactttttgctctctgatcacaactctgcaagtggttccccagagatgtgaaagagcaagtgctctaagaaggcgcctgctcacttacaaacccactcacctctaa

SEQ ID NO: 11706 - DNA, 1159 bp, Homo sapiens
gggagacagagcaagactccatctcaaaaaaaaaaaaaaaagccattctttccatgcgtggatgtgagggtatgagttctgtagaccaagggaagcaaatttatccagctatcactgtctttaatattaggaatgttagattagatgagactaggcacccttctaaataccttccagatctcaacacctgtggttctgtggtttgctttcgaattggtgtccactcgctgtttgtttgaactccgattgactgcctcagtgcagaaactgtcatacaactaagttctagttcatgcttttacagctctgaagtcaaggggcatatttgcttcattgagagttcccctagatccaggcctcagcttaagccagtgagtggctctttccatggcagctggaaaacaggtctggtaatcctttgctgacagcataaacttcacttcgagtcacttccatagcttgagcttcctctcaaaagatgtggaggcttagttgtctttaaatttggatgggttgccccagtttttggcagatagtacggttataaccggcattactgggatgctgagaactcagcttgtcacacagcgtgtgcatatttaataggtgctttgtgtttggaggggaaaaccctctccagggaatctccacttccagaggtctcctcctgcctttagcagccatcgccgcctacatcctgcaggggtggtaggtggggctgtcttgattcacttcctcgctgccatgcagaaaaataaagtagttttccagccctccgttcagtggctgagtgttccttttctcaccttttccctatttccctgcgtgctctggaagtcagaatccagaggacccctctgtatgactgcgtctacagagaggttgcatgtggggaagtgagttcacccataccaagaaagagaattgagagatgcccttttggtttggtttggttttgacttgatttcttgtgcagctcacctgtttggccagcagctcctgagtgtgctcgtttacagtcaggaaaaaagggcacatttccaaagacttgattaagtggaagtctaagagcagagcctggcacatagctgcgaagcaggtctttaagaaatggaagcacacagggtgtatttacactggtaggaaaacccttcccagg

SEQ ID NO: 11707 - DNA, 1158 bp, Homo sapiens
gttgtgatggtgcatttgattgaagcagcttgtctttattatgcaagactgtgtagagttttttttttttttggcattgtactttttgtttttgttataaaggaagacagaacaaactggaatgttttatgatgttgtatagcaatcgctttttacctttcaaagttccgggtaaaaatgtgttatatctgtagttttttgtttttgtttttttttaaagcactacatctgttttcactaattgttaatttctgtttgaacccttcatttaattttctcatagatttaagtaaacagatgtattttgcacagtgcacttatgtctattttaacaatcctcctgcatctgtattttatagtcagccttttgaccacctggtgccagctatataaggaataaagttgattcatatcaacattagaactccagtcccaaactaatctgtcaggttcactggtacataaatacctaggaaatatttttccagtctacaatttggtgctattgtgcagtaactaatagtactcttaccagaggagaaattatattaacgaccctgctaatatcctttcttagttatttgctccttgcaaattaaaaaagcaactaagagaaagaaaaacattgtagatatctatttatatttaaagtttatgtttcatgaactgcagctgcaggattctggcattttgcatgccattctccatcagatctgggatgatggctcagaacatgtacacagactaagagtaactgtgtgatctgttaaggggtggataacataatatgcagcttaggatgctattttgagatgtatgatattcagttcattcacctgattactttggttgcagcacaactgtatatattgtataaccgaaattgattattttcattgtccttaatgcagtgatttataattagagcatgtttaataagtttactcttcttgttaactagtcatttgactggaaaaaaataaaatacttttaaatggacatggttttatttttaatgtttttaatctttaaagttttgtatattgacagtcctttaaaaaaagtacactatcatactgtacatgggatctttacatacttttagcatgagcggtaatcttttaaggttctcttaactctaggaattgtggttggcca

SEQ ID NO: 11708 - DNA, 1113 bp, Homo sapiens
aagattattagtgagtttcagtcaaattcagtaccaaatgttgagtagatagccacatccattccttgccaagtaatttgtgtggcatagatgaacttccctggagtatcatttactagatcaaactgtgggctttgatgtaaatgtagtttactagactttccccagtctttcaccccagcctcaagtcatcactaattaggaccgtgctgctgtcaggaagcactgcacgcccacaagtgtgtagggcggccgttctgtttcatggtaatcagtcccaccatgacctctgcacacacagatgattgttcttttttttagtttgagacccggtctcgcagtgccgcccaggctggagtgcagtggtgcagtcacagctcactgcagcctcaaccttcccggctcagtgatcctcccacctcagactcttatctgggaccacaggcacacgccaccacagctggctaattttttatgagatgatggtttttttaaagagtattcatttatcttctatataatcattatagacttaattctaacagtcttgtttgtgcctcactttcagactgtagaatgtgaagagggaagtgaagacgatgaatccctccgagaaatggtggagctggctgcacagagactgtacgaggccctgacgccagttcactgagactgtgcctgtatatgaactttgaaaaaatacttgactctacttttgttacctaaaataaaatgcattcgtttctctgggggagcctgtttacttttaatgtcaaatggcctttatttcaacagcctgaatactgctaaattgctaattaatttgtccattattctagaactaactactagatcaactgcccattattttagaattttggattcttcttccaggcatgtatgtgcagctcccattgaaaccatcaagatctgccgatagcaaccgctgctggttaccctctcctctggggtaaccaatttgagttaataataaggattctaagttgcacttgaatcttttctgtcttcatctccactgctgctgttcgagtccaagtctactctcccctctgaattcctgcaaccacctccatctcctcccctatagctgat

SEQ ID NO: 11709 - DNA, 1143 bp, Homo sapiens
tttctctttaataccattctgtagtccgcctctcgccagccctcactgtcctgtttgcagcctcctgagccttctcccctagccccagccccaccttccaaaccaacctagcacaatccccagatactgcactccagccttccctggtgcagctccctgggaggatgaggcagcctgcacttgtgttagatacactcaatcgttctgtgctagctgctttgctggtgtttagtctcttaatcctgccaatattcctgcaactaggtaggcactgtcatcataagaatgcagaaagcttcaggacggttaagctgttcaggcacaccgctatttagtgaaaattgtaggcatcaaaacgaaggtctctttgtctaaagccgacaaatgattttgctgtgttgcggtccagctgttacatgtaagaagccagcggtgtcagcgcagcgttcagcttccatggcctggcatttcctactagtgcagcccttaccagcccccagcccagctcctgcagccggcactctccaagcagcccagccctcctgggcctttcctgcctctctgcctctgttcaaggtgtcctctagaacatcctccctggcgcctcagaagattccggttaccactgaaggctccttcttcccactgcaccttgtcctctgctgggtagagcagcacaccagtaacctgcaaggctcatcaacatataccctaaaccccggggctggcccaagtggggtcaatatttaatggcattttgaaactgtctagatgagtggagcagaacttacacaagggccagcacttgggtttaccaactgccacctctatttcttctcttcaataggttgcaaactaaatcgcctgaactctgttgttggtgaatatgccaatgcgtgtttacaagtggcccaagactgtgggactgacgtacttgacctgtggaccctgatgcaggacagccaggtacggtggcttgctcggtcctctcggggtaaataggatcacacagaagtaaaccaggtgtgtgtgcagcagctttccctagaaaggccctgcttagctaagacagtcatccctttagccaatgaaaacaaacaggcttgggggaggggaggaatggaggttccaggatggctcaca

SEQ ID NO: 11710 - DNA, 1366 bp, Homo sapiens
tatggctcttcataattctaagactaatgctctctagaaacctaaccacctaccttacagtgagggctatacatggtagccagttgaatttatggaatctaccaactgtttagggccctgatttgctgggcagtttttctgtattttataagtatcttcatgtatccctgttactgatagggatacatgctcttagaaaattcactattggctgggagtggtggctcatgcctgtaatcccagcacttggagaggctgaggttgcgccactacactccagcctgggtgacagagtgagactctgcctcaaaaaaaaaaaaaaaaaaaaaaaattcactatctacaaacctagaatatttaaaatacaaagattgcctgttttcaaacactattgaataagagggtgagatatttcttaacaacaacaacaacaaaaaaaacaggttgttttgaatgtgatgagccagccaggagatagaatactacctgcccttagggttgggggctgtccccacaagacttgatacttcagaaaccctttttattgacccacaagcagatatttgaattacttcttactttattgctccaggattctggatgggctgcatttactgtgtgaaggataaaaatcattagcctggattctgatttctataaattgccattaaaagctttttttcccctaagaactgaaatgtgctcaccagccaaaacattttaacttgtaaattttgagggcagttaaccaaacctgtgactaatcatatctcctcctaccccccatttccaaggacatttgttactcagatacttgttatactaatacttgaacttgtaccttatggtatttgctatcttttaactagtcatgatattcttatactttagttacacttttggaatttgatacaaggttgagtggggtgtgtgggtgtatgtatgagtgaaacagttctcaaaagaatgtaagaaaaaccatttttataaaattgtgactttttaaaaacatagtctttgtcatttatagaattaacaagctgctcagggtatattttatagctgtagcactgatatctgcattaataaatactgtcgaaacacaatggacctaagtataaaacttccctgaaaaatcatctaatacttttattattaatatcagtggcaaaggtttaagcctgaggaaaaaagcgtacctctacgtattgacaactttgagttctgtagataacaagcagatttgggtctcctgtgattggctaatggtctccatctcccagcagacttaattcaggttttgcttctgctacatcccgccagtaaggaagcagcaaaggtagagaagagacctttttctctatca

SEQ ID NO: 11711 - DNA, 1344 bp, Homo sapiens
atagcttcatttcatataaacataagtaactcccaaacacttatgtagaggactaaaaatgtatctggtatttaagtaatctgaaccagttctgcaagtgactgtgttttgtattactgtgaaaataagaaaatgtagttaattacaatttaaagagtattccacataacttcttaatttctacattccctcccttactcttcgggggtttcctttcagtaagcaacttttccatgctcttaatgtattcctttttagtaggaatccggaagtattagattgaatggaaaagcacttgccatctctgtctaggggtcacaaattgaaatggctcctgtatcacatacggaggtcttgtgtatctgtggcaacagggagtttccttattcactctttatttgctgctgtttaagttgccaacctcccctcccaataaaaattcacttacacctcctgcctttgtagttctggtattcactttactatgtgatagaagtagcatgttgctgccagaatacaagcattgcttttggcaaattaaagtgcatgtcatttcttaatacactagaaaggggaaataaattaaagtacacaagtccaagtctaaaactttagtacttttccatgcagatttgtgcacatgtgagagggtgtccagtttgtctagtgattgttatttagagagttggaccactattgtgtgttgctaatcattgactgtagtcccaaaaaagccttgtgaaaatgttatgccctatgtaacagcagagtaacataaaataaaagtacattttataaaccatttactatggctttgtaacaattgcatacccatattttaagggacaggtgaatttactactttctaaagtttattgatacttcccttttatgtaaaatgtagtagtgatacctatatttccacattgtgcattgtgacacacttgtctagggatgcctggaagtgtataaaattggactgcatttcttagagtgttttactatagatcagtctcatgggccatctcttcctcagatgtaaatgatatctggttaagtgttatatggaataaagtggacattttaaaactagcaaagttaattatgtgattgtgagtgccttggctgttattagaattgtgcttcagtggatattcaaaaggaatgtaagagttcagacacagatactcctcaacttaaaatggggctacaccctgataaacccattgcaagttgaaaatacgaagtcaaaactgcactgaatacacctgacctaatgaacattatagcttaacctatcctacattaaatgtgcccagaacacttagccctacagttgggcaa

SEQ ID NO: 11712 - DNA, 1264 bp, Homo sapiens
tttataggtattttacttggatacccagggatgatttctactatatttattttgaaatctcctctttttcttcccatcatgattacctactcctacccctgacaccttactctaccctatgattataagcagtgatgtgcctacagagcatactgagcagagtaatcaaagaaggataaatgatgttaagaaggaaacataaaagattagaaagtcatgcctgccaggtttggttactagaatagctgtgcatcagccacattcctcaaagtggctcaaaacgagagaataaagaggaccctgtagagataagtactacttaactggaaagaagtctgttaagcattgctgctgttccgttgtcctgtgaaagaaccaagacatgcttgtttactaagtgtatagttttataaaattccagtcatactcataagttcttaaactgggagtgtgagagaatggttctgttgagtttgttgatggtagaacataaggtgggtgttcacttattttgtaaaaatggtttgtaattgtagaataaccagttttcgtcaatgcacatattttaccatggatattaatatttatcaggcttttgatgaggccattgctgaacttgatacactgaatgaagactcatacaaagacagcaccctcatcatgcagttgcttagagacaacctaacagtgagttgtttactcttttaattttattttcttttcagaaacaaaagtatttatattttattttggacttcgtgtcttttagggaagatacatacgagctgaaagtatgagatacgtgttagtattttatgggacgaacattattttgtaggcaggttttcaagttgaataggcattttatcagaccttcctgagaaggttctaacatgataggaactcaatattaatattactatttcattgggatgaagatgttgataaattatgttaataaagagcttatcaagtttcaatattttggggcaaatcagctatagccagttagggactatctaaatatctacgctttcttaaaatcacaggaagtaccttgttctaataaaagtttactttgtgaattgtgcatgatgttctacaagcatttagggagtaaacctatacctaaacttactccttctctgcttctaggcaaaagcttctgttttgtttgtctttttctccctgcttcttagataggcaattgataaaggaagtaatcaagaaaaagtacagcttaagctttactttaacattcttt

SEQ ID NO: 11713 - DNA, 1430 bp, Homo sapiens
cagaagtttttttgttttggttttttttttaaagaaatggtagaaaatttgataatctgaatcaccagcattcaaacaaatatttcggcaataaagtttacaaaatctggatttttacaaccttttctattgatgttttgtagaaataagacagggtactaatttttatactggtttttagaaaaatatttatattgttggtgctcaaatcaccaatttctagctagatcattttgcagccttcttttcagtgtttaataacaaagtttttcctaatggcccttcttttagtaaactggacatgttattccactacaaaaaccacaagttatctggccttttagatctttttggaatcggacctggttgagtaaggacctcttaaaagggaaaaataaattttgccgtcagcttcttcataacgttttcaaggaaattctaggcaatcattcctgtcaccaaagaactaaaattttggttgactggaactagtgagctgtgtccatggtgtgtcatgaaggatgtaccccagagagtaacatgagccactgggcagatcccagggaccagtacttgctgcaggatctagtctgtaatagtcttggccatggctctgctgaaagcaagccattcagtttcttgtttgtacctaaaacaccaaaaaagaaacactcaaatccagctgctttgtcaattgtcagttctgactccttttgctgtggccttatccgtactatattgtgggtagagtaacttctcagaaaaaaaggaaatgtctgtattggttggatgaaactccaccagagcacagcttagctggggcgagatgcatgtgaaggcaggcagtgccaagattccgcttcctttgtttgccaaatactagaaacacaaggaaatgcaagttacgctaaatggcagtaatactacccaactgcctttctgttcattttgtttgaaggaaattgttttgaccaaacagaaaattacttggaatggtgtgttttacagtctacctagaaaatagatggacaatatttttcaactgtatgagcacgtagataaccgagagaatgtggccacctgtgttcaagaagccactgatactggtttttgttaaacattggaagttcaggcaatggaataaatgtaggaacatacagaatgttgcactaatttggtagcctgggaattttttttattgtgcagtatgtatttaaattttgtctatgttaattaccagcatttacctttatttaaatgatggtaaggtggaatattgaataaaattaggttttgtgttttgttctttgtagtctgataaaatctccacctggtcattcattgtgtgtgacttgatacctgttaacttgccccttagtatcagctgttacttgacacaaatgtgtgtgttattcagaggttttcagtct

SEQ ID NO: 11714 - DNA, 1121 bp, Homo sapiens
ttttccaggcctttgcaccaacctcgttggctaagccccctgcccggcggcggcccggctgggaggaggtgctttcgggaggcggggccgcggcccggggatcctctcgcgcccgcgggctccaatcgctgctcctcacgcaatcctaaacggttcccgggcgaaccggggcccgcgcgcgccaaggccgccgagaccctcaggggctgcggccctggtcccgcgggacctgtgggggcctgggcggcggcgcccccgacccagccagcggacgggccggggggggaaccgggaggtcccggggggcgtccacgggggtgtccccgggggtctccggaaggcgccggcggaggctcccgcgctgcgcttgaaaatcgcgcgcggccccgcggccagcctgggtaggggcaaggcgcagccaatgggaagggtcggaggcatggcacagccaatgggaagggccggggcaccaaagccaatgggaagggccgggagcgcgcggcgcgggagatttaaaggctgctggagtgaggggtcgcccgtgcaccctgtcccagccgtcctgtcctggctgctcgctctgcttcgctgcgcctccactatgctctccctccgtgtcccgctcgcgcccatcacggacccgcagcagctgcagctctcgccgctgaaggggctcagcttggtcgacaaggagaacacggtgagcccgcggggagggcgctgcgggcaggggagggaggcagggaaagcgaagccgctcctcactcacacgcgtctccccgcagccgccggccctgagcgggacccgcgtcctggccagcaagaccgcgaggaggatcttccaggagcccacggagccggtgagtggcgggcgtggggcagaggggccagggacggccttgggcgtcttggcgccaaagccgcattgtttcctcagctgttcacactcccgccccggctcctttcccgcctaggcggcccctccccagggctgcctcccgcgcccctcggcccatttcccggttcgggcgtgcgctcctctgctgcgacccacggagtgcgacgggacagccacgttttcacatcgggccccgtgaaattgccgccaatggaaaggactt

SEQ ID NO: 11715 - DNA, 1156 bp, Homo sapiens
actgcatttgctgtgaattataggtaattattcatcctgatgaccatttaaaaaagaagaacaatattattaggtagaaatagtccctggctccccggttgcccaccgtgactataacagcatatctagcttggtagttttcaaattatttccacgttttatttacttctcacagcctccctgtggggttgcaggtgcttctccactcctccactgacaaggtgcctgaggctcagagaggctgagaaatgtgctctgggctgcacagctggggatgaggcgtagaccctggccctgctctgttctgggctctttctcctccactctggcctttggaggctgtggctaagatcttcccccagccccttccttcccaccttcccttcctgctcttgtgccccgtttttcacagtcctcagtggctggtttctcagtcccccaggaggtgcaggctggttcttaggaatggtctctgtcaatgttcccggcagtacctccgagcctgccctctgaggatgggtcggccatggctgcgccggcttagtctgtatttaggtatcactgactatcactggacttggggaggggatttactatttttagagaaagtcaggggagctccataaatcctgttagtcaacagaactgcagagaggtggctgtttatgaaggagagtgacttttttagaagtggcgcatttagaagaccacatattctatcattctgtgtacatgagcggtgcagaataggcaattctaaagagacagaaaatagattcgtgattgcagggagtggggaggagggatgggaagcgactcctaaggggcacggggtttcttctgggggtaatgaaaagcgttctggaattagatagtggtggtggctgtaggacctggtgaataataaactgaaaatcactgaatcgtaccccttaaaaacacacaaagcaaattgacaaattattgggaggcaacataagagaatggggtgtgaactttggatcagtgcggcctggatatcagctgtgtggtgttcaaatagattgcataacctcgttgagtctcagtcttcccatctgtgaagtagggatcattcctacttcgtagggttggcatgagactccgtgagatgaagttggtgggtcacttggctggg

SEQ ID NO: 11716 - DNA, 1138 bp, Homo sapiens
gttccactgattttaagttgcattttcccccccgcatttccacattctccaagtgagaacgtgtcccgcagtgtgagggtgagctgtcgtgatataattagagtctcttggccttcttggtggtccataagatagcggcatgccttccgatgggggacccgggagttgctgagtcgcagcgcttgcacagcgatgggcttatttggtctctccggcacatggctcagccctgctccgtggccgtgggtggcgtccccggctgaccccctgtcttgcaggtgtagtcgccgccgccagccgccatgggcaaacagaacagcaagctgcggcccgaggtgctgcaggacctgcgggagaacacggagttcaccgaccacgagctgcaggagtggtacaagggcttcctcaaggactgccccaccggccacctgaccgtggacgagttcaagaagatctacgccaacttcttcccctacggcgacgcttccaagttcgccgagcacgtcttccgcaccttcgacaccaacggcgacggcaccatcgacttccgggagttcatcattgcgctgagcgtgacctcgcggggcaagctggagcagaagctcaagtgggccttcagcatgtacgacctggacggcaacggctacatcagccgcagcgagatgctggagatcgtgcaggtaccggcgcccgaggccccgggtctcaccgcgggcccaggtcccctcccagctcccagcccccagcccagggcttttttttttttttttttttttaagacaggaatcttgctctagtgactggagtgcagtggcactatctcagctcactgcaacctctgcctcctgggctcaggtgatttttccgcttcagcctcttgagcacctccatgccctgttaatttttttggtatttttgatggtagagagagggttttgccacattatccaggctggtcttgaactcctaggctcaagcgatctgcccgcctcagcctcccagagtgctagaatgacaggtgtgagccaccgtgcctggcctccctgtgttctttatgttcactcgacattgggtctttcttggccaggttgctacctggtgcactttggaaagtgagcagttgtcacctgattgggca

SEQ ID NO: 11717 - DNA, 1188 bp, Homo sapiens
gggagcagggaaaggaaaaaggattttttttcagaaatgcctgtaaagtgaatggagactagacaccgtccagcttcaagaaggctcaggactttcaacaaagggagcatacctgacctgagagctgtccccatcctctctggaagcataaagaacagtgagcactggctaatcccattgtctctggtcccctgcaggcaaactgtccttggaagaattcatcagaggtgccaagagcgacccctccatcgtccgcctgctgcagtgcgaccccagcagtgccagtcagttctgagcgagcggcccctggacagttgcagagaaacacaggcttgtcgtgccgtttaagctttgcttgcaagagtggatgccccgcaatcgttcctgctctcccgggccccgggcctggggcatgcgttgcacctgcccagcccggtggctgcgcctccctcctccacctgaccaacgcgacattcctcccctcacgcctggcccggtcccttccagggcaactcccagggatgtggtgacatgcagggttcaagtgttcttggttccaggcacctcccggctcacggggagctcagaggtccatgccgaggagaccaggcaggacctcccgaggctgcgccccggccggcccatgcgttttgtgatcccaagtgactctgtgggaagggtggggacgaggcgtcgggagggtatacagggagcccctcccgtgcatggctgcccccccgttcattttctccaccacagccgcttgcacgtatagatactgtggtcccctttcttttaatatataaattatgtatggtgaagtggagtgtattgtgtaggtcccgtatttaatgcctctgactgcctttgaagcgcagccctctgtggcccgcagccccctgagcctggctgttgtgtggtatttatgctctctttgtctgcctgtttctaaggaaatgcatgtgtgccctgagccgtgatgatcctcccatccgtgttgtgagcacaggcatttgtgtctggtctgtcctccctgttgattggtctggcatttccggtattaaaatgataaaataaatggcattttctgagttttgcgtctgcccgcgggagcccccattcctcaggccgtggcccctgcactctccaggcaaggcgggtgtgctgcgtgccaccgctgttggtaaa

SEQ ID NO: 11718 - DNA, 1587 bp, Homo sapiens
ctatgcttcctctccttaaaatacttgaaatgtttagtcacttaggaagttaagccattatattggtgcttgaatttataaaatatatccacatggtttgttaaaatcatgacgtaggcagaataggatttttatcctgttggcatgtatttgttaaaatgttttgacatcttgatgccttcctaggtagtagttagttgcgtactgttctttgataaaaatcatacccataacatcctaaaggagatagggtgcctggaggggaatgaaaacgagccacctgggatatgtagcctggttttcagggagatgttgatgtttttttgcttttgttactttaatgataaacctgtctgttgatgcctggtctcatgatgtcatgtcacaaggccctgtgatgttactcccccatgtgaatttcccacaatgaaggctgctctttcttttctgtttcactctcttagatcaccggcgtaatcaacccagcgttggacaaatactttccgtcagactctggagtgagaatcatagctgagcccggcagatactatgttgcatcagctttcacgcttgcagttaatatcattgccaagaaaattgtattaaaggaacagacgggctctgatggtatgtataaaggacgaatcacttcatgtataactgaaagctgatgcaaaaagtcattaagattgttgatctgcctttctagacgaagatgagtcgagtgagcagacctttatgtattatgtgaatgatggcgtctatggatcatttaattgcatactctatgaccacgcacatgtaaagccccttctgcaaaaggtaatttctgagcatactgtataaaacaattaagaggactggtcacaacacgtgtaattaagtagtacttcctctctccgtctctttatatagagacctaaaccagatgagaagtattattcatccagcatatggggaccaacatgtgatggcctcgatcggattgttgagcgctgtgacctgcctgaaatgcatgtgggtgattggatgctctttgaaaacatgggcgcttacactgttgctgctgcctctacgttcaatggcttccagaggccgacgatctactatgtgatgtcagggcctgcgtggtaagtaagccatgcatgttgatggtgctgccaagaataggcaccttcttggatgtgtgcttcttgtctagacgaataagaaattgtcttgcctaagattaaatatatatggatatttttcctaagaaaagttttagaaaagactgatgagtgtatttctatgtaattggaatatatttaagttcatgccatgtgtcttgtggtttccttattaccaaaacggtgactgaagaaacgcttgctttagaaatacattgaattggccaggtgtgctggctcacacctgaaatcacaacacattgggaggccaaggcagaaggatcacttgagcccaggagttcgagcctgggcaacatagtgagaccctgtctctacaaaaaattaaaaaattagttggccatggtagtgggcgcctgtagtcccagctgcttggctaaggtgagaggtttgcttgagc

SEQ ID NO: 11719 - DNA, 1467 bp, Homo sapiens
gactgaaatacagttggtgcagagtctgggggtgcctccagagaggattatctatgcaaatccttgtaaacaagtatctcaaattaagtatgctgctaataatggagtccagatgatgacttttgatagtgaagttgagttgatgaaagttgccagagcacatcccaaagcaaagtgagttattcccccatctgagggcaagatcgggagcataagatatgtggattcttatcaaacaaacttaaatttctgattattatatttctatactttagtagaaagtagttgaaacccccattgagtcatgaagcctgggactcaaactacagaatatatcagcgacagtatttagaacaggattgtttttattttaattgtggctataagtgaacatctatcatgagacatttgctgcactttccttgcttgtaggttggttttgcggattgccactgatgattccaaagcagtctgtcgtctcagtgtgaaattcggtgccacgctcagaaccagcaggctccttttggaacgggcgaaagagctaaatatcgatgttgttggtgtcaggtgagattttggtgggatagctagaggtcaagacattgaacagtttgagttttacaggctttctcctagtgtttgctattattttaagaaatactaagacacagtgtctcgtctctttattttaccccagcttccatgtaggaagcggctgtaccgatcctgagaccttcgtgcaggcaatctctgatgcccgctgtgtttttgacatgggggtgagtatacgtgaccctgttagggaagggcgggacacaactgacaataactagtcttaattctagagttaactttttatggcagttggttctgtattacatgggtttcagcctatctgctgcatacatttttgttattagctgtggatctggctgacttattttcttgattctaggctgaggttggtttcagcatgtatctgcttgatattggcggtggctttcctggatctgaggatgtgaaacttaaatttgaagaggtaatttagaacaaaactgtaatactcagtagccgttctaataaattcctttttggaatatttcaaaatttaagtgtcttaactaataccacaatgggctgaagtgtcttggtgtgatattttgagtgatttctttgtgctgtctgacattacacttgataccatttggttttctaaagtgtgaatcagctttcccagaagtcttggataattggttacattggaaatcatggctcacacctgtaatccagcacttggggaggccaaggtggtaggatcacttgagcccaggagtttgagaccagcctgggcaacacagtgagaccccatctctacaaaaaaaattttaaaattagcctggtgtggtggcgggcacctgtaatcccagctacttggaaggctgaggtgggaggatcacttgagcccag

SEQ ID NO: 11720 - DNA, 1118 bp, Homo sapiens
ccggcctgcggagacacgtggtcgccgagcgggccacgaccttgaggcgccgcttcctcccggcccggggttctcccgcggctggataagggtgatccgggcgcctcgttctgcccccgtcttcacagctcggggctggaggggcctaggggagacccacccggagaccctgcggccccgcgccggcctctttcccaacccttcggcggccgcgcgctggccggggagccgttggggaggccctggcggccgcgcagcaggtgcaggggcgcagagcccgggctcgccttggtacagacgagcgggccccggccttggcgccttcagtttccttccagtttttattttcgctgtgtctacagagcagatgacaccaatttggaaacccgcgagagtgggtagagctaagatagtcttgctgtagtagctgtgatattagatgctcggccatgacttagaggtgtttatttaaggactgtgaatgactcggtgatttcggaaaagcttggcttagatgaacggacatacacaggggagacagccctaaggtttgcagaaaaggctgattgtgctgtttgcgaagtcgaaataattggtgaaagtgtagaaggcagaacctctcaggaatgtctggggaggacaaagaatgtgttggctgactttgtttaaacataaaattgggcagactttaattgatttgtgaaatttttttcaaagtttgtttgaattagcccctatctcttctaacattatcctcttgtgctaattgattgaccattttaaataacttagctgttacagaaagaccgaaaggtgttcttcagtaaaatatattcaagtaagttacttaagtaacgccttaaaagatacagaaaagcaaaaaagtattggcgtattaaaaagaaatcaaaactttccaagtttaggcctgaacattgccttaaaaatatttaataaggcctcaaatgacccagtccgagactgcatgagcctatttattattaaattgtaaatattcttcatataaacaaaaatatataaccatgtctgtaacaaaaatggttttgctagcgttgttactctcttcccttctccgaggggtgatttaggcaacttcg

SEQ ID NO: 11721 - DNA, 1140 bp, Homo sapiens
tagtctgaacagcagaagaagcaacaggaggctgagaaactgcatcgacaagaaaggaaaagactccgtcgttcggccggacacctgaagtcaagacacaaaagaggacggtcgtttcattgatttgggaagtggtcctacctgtgattagggaggggtacgtctcccccaaactgatcatcgttagggtgttaaacacagacgaggaaacacacgtttttaaagttcatgtacgttcttgtacacagaggtaaagatttgaaaacctgtgccttgtgggttggactttgaagctggccccgccgacggccaccgcacagccccaggggtgtgcttgcgagtcgttgctccctggaaacattgtcctttccccacggcgttaatcatgaaaaccaggctggggtttttttaatattgtgaaatgtacaccatgaaatgaaaggtttatcctgtgccagaaaccaaggtttatcatgctctaggaacttttttcttacactgcctaccgccattcatgattaaaccatccagaaataccatccctgttttacctggtgtctgtgtattgcctgtgtttgtgtttataagtttatgctgataggtttgttcggcttgtttatgtattagtttgggatttgtttttaaataatttataccaagagagtataatctaatggtgcaggttgagagcatcccaaatccgaaaatctaaaactgtttgagcactgtatttatctgttcttgcactgctataaagaactacctgaaactgggtaatttataagtaaagaaaagaggtttaattgactcacagttctacaggtggtacaggaagcatggctgtggaggccctgggaagcttacaatcgtggcagaaggtgaagcggaagcaggtatgtcctgcgtggctagagccagaggaggagggcaaaggggcagatgctgcacactttcaaacaccagatctccaagaactcactaacacagaatagcaagggggaagtctgcccccatgtttcagtcacctccctccaggcccctcctccaacaccgaagattacaatttgacatgagatttgtgtggggacacagagcaaaaccatatcaagcactgacatgacattggaggaaaatgctcat

SEQ ID NO: 11722 - DNA, 1166 bp, Homo sapiens
gagaagagagtagagtgaggggtactgaagatcagaatctgagggaggtgaactctctgtaaccactatcatcttgcaggtatgaaaattattcctgtctatgatagtccttttaaaattgctcagttatgtattttcacacataaaaaaagcatgctgcttgctgttgactctgtggtttcgggatactgacgtgttgttgaaagcacttagagatatttcgtttggttggtagtgaaatgaaggccgttcaaacaggaagcattttggttttcctaagttaccatttgttccttttcccctggactcttgcagatactgcattcatattcctgtcaacttatccatctttccttgtattcacttgttaataaatattatggactacatcaactgtgtgttgggaacgatgctgtatgctggcagtattacagcatccagggtgctgcccttctctttgaggagttactgttgggaatccaacaagaaagtaggcagttgccattcagtgtgaggagtgctaccagggtactgtggtgggagcacgtaggagagaccctgtacccactgagggcccaggagctgatgagaagtgtggttggcactcagggaatacttcccagagggagagactttgaaggagggaccgaaggatagctgcgtcgactgggtgaaggggtggggtggagtgaggtgcccagtgggagaagggtttttttttccttttcagtcgactttcccaggttggacagtagatcggatcttgacagtagagtgggtgcagagctgcgggagcaagtacctcccatggctgagcattcgagcctgtgggggcaggtagaaagccaggttaggaggggtcttgtgagccggctgtggggatgtagggcagggagtcctgacaagagttgtaagcggggggataggatcagacctgtgttctgaaaagattacttttgctgccgcaggggaatgcattaaacaggctctaatctggacgcaacaagcacaggctgtggcagcccacaggagagatgatggcacctgcattacctgtgccaggctccctttctagtagttgtggctctttggggttctgggataatgtgagagaagtctaatctggtaggcagtacttgcagacgattcatccttgaattgcctgg

SEQ ID NO: 11723 - DNA, 1457 bp, Homo sapiens
cctggtgcacccgtgggccttttaagaggttcttctctgaagacccttcatcttccttatcacaagtttaagtgctgcatggcatttgatactcttgacagccaagatacatttcagtagtaaggttgctttcctgattattaccttaaagtgaacatttaacctggaattcatttactttatcttagaaaaatagaaaatgatagctttgaaattagcacttatttctgtactgttgtgtcccaccctcctcaaaaggacacgttcaagtggcttccagtgttaaaatggtgagtgatgtgatgttgaaatgtttcacctgagttctgagcttttccatccgtataatcataggtacgaaggtcagggtaggagtcagactgaggagaacctggattgtagcaggagtagctccagagagtcgctcttccataaaatgagatgttgaccttccagggtgtccccttctgcagatctaacagtggctttctgtcgtctcccagcttcccgtggaggatgacattgacctcagtgatgtggagcttgatgacttagggaaagatgagttgtgagagccacaacagaggcttcagaccattttcttttcttgggagccagtggatttttccagcagtgaagggacattctctacactcagatgactctaccagtggccttttaaccaagaagtagtacttgattggtcatttgaaaacactgcaacagtgaacttttgcatctcaagaaaacattgaaaaattctatgaattgttgtagccggtgaattgagtcgtattctgtcacataatattttgaagaaaacttggctgtcgaaacatttttctctctgactgctgcttgaatgttcttggaggctgtttcttatgtatgggttttttttaatgtgatcccttcatttgaatattaatggctttttccattaaagaataaaatattttggacaatgccgataaatgtatgaagttagtatccacatcataaattcagagtgatgtttagcagtaaatcaatattttgaagtgatacacagatgtctttcctccccacaaacttttttaaacaaaaaacaagacctcttttctttagatggtgccacctatgcccaccacaacagagattttacatggaaaccgggctcagtgagaactgatttcctgcccaatatttgtctttgggctgtctctagtgactaattattaaggaatctagctggttatacagttcaaggctttctatgttgttaatgaacctcaaaatagccgttaagacatgaaatacagcagcaggttaccaatgcgaacaggtagttcgcatttatgtaaaacattcagaaaatgaagttttgaatttgttggaacattcaaaggacttgagagcattttattgtaacttaaaaaaataaatacaactgtcactaacttttgtgagcaatttct

SEQ ID NO: 11724 - DNA, 2157 bp, Homo sapiens
tgttaaaactccctgattgataattgacctctgtgagtcattcctttgaaatctgtgcagtctggagaacagttttgttacattaaattacctataaggccagagtggtggctcacacctgtaatcccaacactttgggaggccaaggatcacttgaggccaggatttcaaaaccagcctggccaacatggtgaaaccccgtctctattaaaaatacaaatattagccgggtgtggtggtgtgtgcctgcagtcccagctactcaggaggctgaagtaggagaattgcttgaacccaggaggcagaggttgcagtgagctgagattgcacctgtgctctccagcctgggcaacagagtgagactgcttcaaaaaaaaaaaaaaaaaattacctataaggtggttttagaaactgtaaagattgtgttattttgcattaagtgttaattggattttatcctctgacctttttttaatagattagaggatttcctacaatcaagatatttcagaaaggcgagtctcctgtggattatgacggtgggcggacaagatccgacatcgtgtcccgggcccttgatttgttttctgataacgccccacctcctgagctgcttgaggtaaaccacttcaactgcttgtagtccagaaagcttttttagctgatggtgaggaatgttaaagcagtgtgacacactgttcattttatgcccttaaagatactctctttaaagtggtttctatactttgaaatggaaaaaaagtctgataaattgcttttcataacttttagcattagaataattacactgaacagaaatacgagcttcttaaagatagagtgtattcaatcactcttgcttatcattctcaaagtaatagaacatttatcaagtactaatcatgtaacaggcaccgttctggtgtctttgtatagttttgttttgttttgttttgttttcatttaattctcacatgaacactgagaggtagatactgtttttaatctccattttatatatggggaaattgaggcacagagcctcaagtgtgtataaacatataagacatataatacatgtaagtataatctatttaaacaagtaagtggcagagccaggctgtgtccaggcattgcgatttcagagatgtttgtatgtgtgctaatcaccccacctccaccaccacagcttccacaggcttaagaatcagtagcagaaaaatctcctcttagagaacatgcctccaggtgtttccatacgaggaagtagtcgtgggagaaatgttttcaatgaaagtgacggtgcgaaggtcttgtttgccagcttacctttaggtgttgtatcatgcagcctcctgattgtcccttgtcttttgggtcccacagattatcaacgaggacattgccaagaggacgtgtgaggagcaccagctctgtgttgtggctgtgctgccccatatccttgatactggtaagacagacggaaatgatttcccttagctgttctatgctagatgctctgagaatactttctaaatggattaattttatggactcctttatctttacctttaaaaaactttgtctatttaaatcaggagctgcaggcagaaattcttatctggaagttcttctgaagttggcagacaaatacaaaaagaaaatgtgggggtaagttactgagcttactgtctgagtgtcatctgaacagctgattataggctttcttgagagtggttcccccgtgtttttgtaagctgtgttctatgtttgctctgctatatgttttttttttttttccctcctgcctcagcctcccaagtagctgggattataggcgcccgccaccacacccagctaatttttgtatttttagtagggtcagggtttcaccatgttgtctaggctggtctcaaaactcctgacctcaagtgatccacctgcctccacctcccaaagtcctgggattacaggtgtaagccaccgcacccggcctgctctgctatatgtttttattcaggatgtgaaaactttatcatgggaggaaaagaaggaatgaagggctgtcagcacagcatgcatttttctcataggaatcatgttttacatggtgattggagtgccaggttagcaggcagacacataaggagtagtgca

SEQ ID NO: 11725 - DNA, 1346 bp, Homo sapiens
actttgtctatgaaagatgtaacataacatcctaggatgaagcagcagctgtacttgagtctgaattagaacagtgttgttcaggtggttttttgagccatgttgaggtttctctctaaaaatagctggtgacagcattcaggtacaggttatgtgttgtactgaatgtattgataattacttgaaagtaaaagactatttgccaagcaaaaattacagtgctgaggaatgtacccaatttgaatacaaccgttttcactattttattcactaaagaaaaaccctaaaactttgttaagatgtagcagtagtgttattatttaaaacaggaaaagtgttcttcttggcccaattgtttgatgtttaatgtcataaatgacagggcagaagtgatagttcaagtaagaaggatgtgattgagctgacagacgacagctttgataagaatgttctggacagtgaagatgtttggatggttgagttctatgctccttggtgtggacactgcaaaaagtaagtgccttctactaagtagtctgttcattcacagtgttttcagtacattcattagcttattttgaaagagctgaagtagataatagatcaccactaagatctcttccagcaaaactctgactctaagtgaatattaaacattgacattagcgccaagagcttccactctcctattgccaaagattaacaagggactggctcatgtctggatttaggggcagtggtggaatgggaagctcatgtgaagggtagcattgtatctttagtaaagccacacacaaaatgttttctaggtgtgacataattggggattgggcagaaatgcacagatcagttaaaaagtataggctaggcatggtggctcacacctgtaatcctagctctttgggaggccgaggcaggcggatcacttgaggtcaggactttgagaccagcctgggcaacatagcaaaaccccatgtctactaaaaatacaaaaaaattggctgggtgtggtggcgtgtgcctgtagtcccagctacttgggaggttgaggtgcaagaatctcttgattgtgggaggcagaggctacagtgagccaagctcacaccactgcgctccatcctggataatagaaggagactctgtcttaaaaaaaaaaagaaaagaaaagaaaggtgtttgggctgcaagttaaaatgcaagtatttggcctggtgaggtggatcacttgaggccaggagtttgagaccagcctgggcaacatggggaaaccctatctctactaaaaatgtagaaattaacagtgggtggtggcacacacctgtagtcccagctatgttggaggctga

SEQ ID NO: 11726 - DNA, 1265 bp, Homo sapiens
gagaaggctctgcagagccatgcgccctggacggaagaactttcaaaagtaattcaacaaaatagaaacttgtcgaattacattgcagacagcgcgtgcggagcaaatgtgtgtccacggaatattcgtcgggcacaagaggaattccctgtcagctcccaggaccgtgggtgccctgaggccgagtcacgctcccccgggataaagagggtgggggcgcacacaggcaaggaggaggcggggtgggggggtgcagaataaggaactaaggtaaaaacgcccagtactggactcccctccgagcagcaccccgagagggcccggaggagctgaggcggtgcgagccgagactgccagccccgcccccagcaggccccgccttccgctgctcgccaccgcccccgtgaaaaaaaaccaaaccggtaacctctacccggccgcctcccattggatatgtgagtgagcgatgtccgcccggaccaatgagccgcagccacggcttggcgagcgccttccggcccgcccccgcgcggccgcccctcggaccaccggactggcctggggcgggacgtgggcgcgggggcgcggcgtgcggcacgctgcagggctgaagcggcggcggcggtggggactgcacgtagcccggcgctcggcatggctctcctggtgctcggtaggtgcgggccagcggagggaggcgggcgagctggggtcggcctgaaaggtttcgaatctctaggccgttccccggcgggccgcggccgcaggcggccggaagtgggcctggcgggcgggaggcgcgggcctcggcgtccggaggagctgctaggttgccccggcggaggtgcgggtgcgcgggagactcgggcgcccgtggggaggggcttccgcagccgcggggggcgggagcctcgtgcgctggagccgggcgcggggtccagggccgggcgggagagccgcggagcccagccccggccggatcccggggagggggtctgtattcccggagagtcgcaggggagcttgttccgggctcttctcgaactcgtgcgtggggacggaggttggcgggcgtcctgcactgctgcttgtttctgccacctgctttatgcagctcctacttttaaaaactgaaatgttaagccgggcgcggtggctcacacctgtaatcccagcactttggaaggccgaagcgggtggatcatctgaggtcaggagttcgagaccagcctgaccaacatggcgaaaccccgtctctactaaaa

SEQ ID NO: 11727 - DNA, 1205 bp, Homo sapiens
aagcccattttgaggccattttgagccttactcttaagttctctatgaagaactacattgatttgttggctttcagaatcttttaggaaataaatcctctccaggacaaaaatgaacatgaatggagtggcattttgttccaagtcagaggtgggcacctataataaatgactagggttcactttctgggactgatgtttaattgtaacacagatacaacagggtggccttgttgtgtataatacggtattatacccgcatgtgctctagcaaggataccaaggcaagcatacatgtagctggcttgagtttgtaccaaaacagtccttcaactttgcactgtgccttaagtaattactaacaaaaggtactaggattagctgcaatctctactttcgatgaggaaatcccagtaagctttctgattcaagtacaatgctgccattttttaaagggccacaactatagaattaccactgttggaatttggtacaaaatatgttttgtctattgaaaacatacacggtaaatggtgttgttaggtaggttctgtccagttcttagggacttttttcacattatagcatttttaccctaaacatgatgttgagattattatatactgtattttcttctaaattaaccctaatgtttaaaaactcactttccccctttaattgaaggcattgttttgttagatgcagtaatgatgtttaccagagattattgtttcctatgcaaaataaattttcatattttgaattctgctgagtcttaaaactgtcaatcattaatatgactattttatgtaaggtatagtttttaaacaaactggttaatccttttagaactactgcttgggaccaacaggaagagaaacatggtatctaaagacaaaattattcattctgtagttgttaaaattacagatgtcatatttttaaacatgcaagttaatcttttttcatttgcagttataatctgaccattagcatcaatacaaattatatgatttttagtccaacaaatgttatatttagataacattagtactttatcactgcttaaagcaactcctttaagagcatacttaggtgacagggtctctgtttttccccctttgtaaggcaacaaacactcgagccatctcagacattctacacacatcatacttacttaatctgccagtgatcctgtaaagtaga

SEQ ID NO: 11728 - DNA, 1194 bp, Homo sapiens
ctttaagaagtgaccattatactgtgtatatatatataaacacacacacatatatatatatatatatagtactctaatactgcaagaaggttttttaaacttcccactttattttttatacacattaatcagatatcattacttgctgcagttgcaactatgcacttgtataaagccataatgttggagtttatatcactcattcctgtgtacctgatggaagttgcatgttcatgtttaagcagttactgtaacaagaagtttaaagttaattatatcagtttcctaatgcttcatgataggcaactttacccattttgaatgccttaatttaatttttttcaaagtctcagccctgtctgtattaaaaaacaaaaaaagcgtttaccagctcttaggatgtaaactagctttgtggaagataaatcgtgcactatttttacacataaatagttatatcaatgtcagcctattttgattaacaaatgtttttaaagtattattggttatagaaacaataatggatggtgttggaactaatatatccttgatgtctgtctattattcattcaactctttttacagacctcagtattagtctgtgactacaaaatattttatttgctttaaatttgctggctaccctagatgtgtttttattcctggtaaagacatttgtgattacattttcacacttaagattcaaaatttttcccaaatataaagaaaactaagacagactgtagatgcattttaaatatttaaatatgatcctcagacatgcagctgtgtgtggcagtattttagtaccgggttaagaaaactggcaactgggaagaagtggcctcaaaggcacttaatttgatttttattttttaaatgctgtcaaagttacagtttacgcaggacattcttgccgtattctcatgatcccagataagtgtgtgttttatactgcaacaatatgcagcaatggtaagcgtaaagttttttttttgtttttgtttttttttatattatgaagtcttttaacagtctctctttatataaatacacagagtttggtatgatatttaaatacatcatctggccaggcatggtggcttacgcctgtaatcctagcactttgggaggccaagacgggcggatcacctgaggtgaggagttcaagaccagcctgcccaacatagtgaa

SEQ ID NO: 11729 - DNA, 1161 bp, Homo sapiens
caatctctgtcaggtgctccaaagatgtgccttgtctgtgattcttcccccgatgtcccatatgtgacccctgcagcaggcgctatcccatggccatggtgacttcctcctgccgtcttttgcttggctgtatctcctttacctgtccttcaagtgaagtcaggtcccacccacctcttccccagagccttctctgatgccttgtttgcatactcttcattttcatctctcattttcaattaatcgataacaaattattctagaatgacttgagtcgtgtcgataagtaggcggtctgctccttgaggttgtagatctctcttgacttctacgtgcagccctgggtgcatagctggtatcgctcagtgccagtgacaatgtccctttccttccaggtatgtgagactctgtgaagtagtcgaccacgttttcccgttgctgaaaagaagccattcttcagactttccctgttcggataccttcagtaacttcaccttttggagagagccactgccaccttttgaaaaccaggacattcattctgcctcagcgtaaaatgtcccaagcagcctcttgccagcagtgcagagcctggttgtcacccattaaaggataggtctccccggagtgcacagctccacctgggagcctggcgcgtcatcattggcctgacagcagagagaattgagaagcatttctcccctgccccaccccggggctgacatttctaagcaagataggaagggagcactttctaggctaggagttgggtgcatttgtaccgtgaaaagcattcctcagttgtggcttaatgccagttacgacgctgcctttccggcctgctccagcaagtagctactggttcacgtgcagtttggggctgtgaaacctaggcagaaggcggctgtctgagggctgtccccgcctaggacagggtcaatcgaggaatgccagatgtgcacggtttttggcaaagtagggggcacatttccattatagcaatgttagtgccaccaccttctgaacacagtggggagggctgtgaaggctcatgtgacctggatctgaggtctctgatagaaatctggacgccaccgggtccaggcctggcctcagacttggccttgtggatgggccccttacagtatttgctgactagtc

SEQ ID NO: 11730 - DNA, 1160 bp, Homo sapiens
actatattcttttagatattatgtattgttttactctgattaggttactgtgataggcatttattcatattctttctataccactgtcattaatatattaaaaagatgtatgtgttagactatcgaaagggccttattctctctttctcatagactgaccttcttttggaatttctgagtcatttattttccttagctttttccactcaaattaagggcaagcgaaaaagtaataatttggcattctttaagcctacagaatgtgattctttcacttgtttattacactggctcgtggacagaacaatttgaaaagtgaaagaattattttggtaaaagattttgctttacttttcgaagcattatttttttaaagagtgttttactccaacgattgaaacattttcctatttaaatttcattgttagaatcacaggaggcaaaaaatggaacggttgaatgaaattttactctttctgtgaaagaaaatccacagagttgttgcctccgttgtagttggtgggccccgttagcattggatgcctttgccaaatggttcatgtggacacacaaaggcaaacagatctgccatcgatcgcagatttctgtagaaacacggatgtgcatgtgcagattcccttttgcaggtattaaaaataattaaaaatagtcctgcctgaggttgcagtgagccgagcttgcactactgcactccagcctgggtgacagagtaagactccatgtcaaaaaaaaaaaaaaaaaaaaaaaagtcctgccttaactaactcctctgcgcttgttcactagtaacctaaagaggctatattcattctttatgcaatgagggtatttttgagtgaattttaactgctctgaactaagtataagctcatgggcctgcaaaggttcagacggtttctcctttgcacccaggaggaactttggctgcgagaatggggggatgtatccctcatgcagttggcatccaggcagccctctgcagcagcacaccctgcaggcggagttttcagaggatgcaattttggatcccgaattttgatgtaccttaaacttccacatcactgcaccctgaaacagagcatgctttccagaaagtcacactctcagatctgtgtcaagttcaatgtgagccctggcaa

SEQ ID NO: 11731 - DNA, 1202 bp, Homo sapiens
tacagaaagtcaccctaagtagccatctttcttcatcagaaatatggaatgtgttctgtgatttgtgtattgatctattacagttggatttcttttgaatagaatgtcagcactctgtagttaaatgagtaatatataatgcctactgaaaagtaataggttgtaacatctttgaatattagttaaggaattttatataactttgtaactgaaacacatagaatttggcttcagggttagaaatgttcttaatgaattgcctttttaattcacagtgtttcttttttctatattgactgggtcataaattgaagaatctgttttcagctgatacatagcttatggggttacaaattatcttttatagttgatctgtaattaaaatgtgatttcagttagaattattaaagaccccagaaatctataaagaaaaatcaagacttgtttctatagttgattaattgtgctatttaatattctgttgacagtagtattgggatatggaaaaattgactataaatctgttgacatttagtacaacatactttattttctgtagctgcagcaaaaaattattcctgatcaggaccaactgatggcaatagcactagagtgcatctatacctgtgaacgaaatgatcaactctgtctttgctatgacctactagaatgtctgccagaaagaggatatgggtaagaatacacagtatgccagtcttattgtgtttttttattctaacagttaaaacaaaaacgttgcttccccaaatgcttaccttagagaattttgggaatgtgaaaaaaacataaggaagaaaataaaattatctgcaatcctattgcctaggataaacatttcttgtcctaccaatatatgggaagttctatattttgttcaactgtaattataattaaattctgaattttgtcaaacatgataatttcctattgaaaaacaaaaataccaccacgatctccacaaaaactactttttataagtcagtaggtagtaattgtgtttttaatgaagcatttttcatatttattggctaattatatttattctatgaattatttcttcttggcctttgcctatagtacttcttttaagtagtgaatgtacctaatttttaactgcttttatgtttaaatggaaacgtatataatatgcttttggattatttagttgtatgcaagtcaaa

SEQ ID NO: 11732 - DNA, 1149 bp, Homo sapiens
cttccatggattgaggaacaagctagagacagttctgttatcttttagttatatagtcactcaagctctaatttaagtataaaatcaggacgaatattgatgagcgagttgtgcatcatccttgagtacgtttctttaaagggctccagagaatagttatctaaacacatttgtattgatggtgcaactactattagtgcaagtcaggttaagagctgtgttgaatcctttctagacttgttgctgtaaaatcttaccttagttaacagatggcagcatagaaaatagcccccaacatagccaaggacacccagggaatgaaatggttaattacacttgggaaatactactatcactcaggaatcagtaagtctcagtctctggaacattgcaacaaatgaaggaattatcttgttagtgagactgaatgattttttttggtggtagggggtgggaatgtatgatttataaaacctgtactgacgtgtttttctgtgttttcttctcaaatccagcaattgggtcagatggtctttgttgtcaaagcagagaagtaaaggaatggcatgggtgtagagctactaaaggattaatgaaaggtatttgaacagcatctgcacttgtataaacttttgaggcaaggtattaatacgtgagggtttttttgttgttgtttgtttgtttttgagatggagtctcgcacgtcgcccgggctggagggcccgggctggagggcagtggtgccatctcggctcactgcaacctccacctcccgggttcaagcaattctcctaccgcagcttcccgagtagctgggattacaggcgcccaccaccatgcctggctaatttttgtacttttagtagagatgggtttcaccatgttggccaggctggttttgaactcctaacctcaggtgatctgcttgccttagcctcctaaagtgctgcctgcaggcgtgagccactatgcctggcccatgagtttttaaaaatagctttaagtcgaggatctgggaaggtgtttgatggtacaaatatacctataattcttcatttggtacatacctgtgtaattcagaaacaatgggaagatgacttcatggtaaatgaatcgtgtgtgtgatttatataaatctcaatgtatttt

SEQ ID NO: 11733 - DNA, 1209 bp, Homo sapiens
gggaggagaaaaatggaaggtaaatggagggagaggtgagttcaagggaggttttcttgtgtgttttactgtgagagtatgtttatatgctttgaaatgtctaatggaaatgaacttgtagacagggagtaatgaaaaatgtagaggggtagaagtgacagtttcaggagtaaagtaaaaaaatgaagaagctggccttaggcagcacagtttatccatagtgacaggagagaggcatgaatgcaggtaagctggtagatttgacattgtcagcatgaggaaggtcttttctgattgttttaatctctctctctctcttgttttttaaggaaaagatcttggtctggcatttgaaataccaccacatatgaaaaaccaagccctctttcctgcctgtgttttgaaggtaattaggaatctagttagaaaaaatttgctgtggttgtaagctgcttactcttcattattttgtatacgatggttttcaattagggtaggaattttaattttctgttttattcaatgctagaatgctgaactgaaatttaacttcggtgaagaggaatttaagtttccaccaaaagatggctttgttgctctttccaaggcaccggatggttacattgtcaaatcacagcactcaggtattatacctgcaagggtaaggatttctagaatagtgagaataattgatgagaactccagtaagtaaggcgtctcatagtgagttacatatactttccttgctggtttagtcacacatctttttttaacacagcagtaaaattcatttttaaaacctaattcataaactcttaagtatttggtttcagtgtaggcattttgggatcgcaatcataacggtaatgatatctaatatttatagaatgtgtgcttattcagtgccagggcaccacattaagtgctttacatggtttagtcttcacaacaaccctataaggtagtagttttcccattttacagacaacctaacgaatagggactttaagtgatttgcccaaggtcacagagcaaataagtggtagaactgaattcaaatctaagcagtctgacttccaagtttatactcttatccattgtatatctaatatttaaagtatatttcataacttgtttgtcacaaaacaagtgagtcatttttgtagacatatcaatcaattagaattattccaagtagatttttattgt

SEQ ID NO: 11734 - DNA, 1165 bp, Homo sapiens
ttgcagaaaactacaagtaaaaattcttagttactttgtcctgtagaccgtttagggtgtgtattccagattattagtactgttgcctgttcgaaggaaaaataacttcagctattgaaaaattgttgtcttctctgtagttatatccttctttcttaggaagcatttaagaaggacaagcttttgagagaaggggacagacagtaatacaggatttttggcttacaaaaatgactcattttacttagtttttgtagggacgtgaggaagagatggcatgatttctatgtgacagtgagggaactgaacctcagagaggttaacctgcccaaagtcataactctagttgtcgctacatagagtaaggtgttgaacttatctttggagtctaggctagcacactttgtgtttcatatcagtgtttgtgtgatttattaattattattataaaagttcatctcaatttggggtttcctcttcttaggtgattgtttgctctgccactttgcattctttcgatgtaaagaaactgtccgagaagataatgcattttcctacatgggttgacttaaaaggagaagactctgttccagatactgtacaccatgttgttgtcccagtaaatcccaaaactgacagactctgggaaaggcttggaaagagccacattagagtaagtggtttataatattaacatttatgtagaataaagcaatttataaactaggtcagccttgggctcttagtgatgcttaaggcaatcagttattgtatcaaagaaaagtccaatacatcgtaaacccttagacctttaaaaagcactgaataagtgatggactccatcttttgtttttctgtcttcgtaatattacttttgtgatcagcttccttgatacagtctttataagtaaataacatatatttatctaatttcagatacaatgatttccatttttagtagtattttagtaggagccctcatctgtgtcctcttgatgtactttgttctaaaaatcaatttcatgtggtcatcttgtcactttcttcactgtgattagatttgcctttatatagtaaggttatatttattataaatatacaatattttagaaaccacattttcattattattattacctttaaaagtggtcttagacctatagtt

SEQ ID NO: 11735 - DNA, 1090 bp, Homo sapiens
gttcctgaaaaattgtaagactcaggcctaactagttgtttccgagccaagggtgggtagaggtgttgggacagctgttagtgaggcctaattatttatttatattgaaataattgatttaacattttttaaagtcaaagttctggagataacttgcccagtagtacattttattgctgcaagcaaagtttaaagtgatataattgagccaaagtattgctgacaagttatttcaagcatgtcatttacattactttgttatttgtgtgtgatgcaggtggaagctataaaggccatgtggatattttggcacctactgttcaagagttggctgcccttgaaaaggaggcgcagacatctttcctgcatcttggctaccttcctaaccagctgttcagaaccttctgatttttacatttactgaataagatttgagtaatgaaagtctgtagtcttaaaactctaaaacagttgtactgcttccaagcagcagtatttatagtaacgtaagctattaatgctaactcttgcatgtcaagaaacattagtcttaggaattcttcaaaaaatggcatcccaatgaaaataaatttgatgactatattttcatgaaggtttgtgtcttattttaaagttatattgatatattttttctatttcttttttaagaacagtatgggcttatgaagtagaatttatgggtatgtgaatctggcagaggacttacgtggaaccactcgggaatattctaaaagtaggttttcagatggctaaggttgtctatgtgtatattgaagctagaggagagttggaacatgaagggaaattcgatgatcccaatgtagaagaactgcttggttagtttggaagcatggaagttttgagggagtcagtaaaggttctgtatctaaggactgatgactgatgtgatggtgccagtgaagatgtatcttctttttatgaaccttgctttccagatgatgcatacccatcaaagtagaactaatctgctgtccctacaggtcttaaaatcaaacttaaactcagggttttttttgttggttatttttttgtttgtttgtttgtttgt

SEQ ID NO: 11736 - DNA, 1424 bp, Homo sapiens
ctccaggccgaggagcaccagcttttgctggaaaaggaaaaattgcaggcaagacagcagcagttgctaaagaaaattgaacacgctcggacttgctagacgcttctcaaaactggacagtcactgccactttgcacattttgattttttttttaaacaaacattgtgttgacattaagaatgttggtttactttcaaatcggtcccctgtcgagttcggctctgggtgggcagtaggaccaccagtgtggggttctgctgggaccttggagagcctgcatcccaggatgctgggtggccctgcagcctcctccacctcacctccatgacagcgctaaacgttggtgacggttgggagcctctggggctgttgaagtcaccttgtgtgttccaagtttccaaacaacagaaagtcattccttctttttaaaatggtgcttaagttccagcagatgccacataaggggtttgccatttgatacccctggggaacatttctgtaaataccattgacacatccgccttttgtatacatcctgggtaatgagaggtggcttttgcggccagtattagactggaagttcatacctaagtactgtaataatacctcaatgtttgaggagcatgttttgtatacaaatatattgttaatctctgttatgtactgtactaattcttacactgcctgtatactttagtatgacgctgatacataactaaatttgatacttatattttcgtatgaaaatgagttgtgaaagttttgagtagatattactttatcactttttgaactaagaaacttttgtaaagaaatttactatatatatatgcctttttcctagcctgtttcttcctgttaatgtatttgttcatgtttggtgcatagaactgggtaaatgcaaagttctgtgtttaatttcttcaaaatgtatatatttagtgctgcatcttatagcactttgaaatacctcatgtttatgaaaataaatagcttaaaattaaatgatgcaactcaaccttttccttaatggcattacactctgtcccttaaggagcaaccataaataatccataacctatagagggaatttggtttccgtaaatagccctttttgcacctgtacaatcctggttggggggcatgagtcattgtccccacttaaggtggagggaactgagtttggggaaattaaggcagttctccaagattatgcagaatagagatgttattagcgactattgtgtgcattgtagcaatggcatttgataatttacagagcacttctgtatactgtggctccttagtggaattaagctgagacctcagatcagtccctttaaaagaaaagtaaaaatagccacagggttgtttaactcgcttgtattgggctttggtagtattcgtcccattggcagacagt

SEQ ID NO: 11737 - DNA, 1143 bp, Homo sapiens
cagaagatgtatatgtttacataatttaatacagattgatgttaatacttgtgtatttacataaccgtttccttcttgtcactgaaatatatggaccttaatttgtatcctgactgactcaacccagcagagcataaattgacttgagagccttacctttgatgtctgaaatgaaacccccttctccaaaggcaaaattcggagactttgatctttgctactggagtcctttaacaacatctataacgataaaaaattcctaattgtttgtggtagtattttaattctagatgtgttatctctctgggaagtatagtttatagaaacacaaaatatttgatttcctgtgtcggctcagctacaagaaacacaactgttatcttgacagaggaagagaggaatccaagaaaaatgcatgtggagaattaaacccaagtgtttcgaattcagcacaccccctctctgtcctcagactgcagtccacacgtgcaacttttctgtttgcacgtgttttattaatcagcatactccttttctgtttggatttatatccctctaatgttctcctttaatttcacatgaaaaaaaaatctcctgtatttttttcagttagtgggagagcagcagaaatagatagatgtgctgttgccactggactgatgaaggtggctgtcttggaactgggagacaggtcctcagaggtgcactcaggcaacaggacagccatctctctgcttcagccctctgcctacagggattagggaaatggagctctggctttgaagttatttgtgagtttagcaaccttccagttacctgcagagttctgggtgcacagccacccctcataagagccctgttctctgaagaccattcatatgagaacaaaggtctaggatactgcattagttaccagaaaactaggggaatttagagggaaaaaaaatccatgttttctatttcccaggtttttaaaaagtagctcttccccaaccccgttgctagcttgttgcaatataaaagccctggtgcacctgaatttactcctggccttactaatgattcataatgtgatcttgagaaatgtgtttaagctttctgagtcttaacctccttgtctctaaaatgggcaattaaaacaat

SEQ ID NO: 11738 - DNA, 1161 bp, Homo sapiens
attaggtgaaaatgcttataaatatattttgttagtaaagtattgcatttaagtattgtagtaatatctcttttaaatgatacatacctttataccaggatccatttcaaaggatgaggcttttttttttcgcatcccattaaggactttgaaaatcgtttgattttcagaaccccattggaaggctagaatagtataaactgaacatagaaaagccaccgttgatttacattagagtgggacaatttttttcacaggatttggtggattttctctccattgtatcctatgggtataggggatttcccattcagttaaaatattatttaaactgctttatataaaagtatgttaaatcatttataaactatgattaaatgatctgtaaagtcatttaaactgctttatataaaaatataagtcatttatatgctataattaaagaggaggatgttaatatttcaaaataagtatttatgagcccttctgtaattttctctcacttttaggagcttgcattcatcttcgggacccagaacttgctttggctattgaatcttgcttaaaagggcttctgcaggcctattgttgccataatcatgctgatgaaagggtccttcaggcactcatgaaaaggttttatttaccagggacctcacggccaccgataatagtttctgagtttcggaatgagatatatgatgtaagacacaggtaaggcattagtaattgaatatgtttctggctttgcttaatcatatgcaagattggaaagagttaaaacacttttaatgttaatcatatctttaccactgatttgtaaaatttcatcaagccactttaatttctgtctaggtattagttctgggcattagagaaacatagataaatactccctaccattgaagttcttatatgtgggagacattacagggaaacagatgtagtatggcttagaaattacaccagtgaggaaaatgatatgaccaatttaagagggaggggcctgaggaagaacattggcacccattacacacagttaaattctgaaggtgtttcacagaatccgtgaagagcagtaattgtgttctttgatgaccttaacaagtcttttcaagggagctcagtacccaaactggcttctttgctaactactggcta

SEQ ID NO: 11739 - DNA, 1590 bp, Homo sapiens
gacatgatataagttcatgatcttctgactacaaactgattctgatgaaagtcaggatccaggagctagcgtcttattgggtgtttcctattgcatggtttaacccaactcctcaacacctgaagtgtaattggcactggcacttcatcggtcacactggaatgagggcagagcaatggcacccactgcctgcctgtctaggaatccttgtccagaagcaggactctctctccccacctccctctctccaccctccccttcgctagcaatcttggtaaaattccaggttattgaggcatctacttgggaacattttagctaacagtttcttcagctcttctttatggttttgtataaccctatttagggcataaagtctgaaagctgaattatctcacaaaggattttaaaggagaattaaatctgatacaattttttttctctctttagtacgttttgccaacctatgaaatggccgtgaaaatgcctgaaaaagaaccaccacctccttacttacctgcctgaagaaattctgcctttgacaataaatcctataccagctttttgtttgtttatgttacagaatgctgcaattcagggctcttcaaacttgtttgatataaaatatgttgtcttttgtttaagcatttattttcaaacactaaggagctttttgacatctgttaaacgtctttttgtttttttgttaagtcttttacattttaatagtttttgaagacaatctaggttaagcaagagcaaagtgccattgtttgcctttaattggggggtgggaagggaaagagggtacttgccacatagtttcctttttaactgcactttctttatataatcgtttgcattttgttacttgctaccctgagtactttcaggaagactgacttaaatattcggggtgagtaagtagttgggtataagatctgaacttttcatctgcagaggcaagaaaaatatttgacattgtgacttgactgtggaagatgatggttgcatgtttctagtttgtatatgtttccatctttgtgataagatgatttaataaatctctttaaatacttagggttgtcattgtttttaatccgttacttttttttaagataaaccctgacattttccattacagtgtattcagagtgccagtgtttattttttttttaactttgagaatacagttggcccttcgtatccatgggttctgtatccatgggttctatatccatggagttaatcgactgtggattgaaaatatttggggggaaaaatggatagttggatctgtactgaacatgtacagactttttattcttgtcgttgttctctaaaaaatacactataacaatttatgtagcattcacattatattagatattataagtaatctagagatcattttaaaaatatgggaggatatgcatgggtcatatgcaaatactataccattttattataagggacttgagcaactgtggatttgggtatctggagggagaacctgcaaccagtcccccatagataccaagggacaactgcacaatgatgcacagttaattagaaatcattttcttaatc

SEQ ID NO: 11740 - DNA, 1729 bp, Homo sapiens
ctgtggggtcagggtggggctgaccacagccaaggccactgctttggggagggtctgcagcagagcccaaggagccgctgagctgagctggccccgtctacctgccctaggggtcattgccggaggcctcgtggggctcatctttgctgtgtgcctggtgggtttcatgctgtaccgcatgaagaagaaggacgaaggcagctactccttggaggagccgaaacaagccaacggcggggcctaccagaagcccaccaaacaggaggaattctatgcctgacgcgggagccatgcgccccctccgccctgccactcactaggcccccacttgcctcttccttgaagaactgcaggccctggcctcccctgccaccaggccacctccccagcattccagcccctctggtcgctcctgcccacggagtcgtggggtgtgctgggagctccactctgcttctctgacttctgcctggagacttagggcaccaggggtttctcgcataggacctttccaccacagccagcacctggcatcgcaccattctgactcggtttctccaaactgaagcagcctctccccaggtccagctctggaggggagggggatccgactgctttggacctaaatggcctcatgtggctggaagatcctgcgggtggggcttggggctcacacacctgtagcacttactggtaggaccaagcatcttgggggggtggccgctgagtggcaggggacaggagtccactttgtttcgtggggaggtctaatctagatatcgacttgtttttgcacatgtttcctctagttctttgttcatagcccagtagaccttgttacttctgaggtaagttaagtaagttgattcggtatccccccatcttgcttccctaatctatggtcgggagacagcatcagggttaagaagactttttttttttttttttaaactaggagaaccaaatctggaagccaaaatgtaggcttagtttgtgtgttgtctcttgagtttgtcgctcatgtgtgcaacagggtatggactatctgtctggtggccccgtttctggtggtctgttggcaggctggccagtccaggctgccgtggggccgccgcctctttcaagcagtcgtgcctgtgtccatgcgctcagggccatgctgaggcctgggccgctgccacgttggagaagcccgtgtgagaagtgaatgctgggactcagccttcagacagagaggactgtagggagggcggcaggggcctggagatcctcctgcagaccacgcccgtcctgcctgtggcgccgtctccaggggctgcttcctcctggaaattgacgaggggtgtcttgggcagagctggctctgagcgcctccatccaaggccaggttctccgttagctcctgtggccccaccctgggccctgggctggaatcaggaatattttccaaagagtgatagtcttttgcttttggcaaaactctacttaatccaatgggtttttccctgtacagtagattttccaaatgtaataaactttaatataaagtagtcctgtgaatgccactgccttcgcttcttgcctctgtgctgtgtgtgacgtgaccggacttttctgcaaacaccaacatgttgggaaacttggctcgaatctctgtgccttcgtctttcccatggggagggattctggttccagggtccctctgtgtatttgcttttttgttttggct

SEQ ID NO: 11741 - DNA, 2844 bp, Homo sapiens
acaaccccatagcacaacaggtttatagagatgtatatagaattatagtccttatttttttcctttgcgtgaaaccttttataacagattaacaatcaactgcataaatattattaatattttaaaaagagttaagttgtattttgataattcacaaactatcatgcaaataacgagtaagtagacaagaataaagtggtttgagatgaaaagaacctaacattatttacagtagatgtggttttaatacaattactgccctaaaatgtctctggcaatgtacagaaatattgtatatacttacatatgtaattgttgtaagagttaaatacaaaatcatggtgacacttccaattaagtgcactaaatgaaaagttaagtcacttattaacttttcagtttggtttgcaatgagaaagagtggaaatttgtattttgttttgcttatagaattacagacatgttgaggaagtgttgagctttattttgctttttcatagaggcagaaagtaggaaccagatagagatgaaaaggggccactgaaaagtgaatttgatagctcagcatttaagcatgattacatattcagatagctctttttgctttctataaatatatgcattgtgtgtgtagtaatagatgtaagtttacactttgaaaggaaatcttgtttcaatgtttattataaaagccttgctaatttagtagtgatgctttccttggttgtacaggtgtacatttgtaaaccttcatgctgtaaatggaatttgttttatctctttgggatacatttgcattttagtgtacatttacgtccctgccctctttgacctggcaatatagtgttgtataatgtaaatttatttctccaaatcgagagtgattttttaaaaattttttatctttatatggtttcagaagtatgaaccagctttctttttattattgtgagatcattttgttttataacatagttgttgactgttaatatggacctgctagaatttggatcactttcaattgaagtcagggtattgtgcataatagaaagtattggactgagatatttggttaccatggaggccaatgcttttttcatcttattaaatgtgatgtgacttttttctttgtacagaagagtactgtatttttgaatagcctactcccaagtaagagcaaatctgtatgataacattttttcctctggacataagacataacagtaacacgatgtacatttacaagcggccttatgtacatttcccaacaatctttttaaggcaaaattgtgaccatatgtgtataattaaaatcgtttttaatcctttgcctatgaaaatattttggaaaaaaacttgctgtgtatattcagtttctgaaagataaagaaagtgctttgtattttgttgaagtcagtattttgtataaacatttatgttgacccacttatgttcagtgctgaaaactaaaatgaacatgctattctgtcagctgaatatggaagagatctttttttactagagatctgcagaagaaacgcaatcttctgagcacaatatggaatctaaaggttttatcacttagttgttcatattatgaacctaaaaataatggcataaagtttggggatgccaggcatactttttcatgtttggtgttgagttattttacttttctaacccaacattccttggtgagaccattaaatccaaacacttgtcaccgttccttctcatagtcactctgggtcatcagcatgtcccagtcactgcagcaacgccttgtgtttgtttcatttttttaaaacccacacaaagccgctgtctcactttttcctactttaccaacctcagagtatttcggcccgtatcgaacttttgttctcagtatcagcccatggtttcaggatcaaagctgtcatgttggagattggtaatggctttcctgtctttgtacagttgaattcctagtcttccttcatccttgccctctgttggcacaggcattatctctgcaattttagaaaatgacaagtagagaatactacattgagaaactaaaccctcttcttggggtcctgatactcattcccatttgtcccagtgctgacaacccaatcttcccaatactttcaggcctgctctacaaaagtacctgttcttgtagaaattttacagtctgccattttgggtgcccaccccaatttttaccttttagtaagttggcatgaaattttggtaaaatctgaaaatcacatttcagaataaaacaattgggcaaaactacctaggctttactcttgagtgtctccttttgatagggattgtttctggaccagtttgtctaagtcctggctcttattggttcatatgaaataatgttaacttcacttctttgtatattatgtataaattagaaaatgaaaaatgtgtgaataacattgtatgaaataaacctggtcttgtgtttttctctagataaaatacccctctgtacctcagttataacttaagattgattgcccattcaggtttactccgacgtaaagaaaacaaacatttttaacacatgggtgctgttctggagccactgattcctctgatggtattaattccatgctttgattagtatttaggacctataactgcatacttcataggataaaacttttagcccgttttcacatgaactcgaggaggcagtgttgtctaaaggtaaacaatttaagttcagatgtggatttaaagtttaccttatttacacaccttgtgaacttttctaaaccttgagcccttagtctgtatcaagggataatactacttaactcattagttttaacagtg

SEQ ID NO: 11742 - DNA, 1124 bp, Homo sapiens
aattgtatattcctgcctcactgaatccctagctcataatgtgactttataagattgagtgaaaaactactatttaccagtagcagttctggctctcacatttattttatgccagtctcatgctaatacatactgtgcagtcatttctttttgaatttatatttttattttctataacatacctcgagacagtacagttatgtcataatcggtattacatttaattctcacagcaattctgcaaaacagctgtttcttaaatgaaaactaatttagagttagcggtacatgcccaaggtcacttagtaaaaatttgaaccattatgcacactctgctccccacccccacaccaccccagattcagagtagaaatgtttttatctaatgaaaaaaatcatactttacattgttgtttattatttctccccttttaaaatatagctggtgtattctcagcaggccttgctccagctgcatttgtgccaaatccatacattattagtgctgctcctccagggaccgatccgtatactgcagcaggattggctgcagcagctacattagcaggtaacatactatttgttcatctttattatggttgctttttaatgtatttagttttgggtgtaagctttatttttctctatttgggcaatttgaaattcctaagaaaaactgaaacattatccagaatgaactaaagtttccaggaagttagtactatttttcaactgtaatgctacagggaaaagcttaagcaataacttttcctcgtatacgtaattggcttacatttcagctttatagttttagaaatctatatagtcaaccatgaatctccattttaatgacaaaccccattacccgcagagacaatgcaaagtaaaattacttctcagaaaataaaatagaggtaggtggcctgcatacataggtcaggggtagaatagagtaagataaacagatacagtaattctgagaaaatatgtatctaaaatttcttgagcaatgctaaaatgtacaaacaaggtgggggacaaaaagtttggatcaagttggaaagaacgtactaaaaactgcccagcctgagactaccacccagaatctgaaataaaagccaaag

SEQ ID NO: 11743 - DNA, 1221 bp, Homo sapiens
ttggttacgttacttttatttttaattcaatttgtttttctgtgcccttcctatagctaagagaaattttgtaactattattgctattcttctgcttagccacttgaaaaacgtgaaatgatagaaccattggaaatatgtataatctgaaccatgttacaaaagtcaaatcatactaatttttaaacataatctgtaaaattaaaattgcttattcctggtagtgcttgatctgaaagtaactaaacaaaatcgtctacgcattaaagaaaattttaatctagtttgtggtgttaactgcttttccagcaccgctatagttaaggttgccttagcccttctgttataaatcactagtttgtacgcaattttttggcctttgataaattaattgactacgaaattaaataagattcaatgcttttattgtttacatgcactgtagtgtagtgttaggtcaccttatggtgccttttttttgtgttctattaaatattcagaatcaaacagattctttttcctcagggcactagagatgctgaaacagatggacctgagaaaggagatcaaaaaggcaaggcttctccatttgaggaggaccaaaacagagatcttaaacaaggagatgatgatgattctaaaataaatggcagaggtttgccaaatggaatggatgccgattgcaaagattttaagtaagattttaactttctcaagaagaaaagcgtatctttttagggattattactattagttgatgtgactgatttagacattttcatcatttaggtttatttcctttgaactttgtgttaatctggacaaattttagttttttactataaagaaaatttgtgattatgaaccattttaaaaaaataatcttcaaaccagcctctgaaacagtgcattctgttgaaggagtaatgttagaagctgtgcttacttttctggtaatataatagtctaaatttgaactttttcctctctgttaaattttagtgaactgtaggtttactctgatttttttttttcccctcttgggagtgcttttgagcacctttcagtggagttttcttccttctgagtatatatgccctgcctcccatttaacttttaagaggagacaaaattagcttaggagcagtaatctttcttaaaatatatgagtttgtgctaatacttaagattattcctgcaaatagcaaatagggaacatat

SEQ ID NO: 11744 - DNA, 1134 bp, Homo sapiens
cgtgcgccagggcagggcccgtgccttagacttctcccgacccccagagcgctggtacacaggtctaggcaccacacagtgctttggaaattctcagtgaatgatgtttaataaagcaaaaaatgtcaaggtgtctttcttggatataattcttcatgttcagagctagttttttgttttgttttgttttgttttttaatgaaacagtagttttaaaggaaatgcaaccactattgctccttggccctgtcctgcctggcagaagcattgagcgggtgggactaggacctcagacccttttctgatagacaccaaagccagccctgagggagcccccggctgatggtgcgggtggtttgcagccatcagtgttgagtgtctcagctcctggcccgtgccaggacctgtctgctctgtcctgcatctgatcacgtccctctccagctgtggcgccctgtcctgagcagcttcccctccaccagtgctagagtgagaggaaacaggtggttttggggtcgagagctgactccctcctcctccgtcttaacccaggctcagagggtcagctccctccccagggctctgagccagctctgggacagctccagcaccggctccacccatttgccttcccccttcacacccgcccctccttcccagcactcagccccgggccctgcatcccttgctgactgcagcggaaggtctcagtaggagtggggaggggatggggccaggtcttcctccgagaggtggctccagctctcctctgggctttgtcccctccctgccctttctgcaccctgatgctggctccctgcctcctgctccccacctgctttgggtcaagtgacataggagcagagggcacagcggggtaggtggccacaggggctggtgctctgcttggggtcactggcagaacctggcctgcccgttgtgtattcatccactgtggacgccacctcctcagtggtctggactctctggacaccatcacaaagacccccagatattgatgctccagtatctgtggcttgttcttcacccacaggactgcgactcatggccaatcaatgatccttgtcgcctgataaagcctgtgcctgtgacccattccagcctgtgttagtg

SEQ ID NO: 11745 - DNA, 1161 bp, Homo sapiens
agcactttgggaggtcgaggcgggcagatcacgaggtcaggagatcgagaccatcctgactaacgtggtgaaaccctgtctctactaaaaaatacaacaaaattagccgggcgtggtggtgtgcgcctgtagtcccagctactcaggaggctgaggcaggagaatggtgtgaatctgggagacggagcttgtagtgagccgagatcgtgccactgcacttcagcctgggtgacagagcgagactccgtctcaaaaaaaaaaaaaaaaaaaatacactttggtttgtgtataagtatgtatggaagaataaacaaactgaaaacagtagttgcttactggaggagacatggttgttggaaactgggtggtaagatttcctcgttgctatatactccttcatacctgctgcatgttgtaccatttgcttttattacctattaagaaaatataataaattttaaaaatgaaaacaaatacaataaatattatttgttttcttcttactaggcatatttgatgagaccttctataatattttttgatgaaatagatggattagctccagttcgctctagcagacaagatcagatccacaggtaatttttctttatctgattatcttgatttcttttttacgcattgacttggtagttagccttagcccttagctaagtgctatgaggcttacaaagaaatttaaaacaatctgtgtctgtgaggactacttctttctcttagtacaggggtcagcacaccacagcctgtgagccaaatccaggcctctgtgtgtttttgtaaatgaagttatattggaatacaaccatgttcattccttaagcattgcatgtggtttcttatgtgctacaatagtagagttcagcagctgtgatagagagaccgaatgcgttgcaaagtttaaaacatttactatgtgggcttttaattttttttttttttaatttattttagagacgagttcttgctctcttgcctaggctggttttcaactcctggcctcaaaccatcctccccagtcagcctcccaaagtgccgagattacaggcgtgagccactgtgtccagcctatctgaccttttacagaaaaagttttctcatcctaatttagcataattttttggtttttttttttagagtcagagt

SEQ ID NO: 11746 - DNA, 1498 bp, Homo sapiens
acttgagaggcagaggttgcaatgagctgagattgtgccactgcactccagcctaggcaacagagtgagagtctatctcaaaaaaacaaaaacaaaaacaaaaacaaaacaaaacaaagacaacgtagagccagtcagggtggcaagagcacctgtagtccccacaactcacgaggctgttctgtgtagtagctgtgttcttagtattcctgatgtgacagtcagcttgacctatggatattttagttaagataaaaacgaagaacaaaattacctaattcaagaaattacaggcttatccggtatatctatccatgtttatttcctctgatggtttcaggttgatttcaaaatacttaactaaaaacgtatttcaatttactgtttttaaaagacagttaccagtttaaaagacagttctgtaagtcaactatcaatgctcaggtaaatgtatatcttaattaagtttaacttacctctccagggggaacacacctgaaactagaggaacagcttatgtggtctatgaggacatctttgatgccaagaatgcatgtgatcacctatcgggattcaatgtttgtaacagataccttgtggttttgtactataatgccaacagggtaagtatagcaaagttctcattgtgtagtgatctcatttgagaattagtgtagaactggccgggcgcggtggctcatgcctgtaatcccagcattttgggaggccgaggtgggcggatcacgaggtcaggagatcgagaccatcctggctaacacggtgaaaccccgtctgtactaaaaatacaaaaaattagccgggcgtggtggcgggcgcctgtagtcccagctactcgggaggctgaggcaggagaatggcgtgaaccccagggggtggagcctgcagtgagccaagatcacgccactgcactccagcctgggcaacagagagactccgtctcaagagaattagtgtagaactgtactgtgatgatatatgtctactatgactttcttttttggctaatgctattgatgaaattcatttggctgtagattggtaatttaattttggtgcttaccacatttccaggcatttcagaagatggacacaaagaagaaggaggaacagttgaagcttctcaaggagaaatatggcatcaacacagatccaccaaaataaatgttttctacattttcatttggactaaatcccacgaatgacaactaccacctttttttcctttttaattaatactaaatattgtgatttcttatttgaggttcaaaatgacctgcttgaaactttgatacatattggaatacattatgttaataaacttgtagctttttgtgaaacacctcagtcttttctcttgaactttcccttcctgtttgataccaggaaaaaacagttgaagcttatcaagaattgtaggtgctcctagggattctgagtttcttgagaacaggatctctttacattcttaatgcctcca

SEQ ID NO: 11747 - DNA, 1319 bp, Homo sapiens
acttcttccggatgtagctctttaatgattttataaagaagaaagacttctgactctcctgtgtttattcaccagatttcctgggtcgtactgaaattccagtggcaaaaattcgaacagaacaggaaagcaaaggccctatgacccgccgactgctgctgcatgaggtccccaccggggaggtctgggtccgttttgacctgcagctttttgagcaaaaaactctcctgtaggggttctaaaggacagcaccagcgggacagcccacaaggctggggctggagaatgagagactgcgctctcttggggctgagggagcaccatgcagcttcacccctcacaaagccatgcacgctgggggctctgttttcctgcacactaaatagctagcaatctatgcaaacacctttcccataaagaaaccaaaccccatagtacagtgccttgtcctagtgttcacatgttcagctctgtttgtttagatgccaaggtttccattttcagggctataaaaagtattacttggaaatgaggcatcagaccaccagatgttaccgctcggttgaatgtgtccaccgtggagtggtttggtgacgctgtaaccattccacgccagtgacctctgctgggtcacagccactcaggaggggaagggtcaggatgagaggctgcagcctcgacacttggcgcggcctgatactgaaatagcgtctactcgtgcactgaataaaaacagaaacttgatcattttattcctgattagattttatcactctctgctaagacaatatagtctggagtataagtgggaaagcttgatttaaatactgtgaactctaataatgtggaaaatatttttcaactttaattttctgaagtataaattatttatgtaaattcattgtttttgcatatttcttaggacatgcatctttaagctttatcattgcccatatgtacagaaagagaataaagacatatgtttatggatggaacttcgtcaaagtctgactgatttactttctatatgaaagctgctttttttctttttaattttctcagccagatgaaaggctcttaaaaggtaccttcacaagttgcctataatgaaaccaagtttccttcctggtacgtgggaaaaccaaggacagagtgaggatgaggtcaggagacccagggcctcatcttgactctgccactaatttgctctgtgactttggtgaatctacctcgtgtttctggggctgggtttctttaatgggtgaaatggatgatctctgtgggagctactgaccctccttcagcttgcctcatcgagt

SEQ ID NO: 11748 - DNA, 1129 bp, Homo sapiens
ctgtgttcatggcacagatcactcacctgctcagtggagccgcaatggtctttgtaaagcaccccccaccccaccctgccccaccgtggccttcagaccagagctcccacattcttctccagcctccacatgaatgccaggccccaacctccctgctgcatctccagctgtgccaggccagcctgtggcctccaccccacagggggcctgtgctctgagccagctgcatctccaccttcctccccgccggccccctgcatctccaccttccttcccgccgggcccccccatgcagcctgccctcctgcctgggcctcccaccagcttcctggctgctatagttgcagctctttatgtgtttttttattcaggtttcccccattttgttatatactcctaaaaggtatgtttaaaacagcttttgctaatttagtgttattttaatggtactttaaaagcttgctgttgaaaaatcaatgattgatcatttcataacgcatatgatctcttaattggccaaagatgtcaatccggtttttctgcctgagttttgcttcccatcagcatctgcatatgttgctgtgcatcgtccgtgcgttcagtccttcccacatttgtcaattactttgtgccaggctctgtgctaggcttaactgagcctggactttggtatctgatgtttaaatgttgaccctgccatttagcagctctgagtggatcacactccagtcctttctaagcctcagtgtttctcatcagtaaaatggggagctacattatcaggtaattatgcagtttaaataatataatttacataagtctagcacatgcctaacacaaagtaagtatccagtaaatgttagctgctattaagtgctgcacaaataccatgtattattttattaatattactatttgctaggcaattgaggggttaatataaggatgatcgaaacagtccatgctctaccctggctcctgtctggcagaggagacagacattacacacgatttcagacccagcaggctgtgggctgctcataagcgagggatactggatgcagaggagggaagggatctgggaggtagatgtgggatcagacctgcatcttgaaggatgagtaggatg

SEQ ID NO: 11749 - DNA, 1101 bp, Homo sapiens
ctctaatacctgttcttcaaccatattggctactttgacataagaatttacttcttttcctggaatggaaaacactttaaaaaataataacaaacattattataaactaatatatgtgagagtacttagttgatacaaaaaggagttttagtagacagtattatactatatttgaaaatcaaggagaattttatgcaacttaaaatgtttacaaactgcagtgcaatctactgtttgtgaatgtcaaagtatcaggaaaagtgtatatacaatcacagagtcatatttcctcacaaagttatttacaaagagtgaaatatgtttttgtacctctcagtttcagttagaggcatattttgtgcaatatttatgttaatgtgcctatacattatgaatgaattatttcagtcatacattgcctaaatcataactttatgatgcttgggaaagaatcaacagttaaaacttcataaagttataatgtctgtgttccaaaatacatcacattattaggatgtagggagataagtatgtgtgctccctagggtggcaatttctagttactagaccacctctatttttagcatttggcatcctcatgatacttttataaatatgacattaataggaaagcaataatttcattttacagatagaataacagatttgcctgcattcactgaaagagtgcaaagactgggtccttgtgaattcaactgactctcccaaattgtattaattacctgttcttgccttttattttctgaacttgctgcttttgcattcttttgagttcaaagacagttactttaaatccatttttaaaccctcggggtagaaatcataccactgttaatcagccacattatttggtctaaggttttttctttataattctgaaactgagtttatctaatacattgatgaattatttcaaacgtatttttatagttcaaatcacttcacttttacactgataaatataaattactgggaatgaccttcagacagcgtttagcatctgtaaccaacctgaaaataatatgttcatcaggtacctatggattaaatcatatactggcgtatttaagctgaatgtca

SEQ ID NO: 11750 - DNA, 1113 bp, Homo sapiens
aaggaacaaaacactccttcctttgagagaggagggaaagaaagaagaatgaatagaatagaataggaggaagttaagagaaaagcagagaaacagagggagccaagcatgccaatttccttccctagtggagtaaacagaattacattgcaagctggaagagaaaaaagatttacagtaacattcctttttcatttgttccatgatatgtatttcatggatgtgtgaatacatttcttgagtacacattatttaccttctctaccagtgatgtgatgaggtttctttgaatggtgggttttcagtctgtcttaacagaaggctagtcacatagttgtctatcatgtataatttaaagtcagttagtagactaaggttatcttaagtcaccacgacacaaaactggtctgctgtttgaacagtaagtatgttatatacacagaaacagaaatcatagttaccattgccttttaaaaatttttggtggttttgtattcatagggacaagtggtagaaaacttaaaagcacaggccctttgttcctggactgcaaagaaagataaccacttgaacttctcaaaacatgacattattactgtcttggagcagcaagaaaattggtggtttggggaggtgcatggaggaagaggatggtttcccaaatcttatgtcaagatcattcctgggagtgaagtaaaacgggaagagtaagcatctttatgtgttttcatgagatgtggatgttggtattttcactaatgagtcagccatggtctgattgagtgtataataaaataacaattttatacttgagtttgaatatcagaaaggtaattctggccggccgtggtggctcacacctgtaatcccagcattttgggaagccaaggcaggcagatcacttgagcccaggggtttgagaccagcctgggtgacgtggtgaaaccctgtctctacaaaaaatacaaaaattagccgggcatggtggtacatgcctgtagtcccagctacttgggaggctaaggcaggagaatctcttgagcccaggaggcagaggttgcagtgagccaagatgacgccattgcactctagcctgggtgacagagtgatacc

SEQ ID NO: 11751 - DNA, 1217 bp, Homo sapiens
aacataatcataatattataaacattaaataaatttaaataaagattaagctataacagtattggtagagtaagaggctacagtgaaagagaggtcaatcttcatttcccatagccaaaagccagtaatgtctaaaattgaaaaaattcaagaaaaagcagtataaatatgttattcagaaatataaatggtgatatagaagaaaccaggaagaatggcaggtcaggagtgaaaatcagggcataaggagccatgagataggggaggattgttttccctcattagccatatataatgaatgctatttgtctttgtaaaatattttcatgtaacttggataaaattaaaattaaaaagacaacttgccagtcactggaaatagtagctgttaatttgtagaaaatgccttagctgtttagttagatgggcttaattctgaaaatgagaatactatacaatagttttcatctctttccattgtaaatgtgtgaatttctaagcactgttaatccttctttttatttccgtaggttgatgaaaaaaccgtaggagaacctggttggctttatggtagttttcaaggaaattttggctggtttccatgcaattatgtagaaaaaatgccatcaagtgaaaatgaaaaagctgtatctccaaagaaggccttacttcctcctacagtttctttatctgctacctcaacttcctctgagtaagtttttagctaacagtaaagtttatatagatctgcaaatgtgtaaatacctaatatataatggtgtcagcctactacttcatcatagtgtaatccgggttgtactcttcaagactactttttgttccagatttaatactgaaatttagtaagtgaaaacatgggtcagtagtttgttaataattatttcttttcccacaaattgtgtgtaagcacagtgtatataatatgtaagttgataaattggtagtacttcattaagttctaaacaaataaatatacttatatcaaagtgttatatttgcagaccactttcttcaaatcaaccagcatcagtgactgattatcaaaatgtatctttttcaaacctaactgtaaatacatcatggcagaaaaaatcagccttcactcgaactgtgtcccctggatctgtatcacctattcatggacaggtatgttgtctgttatttttgtgggctttattctttgaatttgctcctga

SEQ ID NO: 11752 - DNA, 1170 bp, Homo sapiens
tttgctgtgaatatttccctgttcttgggagcactaagaataaatggaaagctactttaactatagtttctattaattgagtattaactgtggaccagagtgtacaatggctttatatccatcacctcatttaatgtagcatgatgctcattgtatagatgaaaagcctgaggattcgattggtgaagcatctttcctaaagtagaatttcacttcaggtcctagtccttttgaatgcagaaccaaggcttacaaccatttcctctgatgctctttccagcatataatctgggaagtggaaataacaactgaatgttttctcttgtactggtctgcattgtgtatacatccttcgtattggtctagttacatcaatctgaccaaacagtaaatgacatgctggtaatgacatacgaacttctgcaaaatgtaaactgtctgatgtttgtttttcagattcaggggtcagtttacttcataaaaaatcattagaaaaggaagaattatgccaaagacttaaagaacagttagatgctcttgaaaaagaaactgcatctaagctgtcagaaatggattcttttaacaatcaactaaaggtatttatttttgatactatttatttttaggtaactgccttcttaccttcattattttgatttaatagaataaatagctaaagctattatatgtattacattttcataatttattttataatttcaactatacaagaatttcaagattgtttttaatgttctagttatatgacatagtgtcatataactaaacatatactttatcacagtttccaatttttgatgactatgtgctgtttgtcttggcatctatacatttccagaacaattgcctttgtcagtattacagaactgatctcagccagcgttatcctaggcaattttcaaaaatgagaaatatggaaaatttgaaatagtttaggtgttagtggctcttttaacacagtttttattttgtttccttgtgaagtgtaatttaattaacctttgttaaataatgcaataatcagtgaaatctagaacagaatctggcactataaactttgcacaaaaagcaagttaatgattcattgtttgccgcagtggcagagcagatgtccaaaacatagactgtctgcatatcattcaccacagt

SEQ ID NO: 11753 - DNA, 1669 bp, Homo sapiens
tgtcatgtgtctcgaaatcagcagccctccccatcccaatcccaggcagcttgtgtgtacaatcagcttctctagcaactctgtatctgttggcttcaagagaatattttgcctccacatatgtaccccttctcctttttttaaagatggatttaaaccaagatgcctccaggaaagaggacgaaatgagtatattcacagaggaatccaaaaaatacagtttgggggaaaatgcaataatttttgatgagatgggtgaaggacaagaagtgagttgtgtcaattattgtagatacaattttctgattaaatctggaaaaataaaaggcagcctgttttttctgcttttattgtattaacagctgaggtagctaaagttatttaaaataaaattaaatttatgatccaagtagcttatttttccctttaaatctcattgtaaatatatttgatttcttgtagaaattgatttccttctgtttaattttatgcttttattatactcttgatttttctaaatttgtgtgtgaaatataacattgattgaattgcagttacatttggttagtaatatttcattattttaataactgtgatgtcatgtatggatttactttggggttcaaatcaaaatgtcactgccagaaagagctgttccagctgatctagagcatactgccctagagtgtccctgggatcatctgaacagaagtgcacaggctacttgtacagagaaaaaattaatactcaaaggaaatcttcattttttagattgactttgggaatttgaattttcatcagtgcaaatataaatttctctatcctgctctgaggctaattggtaccatattttccctttgtgtcttgtgactctgccacatcccatctcatcctggcctctgagtcaagaacccagtgaactgactttctagttctagaagttccgctgcaaggccaggaaagcttgagaaaggtattgtggaagaagcaaaggtagacccccatcactcacctttgtctgcatccctgggcctgtgaatgatgacagcacctgacattctgcaccagctacctctgcctccatggcagagaaaaggccataagaacagtggaagaggagcatggactcagacttcaaggaagaagccatttccccaggtccttccttctgcatctcaccacccctagttacaaataactccattgaacagcatctattcagaaactatgccgaataaaaagattggtggaagggctcatgtggttagcaactatgaaacagaaataggacactcagttacaaacattatctcctttagtttttcagaaaatgcatccctgatttcattcatttccagcttgaaagccagccatattactctagtccctaccaaactgctctagaaggtcatttccattttgtttgtgatatttagacgcgcagacttcaggaagttcacctttaacttcagcattccagatgaagtttcctgactcagtgcttttgcataaggaactagaaaaaaaaagtaaggaaaattggagatgctaacatcctcccccatcccaactgcaccttaaaatatgcatgtcaccttcaaggttttataattgcactgtttgttttatgtatgtacagattaaaattattgctacatttgaggaaaat

SEQ ID NO: 11754 - DNA, 2533 bp, Homo sapiens
cttgcgaggttttcctctggcctttaactggcttctgaggctacagaactccaacccagagttcttcgggacctaaattttgcttaaggaaggcctttatcatgctgaaagcactcagacatgtctgtcctcacagcagaatgtagaagtcatatgaatgagggatcgtgcacggtagcgtcagcccgaattgacacgacaactctgaatgtgtggccctctatgaaagctggtgccagttttcatcactgttattaaatactagattgggaacctcattcagccgtattgcacagatgagcaattacagcagagaaaattcattagtgctcccactcatatccttatgtgtgagttggtgaaatttagcctgagcttgattcttaggtcttgagactcagtttccaacaccttcattattaatgttaagaatggccatataccacttcatttacgtaaaaggaataaaataagcaagttaagcttcagggtcctagaatttttctgatttctataatccttcagcagaatattaagaaataaagcatgatctgcaatggaaaggtttttttggcactaacttcatgcagaatttcacagacatctatgcattaatttaaattcttggtgcaaatgtgtgctttgtagttcaaccttattaaaaattcttcagccagttaggatttcaaaatacattagtgagagtaacagctagcagaataattacaatggctaaaacgtttttatagagaatcttgtttttcaaaaaagaataaaaagtttgaatagctattattaaagaaaagccatgtcttcaacatctgagtcaccaagaagtaacactttttaaacttgttagaaatccctggaggcatttcaaattcatcttctaacctacctaagcactttaaaatacagcctccttctgttcctctgttccccttcatgcctccttttgaattgatatctcagctgtcaatatttctttgacttcagcattgttattttatttctctatatcaatgtgtccttagttttcttagcctgttaatttaaaaatccagacttgggggtcattgtgttgctacccaagagaaaatgctacagttttatagattgcacatcattctttaaggcatacttttacctcaggaaacttactctagtatgttctcatatattgaattctcaactaagtaactatttctttatacctataaactagtacctaattcactgttagttaaatgagctatagataaggcagctaaatttctgaaagatagccagagtaagtaagcagccactgcaagctctgaatcagttttttaaaaaaaagaaaaaaaaaaaaaaggagctgtgccccattgaacaatgacaacatcacaaggggaagggagggattttgccaaaagttagaaaggtggagctgtaagccatgtgcttgttgcctttgacagtgacagtgcgcgtcttacaactaattccactaggcatgggaatgtcacctcctttgccactgtaccccatcaagcttactctgaatcaaaggttttgtaaaacttttgaaaatgaacttagctgcaaaatatagctaaccactttccattgcaagctttgcaaagtgaagagaggttcgtacttctcataattggtatttagcacaattgtaagatacagttttactgtttgtacatcgtttttttccattaaacttttctagagaagacaaaagcttacactggtgacatggataagtgagatggtgtctaacgagcagtgcaatattaggcggtgcaatagaggccctgttggcaagatgagttttgctggagagctggacagtgttggttagcttcctgcattgattgcccctgggcgttcttcccccttaactgtgaaagcagagtctataaatgaactctttgctcttacaaggtaatttacatattttctttctgttgaaataactgaaaatgttaaatctaccagtttatgtcttgtaaacagagtgtcatatgtatttaagttgtgtatttttataaagtaaagccaagtatcaaacaccggtctgtgggctgcatttatttgtggaaacactggtctttaatggaaaacatactaagctagatgccaatccagttcctcaccgactgtgaccctcagtaagacattcctgagaatggcccacccctctttcaggggagctactctgtcctcttcatcctactaacatggtctaagggggagacgttcaaaatgttcaaggtcttttttctttttttttttttttttttttgagatggagtctcactcttgtcacccaggctggagtgcagtggtgtgatctcagctcactgcaacctctacctcctgggttcaagcaattctcctgcctcagcctcccgattagctgggattacaggtgcccgccaccatacctggctaatttttgtatttttagtagatttttgtaattttagccatgttggccaggctggtctcgatctcctgacctcgtgatccacctgcc

SEQ ID NO: 11755 - DNA, 1186 bp, Homo sapiens
ctgggagtcagggtgggtcctttggacctcaaaggctgggtctccagggtcctgaagccaggagggcatcatattcctgaatcggggcaagcctgggaattcagtgacagtctcagaccacctgtctgttggtgctaaatcctgcagggccagcctagatgctataatttttaaattctgtttaccctcaagaactagaacttggggttcctttatatcccaatcccctggtaactcccacagctaatttagcttaacatatgagcccagtttagcaagccaatccagtcctctaagaatccgctatagtgaaggagacagcaccctggcagtgggattaacgaccagggtttgggcagtgaaggtcgccacagctggaactgcagagtggggagttgaggtcattgcctctgtagtctgtgagtactcaagagcctcccagttcacggactgttctagggacccctcccttcagctttaatgaaggtgacttttttcccccaggaaggtttgggtcaaatgctgagaaagacttagtctaggaaagcaagcatttctaaagaagattgggaagaggtcgggtggagcgttggcacccagtgtagtctgtcagtgaaaaactccggaggccttgtctatgttgccgcaggacgtggcccaagtcaatgaggagaacttgcctgtctacaaccgctgtgccctctatgctctgggcgcagcctacctgaacctcatcagtcagctcacaacagtgcctgccttctgccagcacatccatgaggttggtgttctcacgaccaagagctcagggggccctcaacttggggtttcctgggaacagcttttccttaattgcattagtcctgtacctacacttaggcagtgaagacagggttgaagtaagaaccactaatggtgagaagttactcgtggcatctttccctcctgtatgacttgacaaagcagggtggggttaggcacaggggttggggggggtcttctatacctgtttctaatactgtctgccccctccacttcctgcccctctgtctttcccctactcacgggagcacacccgcacacatgcctcagatcatgcagactacagctatgaaataccgcaaaagtgacctcagatcatgcagactacagctatgaaataccgcaaaagtgacctcagatcatg

SEQ ID NO: 11756 - DNA, 1176 bp, Homo sapiens
gaattcctgttgctactctgcttggtgcggagttgcagtggccccaagtgtctttcagagctgttgcttttaggatccccctcaagctgtgggttagggccagggcagggagggggtgctgcctggcactgtgccctgaagagggctgcttgcttcctttggtcgggagcacggcagagccaacattctggtgggaaccgagtttctagccaggcccctgttttggtcccgggaggtgagtaatctgagtttgtcattgcgtattctccacgctgcctgctctcagtgctggagactagagagcgaccctggagttgtcctctgggagtcctgcctgtttgccagggagcagctgaaacctccccgctcccaatcccgggggtggaaaaggtgtagtggaggaatggtctggagctgggatggcccttctggccatgccctgctgagccaggattaaggaaagtgtcagccgcctccttaccaggccctgtgctggggtcaggaggaccgggaggagagggaaggggtgagaggatggactctgctgttgtagtgtgagctctggaatctttacgttttggtaaaggcaggccagggtctttgaggatcgagttggggaaccttgcctctgtgtttccgagacccagctaaggtgggcctttggtgggtgacctgtctctgacccgaggcagcagagttttgggggagggagaaacaagcaaggagcagggaggacaaggacacaagatccctttgctggtggtgacttactcacttcccccaccagagggcctgggactcccgaaactcccgtaactggaaagctccctggctcagctccactggggggtgaggagggcggctccctcagccccagcctagcggcctccaaccctgtgcctgagaacatgagcagcggtctaaagcatcccctagtcccatttcacttcacagaccgatttggttgcacagccctagaattcaacagacaacaaaaatgctgaaattccttagaatacgcagagggaggaggtgactcaccaaggtgctaaaacattttattaaaaatatatattgttaaattaagtctgctgtctggacaatgactgtttgttttgttttcttgtagtggagtttaaaagagactattattttactctgatatattattattaa

SEQ ID NO: 11757 - DNA, 2011 bp, Homo sapiens
tgaggcccccaccatccacccctctgtgcacaaggcggctcccggcccctggaatgtgatgtttttggtcatctccaaaggctgcagttttatactgggaggctgatgacaccttttattataattattcttatggttctggttataattatgtttgttttaagattttctttaagaaaacaaaaacccaacacccttccctttaggtttcaaaccaaggtgcgggagcagggtgcttctgagttagcggtggctctggtgccctggctcccacccctcgggccaggtgggccactgggcatggtgacagctgggcggccagggagtccccaaggtctgccttctgggcttgtcactcttctcttctacttcccctcctcttgagtcgggtgtgtcagggctggagggaggaccggccgtctctctccttgtgtgtgtgattggagtggtgtgtatttcttttctagtacttggtctgatgatagctgtgctcttacctcgagtcagcagcacctggagccccaagtgctcaacactttgttctacttcctacaaggcaggcggcctggcgtcagtagtaggaagggatggcattgttggctccagggtgagggcccgacgggcaggtgcttgcctgggtagatggggtgtagatatgtggcatatagagatatatattttataatgggaggggggatggcacctcctgggactggtagagctgggaggtgtgtcggcaagcacatggccccaagtccacgtccctagaaagatggggcctacagtgataggcgctctataaatacatagatagggtcatgtttaagaaatattatggggtggggagtgggggaagcaggcttagtgtgctgagcctcggtccccactgcagacctaaaccccacaccaatcagtcaatctcacacgcatacacaggagcatatttctgtactgatgcataatgaatgcactcacacacacacacacacgccagggggctcccagcactcttctcccagggttcaggactttgtggagtcagcccgtgcagctatttacctctgttgccctgattgcaggtagactgtcaatcccagaagttgctaggtgctgaggcaggaaaaggaggaggtttcttttagcaggtgctctcctctagcaggtagtgttctatctcttttgcccctggtgatgtcaaaagattcttctgttagcaacctgtgatactgacctgcaactctaggcaccagtcaagtcagccctcaactccccctacctattctccccaactgaaatcaaattgacatccaggtctgtcttggccagggggcttccattggggaaaaaaaatgggacagtgaacctcacctattgaataaaccaaattagtaattagtgacaaaaccaaaccaaggctttggaccccctgctcattactcaggagtaaattcacacagctggtggccggtctcacccctttttggggtgcttggtcctggaccccaatctactgtctcctcgacagattggtgtttaagatcatgcccagttgcttcctgtcacctcttgacaggtggtgactgggctgctgtggggctggagcagcgaggaagggagcctctgccccctcagtggagtccctgtgctaactgtggtgctcacccagctcctccttgctcccgcggggctctgtccttcgggcctggagtccaccagcgccactccaggagggctgggggaggaggggctgcctcaggcagtccaaggtgctccctcccccgctggccaatgctaaggtcttcccggctcccagggtcaggacagagtcttctaaggctcaggctctcccaagccactgcttagtgacagttagcctttcccagcggcccaagctccaccggaactgggcctggtgctccaaccaaagggttggtgttgggacttgggaagagacttggtagccaagggcatggcaagcctgggggattcctgtgggccggcttgctcgagg

SEQ ID NO: 11758 - DNA, 1178 bp, Homo sapiens
cagctaattttttttttttttttgcattttttttttgtagagacgggtttcaccatgttgcccaggctggtcttgaactcctggtctcaaacattctaactgccttagccacccaaagtgttagcattacaggtgtgaaccaccacgcccagccaataaaattattatgtagtttttaaaatgtaagagtatttaatcatttacctggactcatatctacccaatttttgtctaatttaagcctgtgttgtgcctgcatatgaatgttgtatataatttttatcttcggatatagttggaaacattagcttatttgcctcaaagagatgacaggaattcagaaaatattgctggttctgctactgaatcctatagtaacaaaaattagtgcaattaagttgcaacattgcatatcagaagttttaatttctgtttgcttaaatggtaatgattaatcctaattggatgcctacattttcagaaagatgtgccggatggggtgaaagagctgtcagaaggttcagaagaaagcagtgatggtcagtcagattcccagagttctgagaacagcagcagcagcagtgatggtggcagcaacaaggagggaaaaaagagcaggtggaaaaggaaaggtaaatccacctgatccttcaataaagtactaaatgctgtaggacaaatgcccttgttagtagttcctcttttcccagactccaggtcagtcagtcactttcccttaccctctataacagtcctgtcaaggagagttttctgcaatgatggagatgtttatatctttactgtccagcacaacacagtagccagtagctacatgggcctattgaatacttgaaatatggttattatgaccaaggaatttaaaaaataaaaatgctttcttttttagagctgtttcaggttcacaataaaattgagaggaaggtacagagatttcccatgtacccctcccccgccacatgcacagccttccccactagccacattctccaccagagtgctatatttgttacagctgatgaacctacattggcacatcatcacccagagtccatggtttacgttagaatttactgttgggagagtacatcctatggctttgaacaaatgtataacgatgtgtattcaccattatagtatcaaacagaatagtttcattg

SEQ ID NO: 11759 - DNA, 1204 bp, Homo sapiens
tataaatattcagaagcctacttaataactttttaagtgatctcatgataggtttgaatacaagagacaatggcaatgtgttagtttcacaattaagattcagtctggtgcagcagtatacaatggaattattactgtttatttgaatctgtgtgtgtttgtgttcttttttctcattttacctctggacatttgtaaagcttgtgctaaatagaatgtttacaaaatatgtttgtaatacttctgtatttttcttgacttaaatgttagatactggatcagcattaaggaattactattttgtagatacatggaaatgatttttacatccattttctccatggcagcccctttctatattggtagacttcttatagtttataagatatgtttaagtcaaaggagtattgactaattaattttattttgagtgttacataggatattcagagacagaaattaattgttgtgttccttatcacatctcttctttgttttgcagtgggacttctcctcttgcatgcctgaatgcaatgcttcacacaaactccagaggtgaagagggcatcttctataaggttccaggtagaatgggagtatatactttgaaggtaaatattttgttggggagtcatttagaaagaaaaaacaggaagtgaccacatataaatatttgactcgtagggacagaattctgttcttgaagagcttattttcaggaagaggtaatattttgaaacctctacccaatacattttttaaaaactaatctataactaactataggtagatcagagaagtaactttattttttattcttgatgataatcttatctagaaagaacgaaattaaaatgacttatggccaggcgtggtggctcacgcctgtaatcccaacattttaggaggccgaggtgggcaaattgcctgagctcaggagtttgcgaccagcctgggcaacacagtgaaaccccacctctactaaaatgcaaaaaattagccagggcgtagcggtgtgtgcctgtagtcccagccactcaggaggctaaggcaagagaattgcttgaacccgggaggcggaggttgcagtgagccaaaatcacgccaccgcactccagcctgggcgacagagtgagactttgtctcaaaaaataaaataaaataaaataaaataaaaaataaataaaatgacttctagtgtttt

SEQ ID NO: 11760 - DNA, 1112 bp, Homo sapiens
agtcaactccgtgacgatactcattcctttattgtcaactgcattgattggaacagggctggggcctgcaagctgctggcagcacccagctgcaggtgcatttcagctcaacagaaaggcctccatccgaagccaaggggacagaggggaatgttttatatatatatttatatattacatatgtcccgtatagtcatatgtgtagagtgacaagaatgggccactgcattgttaattgttgtcctaaataaagaccatagcaacacacgagaatttggtcctaatcaaggcccttactttgtcaatcaaatatttgatacaccaaaaggaaaaggagagaaagagagacagagagactgagatccagccactcctggtggccctgttcccagcagatcttacactgagtgtagagtgtcccctgtggaggtaaacacgcacacaaacacgcacacacatacacacatacacaaaaccgcaggcaggagctcctcctccgaccatacctcgggcccagccctcggactgggggggctgatttgggtatattgtgctataagactgtgagggaggtgtgacaagacaatgcaaaggcgatgtgtccaagtgatgaatgaggtgatacgtgctgctttgtccacaaacgagaaagaggtcagtgggagaggctgctcaacgcagccctggaggtccccctgcgctcaggccacctggtgaatttctacacacaactcctgtcccagccacagtcgaacctctgatctgaatcctgagtctcaaataatctcttgggctctgatgaaaattgtgatttcctggaaggacaggagcaaatggcaagtgggtggctcaaccctctagtccagtaatgaagcagaaatgacagtgtcgctgagttaaatcagacccaagcttgatcctcagagcagaacttgaatgatgtaagaagggttcatttcctgaaggaaagagaataacccccgccaccacctcccacaccccccatttcaggcagatctgtcagtctcatggtttcaccccaacgacagcactcttcatattctaggaactggagactcacactattagggcactttgaaatcctaattcac

SEQ ID NO: 11761 - DNA, 1237 bp, Homo sapiens
ctgtatttccctaacctcccctttcgcctgcgtcatctcccctgcaggtgccagagtcctcagcggcctccaccttccaccacacatgcctccctggcctctgcttctctgcgccctgcaacagtggcggaccatgagtgacaaccatcacgtcaggctgcccatccaatagactcctgggatggggcagccaaccctggctcatctcatctgccgcttggtgcgtgtgcgtgtgcgtgcatgtgcgtgtgcgtgtgtgcaggggtgagaatctggcagatggtgcctctgcctgctcttcttcgcctcctttatttaattcatgttatttattcgcggagctctgttcgtgttggggagatgccctcgcctgagccgtctgggcctaccgtggtcactgcgtagcctctttttcttctgacttgagagctcccccagtcagatctcaggcttgtccccctgtcagctgcctccagaagggaaggtagccagtgcctgagaagacagtcccttttctacccaccgcactccataacctccatcttctcccacactgatggcgagcagcccctgagcactttctgggactgggagactgcttggtgttccctgaggacaagagacatcctgacagtgttgggcatctgctccccgtggacacagccccactctccactttctgagcctcagacaacctcattcagcctcttgggctccttttcaaggacattaataacctcaccaacatagctcatgcccttcagctttgacaagaactcacagcttcccaaactctgctttctgcccaccttggatgggaactgtggaccaagcaattaccatcgccttggaacctgcaggaaatggaacagcaattgagacaacttgaacagtcatcaacggaagtccctccactggattcctttgtttctgtcccctccgaggagtcattttggtcgacaggctctcaaggcaactccccattttcaagaggctgctcctgcctgcttcgatcatttctccctgcagctgcctagaccccgttcacagtgggaggagtcaatgtcattctacccctcgctaaacgaagatattaacatctattgctttttcccttcatctgtcacaggaaacagaagcccaggcacaatcttttccagctttgcctgttacccctgtttctgaattgcatctttaaggtattattttgttgaaaatagatcctttattcactagt

SEQ ID NO: 11762 - DNA, 1166 bp, Homo sapiens
ttttttttgagacagattttcgctgttgttgtccaggctggagtgcaatggtgcgatctcggctcaccacaacctctgccttccgggttcaagagattctcctgcctcagcctccctattagctgggattacaggcatgtgccaccacgcctggctaattttgtatttttagtagagatgggctttctccatgttggtcaggctggtctcgaactcccgacctcaggttatccacccgccttggccttcctaagtgctgagattacaggcgtgagccaccgcgcccagccttggtaaattattttgtgtgtgtgtgaaatactgggttgaatcacatgaattctcattttgtaggttaataatgacggcatattgacttcaggccagatcgccggatatcagctgagtgactcttacaagtccttctagatcctgaagtggattaggtgccgcagttgctgctcgtgttgaatccagaaccgtagccagacataggactggaggacgagcgaaagatgctgaccgagtctggagatcctaaggaggaggaagaagaagagggggaattagtgtttctacatcaggatcccctaacaacagtgagagagcaatgccagcagttggagaaatgtgtaaaggcccaggagtggctggagctctgtgatgagtgtgtatcctctcaatcacatacagaagaggattgcacggaggagctctttgactttttgcatgcaacggaccattgcgtggcccacaaactctttaacaacttgaaataaatgtgtggacttattccccacaggcttcatcacctgggcatcaggatatttccttatggttttggatatgccatttgtttcttatttctgtaactgtaagttcacatgaacctcatggattttggcttagtctggtagcttctgtgtaattcgcagtgatttcatcttaataaagttctgtgatctgcaatctgcaaaaaaaaagaaatgactgcatattggcaattacacatagtttaattgaataaaacacattcagaaaggtgcatggtacataaacacacggcttaaaaaagtattattatttgagacggagtttcacttttgttgtccaggctggaatgcaatggcccaatctcagctcactgcaacctctgcctccctggt

SEQ ID NO: 11763 - DNA, 1184 bp, Homo sapiens
cgtacgcccttgcgtgcgtctcaggcagcgcgcacgccggcgtgagagggcacggggaaaaggtggctctggccggggtggctcggtttcctggggctatgtaactgagctcgtcgacttaggggtccttcttcgctgccctcgccgcgtgctagcagggagtttccgctcgggagagagactgtcctcacgcccgctgcgcctcctcgacggcagagcaggcttgctcgcccgtgggagcgtcccggccgagaagccctgaggggggaggggaggccattttgtcccgaccgactccccggaaccgggcggacgggctgggagaggctgcggagccgcggtcgccgccctcggaggcactggacgccgccactgtcggggcttcctcaaagctgttcgtaggtcgcccgcgccgtctcgagcctttttcccacgcttccccggtcctccggcctgagaacgcccgagtgaggagttggccgtagtgagagggaccgatcccttggggccgccggcggcgagagcccgagccgctcctcccaatggcgaagaagacgtacgacctgcttttcaagctgctcctgatcggggattccggagtggggaagacctgcgtcctttttcgtttttcggatgatgccttcaatactacctttatttccaccataggtaagacctgtgggaggacggtgtacggtctcggtagctgcataccgtttattttactccagacatcttgcttcccgtaatatacgcctttgtttcagtgattccgattccaaacgacacatccaagttactgtttgaatcggcatcgagcttactggggcggggtcttcccatgatttccatccggtcttttgctttcgagtctcccactatgctcagtgccttctgttacaaaatatgcatcatttaaccatgttccagaaccttatttcttcaggcgactggactggctttttccacatttgcgtggaattagtagatgtgtgatatttttaaggtatttatttcagtggttgcgattgaagcagtactagctatttgggaaaggcctgaatttatactttggggcaaagaaaagattccatatggtgataacttagagtaaacttgagggtttctgagaagaataattaaggtaaattagaagggaagagtgagttgccctcattcactaa

SEQ ID NO: 11764 - DNA, 1974 bp, Homo sapiens
agttgccatccactaccccgttttctcttcttgctgcaaaataaaccactctgtccatttttaactctaaacagatatttttgtttctcatcttaactatccaagccacctattttatttgttctttcatctgtgactgcttgctgactttatcataattttcttcaaacaaaaaaatgtatagaaaaatcatgtctgtgagttcatttttaaatgtacttgctcagctcaactgcatttcagttgtattatagtccagttcttatcaacattaaaacctatagcaatcatttcaaatctattctgcaaattgtataagaataaagttagaattaacaattttattttgtacaacagtggaattttctgtcatggataatgtgcttgagtccctataatctatagacatgtgatagcaaaagaaacaaacaaaagccaggaaaacactcattttcgccttgaatatgtaaatgggattaattttgtcctgtgccttatgtggaaaggaacttctttggttttccttttttgttctggtggaagcatgtgcaggagacatatcatccaaacataaaccattaaaatgtttgtggtttgcttggctgtaattttcaaagtagttaattgaggacaaagggtaatgcagaagtgatagctttggtttgctgagtcttgttttaagtggccttgatatttaaaactattcctgccaccatttcttctccttggccacttcttccttgcgtctccctgcatgctgctttatttgcttctccctccccaaccacctcatggtatatttaagagtgaaagggacaaactagtaggtttgtcaagtttaatataaagcactgatgtaacttgctaggtaaacggaaagataagttctaactgcctactatccaatgtcagttaattggtgtcttcccccctcatttgctctcttccctaaaatgtgtcccagatgccttcatttgctgttttacttctatgttctgcttttcctcctctctttgttcccttcctgtctatccattgagtttatgaaatggaagagttaactgcatgcactagtgtttggagggtgttgtggtttgtctttctaattaggtgtatagcctattcactttcctagaataaatctcttaacctaaatttgagtagtctgcattttggcaactcctctagcagcttggtagcctagtacaggttgtttttttaaaaaaggaaaagcaggaaggaggagtgaattttattaacatgtttgccaaatgtattgagatttggcctctgaagaacactttttcagtgttaagtttctttaccttaagattcagaaatactttagaatattattaattttaagtcctgtctttacatccttttggaaaacttgtattaccatgggtttggaaaaaggacaacgaaaggcttttcatgtaaagataagatctttagctatctctaaccctgtccttttttcactgcattttttctagttttgcttcattgcttatcattaggatagggtaagtgaagtttgctatgctgctagcatcctaagatgatacctttgttgaaagaattgtgaatagcatgattcatttctagcagaggctgagtttaggacagcagcttccattgagaagtctttctgtgtcgtgaatagcattttaatgacctcttggctcacataagcaaacaacatagggacgtatctgctatgaaaatccacaaatttttcagatagtgccctaaaaacaattttatatgcctcactggttgttattcttaggttattcccacacttgactttatcattgtttactactagtaaaaagcagcattgccaaataatccctaattttccactaaaaatataatgaaatgatgttaagctttttgaaaagtttaggttaaacctactgttgttagattaatgtatttgttgcttccctttatctggaatgtggc

SEQ ID NO: 11765 - DNA, 1441 bp, Homo sapiens
aggcccaagatctgaactgcccagctggagctgcacagctggaatgctggtatgggggccccaggtacagcactccggaggagcaggtgctgcctgcaagaaggatctatgtcgagactgaggctgctcagcagccactgggtggatccaggggagatgcatgtggaaatgtggtcctctggggtcagacccctgcacgggacatcttgcctttgagtgtgcagagtacatggggaaggggctgggggcaccactgtgtacctgggcccagtaaggcatttgccgtgattcccacaacggggtcaaaagctggccttcagggtgacctaacaccacctcatgccctgctatagaccttcacaaacgacttccactgctgaagcctgtaggctctgtttagagacaagaagatggctggtaatttaagcaccgatttcccaagtgcccactctcctttgtgctctgttggcttttggcctaaagctgccccagagtgagggtgtagatgtctgtgtctgtgagatgcctttcccttccccctctgctccaccgtggttgaggggggtggggcctggccccgcacacaggtgagtcgtgtacaagcctaacccatggcacctcagaggctccacctgtgggtcctggttcatgggtgacaactttggaagagcacagctctgcaattgacccgacccacttatctagttaggaagccagacactgcccagatgactctagcaccctggcttctgctctgactttactgcagctagtcatccatccgtcaggtggcgttcagtctcagaatactgattccgtggaagagcaggttgatttaggtcagcttctccttgattctagaagcaagcggtagtcaaccacctccaattccgccaatctcttgcccccatcatttgtctctgacaatacttggtgtttttccctggttttctgtcactggcacaggagggtacagttgggagagtgcgttcctggagctcagtcctgcatttgttcacgtgcctcacagcaggcctttgtgcccttgaatctcaaacatggggatctgcttggtacccagagctctggtcattgtgtccaaccacacaccccaccccatccgtgtcctccatctcacccagaaccacagggtgcccactagtgtcagggcccaaagtgccagccttctcttctgccttacctagtctacctatttatttcctccactttttatcttaaaagtagctaagccatgctggtgcccatactccaagcaggctgcctcagctcagagaagtggtcagagagtagagcacagaacctgtgatgtggggacatttggttttcttgcagatcatttaatgaatcctcaaggactaatgaaataaatgctagactgctgaagatgagtacaagtggcattctgggtgccagctgcttt

SEQ ID NO: 11766 - DNA, 1221 bp, Homo sapiens
gtggtaagtatgtgttctaccttaaattttcagtattaccatgatacttttggaaagcttttgtcattgcttatttattgctcttaggcttttttgattagaattgatatgtacttaaaaattttttatttttatttatggaaaatttcaaaaatagaatagtatagtgaatagtaaagtagagagaatatttaggaaaaagtagagagaatagaccctaatgtacccattgctgaggctgaggcctcccgagtagctgagattacaggtgcccactatcacgcctggctaatttttatatttttagtagagacagggtttcactatgttggctgggctggtctctaactcctgacctcaagtgatcttcctgccttggcttcccgaagtgttaggattacaggcatgagccaccgtgctcgacccttctcaattattttaaaggaaatttctgatattatatgataaatacttcgctatatatctctaaatgataaaagcttcctttaaaaaaacaatcacaatgccagtattacaccaaaaatttaaccatttcttaatgttattgcatgttcatttgaactcttgattttggaaagaaagatatgcacatataattgaatggttggctttttgtgttcattgccaccttttcagtgtgtagagagatttcttttttcttactttaatggccttgctattaactctccctgccttgaatcccagctttttgtgttgccattttgcccatttgcacctaagtctccagtaaagaaatcagaagttggagtgtttgttgaagtggttgggtgggtaaatttggatcatcttacaacttaaccaatttatgagttgctgttaaagtgctccaaatgatggccagttgcttgcattgtctacaagttagttattttatagcattgttggctaaaagattgtatttttttttttttttttttgagacagaatttcgctattgttgcccaggctggagtgcaatggtgtgatctcggctcaccgcaacctctgcctcctgggttcaggcgattcttccgcctcagcctcccaagtagctgggattacaggcatgcgccaccacgcctggctaattttgtatttttagtagagatggggtttctccatgttggtcaggctggtctggaactcctgacacctcaggtgatctgcccgtcttggcctcccagagtgctgggattacag

SEQ ID NO: 11767 - DNA, 1126 bp, Homo sapiens
gagattgtgccactgcactccagccagagtgacagagcaagactccatctcaaaaaataataataaaaataaacaaatctgtttaaattactgttgcctttcagcattagactttgagtttaataactacaaattgagactgctcacaatattaactttttttgtaggttattttgttgtttagataacttgcctccctagaggagcattcaggagataaagacctagctacatgtaatgatatgatcatttcaaaaatgtgccaagaaagcaaaattcattattgaactctaaatttctgggtgtttttttttttaaagtagcattttctctgggtaaagggaaaggcaatgaatgattgccaacatgtaaactccctgctgcccgccttcccccagtcccctccatctaacataatacagtaaatttgtagccagttgtagaaaaagaaattgatatctttctgagtaaggtttcatgccctgtgactaagaataggtggaggaatcatggccaaatcaaatatgaattgtttagcttggtcctgttgcagttggctttctgtagtgttctgaaacaagaggacgattccattccttctcaggaacctagaaacaacaccgcttgagcaactggaatatgtttgctgcaagcagaatattttggggagaggaagagtagtttaattcaagtagtttaattgaacatattagtcattggtctgtctgggacgtgcagtgttcatagtagcaatgtatgtaccatttattttatctggttgtgtgtgatgtgtgtgtatgcctatttaatatgtacacatatattcactacatatgtatgtatgatatattcatatatacatgcagtctgcttgattatcagcaaaatggtcagcctttatcagatagtttcttcatgtggagttcatctgcatgtggcccttactctgaagcctcttcctgatctggagccacagtctgtctgtcttccagttcatctcagtcctcgagaaaggccctttaaatatgtcactttcccattttcctttaaccatgggttgtgtgagccagaaagagctttgagaaagatggctgcttccaccagggtggaggcttctaggtctgca

SEQ ID NO: 11768 - DNA, 2298 bp, Homo sapiens
tcccaccaacccctatgccaccctcctttttttaaattttcccaggtattagggaccctactgtctcttaactaactggccaagggacctcttttgtaacctggtaggggattcttttctgaaaacatgagccctccaagagcaccttgtaattctttatggaattgatttctaacctctactacctttttaaaactgtagtttttgactgtataaataggaactctctcgtttgtccaccttagatcccttttcctatcctgggagattgcctctcatcacccaattactggtgatttccccatcaccagtaagagatccgccagttcctaagctcccaggagtcaacacctgctcctaattgggtcctaagattaagagccaggaaaaaataatggaaaggaagattcactggaactcatggagagcatcattgtcccttgaatctctcttctgttactccctactcctactcctccccttccccactccttcacaggcaagagaaatatgtgttaaattcactcgtggtgtggacttcaattggcaagcccaggccctattggccctacaagaggtaagaaggcaccaaggcacaattgggtgagggctgagtgggagaaagaggcagcctagaattctccagtgctgactggagtgtcacatgctgaatctgacctctggaaaagaacaatgaggtaacctctgagggtttggaggctggattctgcgtggtgatagcagaattccctggcaaagttcagtctcattctgtgaatagtttcctacaatcctttgagccctcagagattaagtttagcaggtttccaaaaaaaagcagcccgtggcccttcatctgtgtccgtctttttctctttctgtctccaggcagcagaagcatttctagttcatctctttgaggacgcctatctcctcaccttacatgcaggccgagttactctcttcccaaaggatgtgcaactggcccggaggatccggggccttgaggagggactcggctgagctcctgcacccagtgtttctgtcagtctttcctgctcagccagggggtaagctcatcctctttcacaggactggggctggaatttctcaagtaatttcctttctccatccatagtcccttgtcacctcgccttccctttgttctctagtaaaggttgatctagttttgactgcctgggacaatgtggtttgtgcccttttgtgcaatgttagataaaagatatctttctattaaataataaccagatgaccctaatttcttttggttgttattgttgttgttttatttttataagacagggtctctgtcatcagtgttgccatcgtggctcactgcaactcctgccttggcctcccaaagtgttgagattacaagaatcagatgacctcattttgattaagagaaaactttctaataaactttctaataaaagagaacactttctaataaaaactttctcttttttgattaagagaaagttttcttacttttgaaaatggcttgttagtaagtgtgcttccttaatttcagggatgataccggggactctccagagccatgactagatccaatggattctgcgatgctgtctggactttgctgtctctgaacagtatgtgtgtgttgctttaaatatttttcttttttttgagaaggagaagactgcatgactttcctctgtaacagaggtaatatatgagacaatcaacaccgttccaaaggcctgaaaataattttcagataaagagactccaaggttgactttagtttgtgagttactcatgtgactatttgaggattttgaaaacatcagatttgctgtggtatgggagaaaaggctatgtacttattattttagctctttctgtaatatttacattttttaccatatgtacatttgtacttttattttacacataagggaaaaaataagaccactttgagcagttgcctggaaggctgggcatttccatcatatagacctctgcccttcagagtagcctcaccattagtggcagcatcatgtaactgagtggactgtgcttgtcaacggatgtgtagcttttcagaaacttaattggggatgaatagaaaacctgtaagctttgatgttctggttacttctagtaaattcctgtcaaaatcaattcagaaattctaacttggagaatttaacattttactcttgtaaatcatagaagatgtatcataacagttcagaattttaaagtacattttcgatgcttttatgggtatttttgtagtttctttgt

SEQ ID NO: 11769 - DNA, 1212 bp, Homo sapiens
ctgttaacaacatataagaatgcgtgctttttacatttgctttggacattgttctgtgtgctattatgaatagtgaaaaatgtaatctcattgttttcatttgcatttatttaattattaataaaggtgaacatcttttcatttgcctattagctatttatgtccctcctccccttgtgggttacctattcttatcctttgcctatttttttattgtagtatttttttgtcttttaggatttagaagcgctattacatataaatattaatccttggttatatgatacacacctgtcataccagtttttatttgtctttattaaaagtaatttgtggtatcttttgctgtatcataatttttcactattgtatagtctaaattactctgattttttatggtttccggctttggattatgataaaaagaaaagcctaactcaatcaaaggttataaacatatccttctatgtttttttctagcattttatacttttctctccttttctaatgtagaatgcaaatgtactgatgctacttctttgcttgccatgctagccagccctgccactgcactcagcatcttgtccatactcttggcacgccatgtcccaccaggccttgaaggattcagccgctgtccactttccaccctcatgcatccaatgcaccagccatcctgagtgcaccaagctagcttgcgccacacagcttctgtctggaacatccttgcctgacttcttccttgacccctggtgaactcctaagcaaccatccagactcacctccaaggcacttgtgagaagcagtcctccagcccagtcagtgtgaagtgcttccccaccctttctggtaccggcagcccttccagctccttgtctcctattgaaatgttggttgatgcatatccttccactaccaacttgtgagctccatgagagttggttgagtatctggcacccagtacagtaaccctgcctccatgatctgatttgcattttagcaagctcaatctgctaatagtgtggaggccggggaccaaccagaagtatccatgtaatggtgaggtcatagtccagtaaatgataagggcctgacttcagcaatgggtttggagaaagaggacagaggagaaattgatttagtaggtagaaccaacagtgttttgtttgagaagtttcctggacattcaatacatgagaaaataaaaacatt

SEQ ID NO: 11770 - DNA, 1227 bp, Homo sapiens
tcactgtgcttcgagccaactctaacaggcactttgagatgtgttcctcctgctgtagtcctttctgccttggcctcggcgggcttttctggggcccaggaagcccacactatgcacagagcccaatgcatagagccctggccagcccttcctctcactcctgcctccgctggctttgggaaagcccagactttagtgccctgccccctggctgactggccagttgcccagagcactttagcagatgtggtttcaaagtaaaggcctcctcccccaccccttaggccccgtggtgacatttcccaagtcagacagatgtcagcttcccagccatgcccaggacgtcctatctcccccaacccacctctggccctgtgtaggggcagggatgggggtggctgggactcctggtgcccctcgccagcttctcctgcgccccgcccacaccctcggggggtcacaggcccagaagggtagctgggcggggctcgaggctggtgccaggcgcgtgtaaatggttttgttttgcacgtttggtttgcgcagtagtttggtttgacttgtttgtgcatcctgtgaaaaataacggtgcttgtgtcactagcatagaatagcgacaggaatagatgtggtccttaggagacgctgcacttgacaccaaccagacagcacagggcaggggtggtggagggggctgggctcacaggcctctcttttccccgcctgcagtcttctgggctgcgggaggccctggccctttccccttcccctcccctccttgtctagtttcccacattccaaaagggggcctgggatgctagccccagagatgccagcccttcaggaagcaggtgtcctttcccctctctgcccctgatcactcccagcactccccttgccttcccctgtcttcacctgccaccacacacacacacacacacacacacacacacacacacgcacggcttcctataacttcttcctgctggacagagactcagcgctcctcctgtgtgactggcaagaggcctcatgcctgctgagagaggaggagtgggagaggggcttgccagacaccagagagggagaccccaggcccacaggacctggctgtcgaacccgcattgctgctcaggtgccgtgatctcccgtggtcggcaccaggcccttgccagctcatggcctcatcttctcccctgtccatccaggtgggccctccctgcttct

SEQ ID NO: 11771 - DNA, 1286 bp, Homo sapiens
gatcatggagtcaggagatcgagaccatcctggctaacacggtgaaaccccgtctctactaaaaatacaaaaattacccaggcgtggtggcgggcgcctgtagtcccagctactgaggaggctgaggcaggagaatagcgtgaacccgggaggcggagcttgcagtgagccaagatcacgccactgcacttcagcctggacgacagagtgagactccatctcaaaaaacagacaaacaaaaaagtcagcccctgcacatctctgtagtgcttttcatgtattcaaaccacttccgtatatgacctctcacttagtcctcatgacaatggagcacttattattcttcccattttacagatgaggaaactaagacccagaaagttcaggtcctctgaccccagaagtgtctgtgatgaccctcccaaccttggctatctaccccacctgtggagaggaggtctggggtgacatctattgtagatcccacctgagagtttaaccaatgagaagacttactttcctggtaggcagcctgctttgttttgcacaggaagatagattttttttctcatctttcttataaacaacctcatgcacattctgtgtttgagccaagactagtcacccattgggggctaaccgtgcagtgtgagctgcgtccacaccctcacttctcccttcactccccctttcctcactcaggggctgagaggacagaggtggtcagccggggagcagaggtggcgaaggggctcatggcaagtggcagccattggaacaggggtgaggacccaggcctgggaaagccaccagggatgggggaaaccatgacgccgcctcctggtgcagtgcacaccatctctatccctgtcagccctcactgggtcatgggccttgggcagatgtcaaagagcccagcagcagcggtggtggccagctgggcagagcatccttgcttgggctaggaaagctttaccttctctgagtgcctccgcctgagagatgtgtgacccgtggcaccagggaaccacgtcttggagtggtccactgtaggccatgcgcttcatccacccccagtccctacataggccctacccttgcccgggagcttctagatagaaatcagaaagagattcaaggagccaaatgagcggtcagcccccaccatgcactccttgccccgtgcagagctccagccagcttcgtcaccagccccactggctcctggttggaacgaaagggtctctggttgcactgaatgcagctctcaaactggtcttgtactt

SEQ ID NO: 11772 - DNA, 1322 bp, Homo sapiens
aagccctgcctggcctgcctggcccaccactttcctctctctcccaccctccaggaaggattcgcaccccctgaggacgatgagattgaagagcatcaacaagaagaccaggacgagtactgagggcggccgcagccctggctgactgcacagcttccccgtgcctccctccctgctccactcccacattatagtcctttcctaacacggtcggccgggtgctttgtgtcagtgctgcagcactggggagccaggcgaggggggcttgggggcatggggccggaaagcaggcagaagcccgtcctgggtggtgctggcccagttggtgggacccctgtccacacccaccctatttatttccgttgtctctctgctgtgtcgcccaacacttcccagggtgctgctgccacccgccccagccagccacctgctcctgacagccagcagctgtgtatttgacaaagtcattggtatatttttacttactggattctccttgcactttacctgttcttttccagagctgacagcacgggctccggcgcagtgtgcctggcttggcttcccttccccatggctgggggctggggtaggactcacccattctaatttattttgtcttttggcttctcagtagctaaggggaaggctgatgtcaggagagggagagggggctgaggaggtagtgctgtaggcccagggggtcagggaaagggaggggggcatgtgagggatggaaatgacctcctggcaccaggctcacccacccaaggccccctgccccagcactgaatcccagcgctgccctgaggcccccagccactccctccagcagcctggttcaccacacaaactctgcctggaccccattgtctgtctgcttcccacctgccctccccaccccctgcccctcgggcaccagcctgcatatgtgttcacttttatttaaataaacttgtgtggtaaaagtacatgccatgtgtccctcaactgagccacagtccaggtccagtgctttccacctcccatgcaccgctctctccggaggtgatagcggcagcacagcctcactgtcaccctcccacaggcctggaaaccaccaccagctctgggctcagagcccagctccagcctagccccaatgcccaacactggtggtagggctctgagggcaggtaggggccccaaccccccgtcactgaggaggaactaggtctgggcccgtggccatgacaagggacagccggtgaagcggctgtggggcaccgtggtggcctggccaagaggtgcttcgtttcagtctcctttgggtcagggggact

SEQ ID NO: 11773 - DNA, 1193 bp, Homo sapiens
acagatcctgggctggtgacaaggcctacctcttactaggactttagggacttctcctggcttaatttttttttccctgtagccccctggataccatctattaccatcgggagctcctttgctattctctggatggacttcgtgtagatctgctgacgatcacttcctgccatgggcttcgagaagatcgagagccccgtctagagcagctatttcctgataccagcacccctcgaccattccgtttcgcaggcaagagggtgagtggaaatagcataaaggtagttctttggcttttctctagcaccaggtactgtttatagctaaagactatgttatctctaggcatcttggacatggcctccgcccgcagcgtgcggcaagggtgatggcccctgctccacttgcagattcagccagctggaaatccagcggctattcctgcctcatccatgacaccccccatatactgtcaaagtagaactacagggtaactgacttaatgtctgctctcctctctacctcagatattcttcttaagcagtagagtacacccaggggagactccatctagctttgtcttcaatggctttctggacttcatcctccgacctgatgatccccgggcccaaaccctccgtcgcctcttcgtctttaagctgattcccatgttgaaccccgatggtgtggtccggggacactaccggtaagtggcttccccagcctgtctggactgttcccatttcccctcatgccctgcatctcagtgaaattctgtcagccttctggcttctgtgttcccagtcctcttgcaccctaataaaggcaagcccatctcatcttcctgagaaagcatgagatcatatctagtggcactcccagaaaggaaccaaactaggatgactgcaggcccatctgggtggaggcagctaccctgaggaagctccttagggttctatggtaagggtgacagcagatcaaagagaggccctgtcttcaattctttctttcctaacatagcttcagcctctcatttgataagtcagtctcctacggtctccttttcatctacactagtgtctccttcactggcccagtcctctagaacctgcttcagtccttgttttcctacagcacagactcacgtggagtgaatctgaaccgtcagtacctgaagcctgatgccgtcctgc

SEQ ID NO: 11774 - DNA, 1214 bp, Homo sapiens
ggttgggagtaggggtctttgaatgaggtagaacatgttggactagagtcttaaaatcattcccatccctttctttatatagctgggtctataatttaaaggagaagagatggctttgtgtgaatgatacggctacacacagcatttagcagtgttgacaggagaaagtaccgtcatgcttttttcattctcctgttttgtctagtgttgcccagctcctggagtcagggaatttgcataagtagcattttgcaggtagacaaaagtcttcaggttcctcaactgataaaatgagattaagtgtgtagagcagtgcctggcacatagtaaatgttcagtaaatgttaactattgttttattacacagacacattaataaattccagcttcctatacaaaggcaccagtgttagaggtttaggataccaagaggataagtgatgcccctggtctcccaactaggcttaaagaacctggcctggccatggaggaggctggcaaacccagatttcagtggcagtgggtacagacctggtatgttgaatgaatcaggcagtagacaggagcccagcttgtgtgaggaggctgggccagaactagtaggagctggggatggagcgaggctgcctgcaggacgatggttcaggggctgctgctgccgtctcctgtcctggcttcggggctctgagtggaagagatacaagcagataaaagggcaaataagtggggcactatgaggcagccttcactgacctgctggcttccgtggtcaaaagatgccagttttcaagcttgtcatcagacccacatccctctcctgaagtaactattaatataagatgggtagaaagacctactatttattacagttatccattctccaccagccttcatcctgctagtttttttttttttttttttttttaaaggtttccactctgtcatccaggctgaagaagtgcacaatggcacgatcatggctcaccgagcctcagcctcctaggctcaggtgatcctcccacctagcctcctgagcagctggcactataggtgcccgccaccatgctcagctaattttttttttgttttgtttttgagacagagtctcgctttgttgcccaggctggagtgtggtggtgcgatcttggttcactgcaacctccgcctcccgggttcaagcgattctcctgcctcaggctcccgagtagctggga

SEQ ID NO: 11775 - DNA, 1511 bp, Homo sapiens
atcatttcatctacaaatagttcaatatctatgcaaaaggaatctttaaaaaacatgatcataataacgtcatacactaaaaaaattaataattccctaatacaagtgtccaggcaatgtttaaaatttcccaatttttttttttttttttttttttttttctgttcatttgaatcttgctctaaacagggttcacacattgcatttggttgataagtctcttaatctgtggaccttgtaacctatttgaaaacaggtcatttttcctgtatctagtatcccatagtctgcacttacttggttacactcctgtagtgttacttagcgtattctttttttccctttatattattttctataaatggatagatttagagttgttcaattcagatgtgatatttttggcaggaatacttcatggtagtatacttctgtcacaatggcccaggattttgatgcacatagaacagctgtgtgtgactggggctctggaatggaagtgcttctggaagtctaacctcacagatgactgagttgtaggaatgtgatccctaagactgtgctattttgacaggagtagacactcgggagctgaccaagaagttgcgggaacaggggtctctgctggggaagctggtccagaatggaacagaaccttcatccctgccattcttggaccccaatgcccgccccctggtaccagaggtctccattaaggtacagaggtagagtgggagagtgttgcaagctctagcacagtagttatattctgcccacaattggggggtgaacacaggagagaatcaaaggaggctttgaaggtaggagttggtgcaggcatatcttatacccactgagcacagctgccaactgttgccctttattcgtctatttctcagactccacgggtattcaatacagggggtgcccctcggatccttgctttggactgtggcctcaagtataatcagatccgatgcctctgccagcgtggggctgaggtcactgtggtaccctgggaccatgcactagacagccaaggtgagtagctggggcctgttcagggcctcagacaagcagcttgggtggaagatctatcccttggtccaattgctaaaagtcagtaggagttgcagtgaagaagatagacattgggacttaacactctcatgggctgggggggctgcaggtgtgtctcctgtaattgaaatactgattttgatgtcatcttttctgcccactccagagtatgagggtctcttcttaagtaatgggcctggtgaccctgcctcctatcccagtgtcgtatccacactgagccgtgttttatctgagcctaatccccgacctgtctttgggatctgcctgggacaccagctattggccttagccattggggccaagacttacaagatgaggtgggacttgtggggagcagaaggggcccatacttgtggcatgaggggtggggtgtctcaggaatgagaagagagttggtgtttattcgtgtt

SEQ ID NO: 11776 - DNA, 1099 bp, Homo sapiens
gggtcttaaggagaagggctaaggttgcagggaggaaatgaaccagatttggggaatgtagagaaagatgtagtaagaaatagaagtcaattattaggggccaagagtacagggagggaaagaagaggagaatgctactctaaggctgtttgcaattttgcttcttcagcagaggctgagatgccattcttgtccttttaggcaattaaggccctgaaggaggaaaacatccagacgttgctgatcaaccccaatattgccacagtgcagacctcccaggggctggccgacaaggtctattttcttcccataacacctcattatgtaacccaggtatgactggggcaaggctggaatgaaaagaggactgggcaggggggcccagtggtcactgtgggttattaaactttgattgcctctctacccacaaggttctgatgcctgtaactcccctctccatcctcaggtgatacgtaatgaacgccccgatggtgtgttactgacttttgggggccagactgctctgaactgtggtgtggagctgaccaaggccggggtgctggctcggtatggggtccgggtcctgggcacaccagtggagaccattgagctgaccgaggatcgacgggcctttgctgccagaatggcagagatcggagagcatgtggccccgagcgaggcagcaaattctcttgaacaggttggaggggtgtttgggtaaaggaagaatggtggtgttttttttggtagtgttattttcttttttttttttttttttttgagacggagtttcgctcttgttgcgcaggctggagtacagtggcgtgatctcggctcatcataacctccacctcccagattcaagcgactctcctgcctcagcttcctgagtagctgggattactggcatgcgccaccatgcccagctaattttgtatttttagtagagacggggtttctccatgttggtcaggctgatctcgaactcctgacctcaggtgatccacccccccgaccctcggcctcccaaattgctggggttacaggcgtgagccactatgcccagccatgttattttctttatatctttttttatgtg

SEQ ID NO: 11777 - DNA, 1162 bp, Homo sapiens
ttcctgagacaagagcagctacttacgctcaggcttttagatgggctggcagtagcttccgtctgtctaccccctttctatcaggagttggagactccaacagataagcggatttttgtggtggcagctgctttgtgggctggttattcagtggaccgcctgtatgagctcacacgcatcgaccgctggttcctgcaccgaatgaagcgtatcatcgcacatgcccagctgctagaacaacaccgtggacagcctttgccgccagacctgctgcaacaggccaagtgtcttggcttctcagacaaacagattgcccttgcagttctgaggtcagaggtggcaatgagagcttccggctgggaaatgtggggcagaacctttgtatcagtgagggacccttgggagggaggaaggagagtgtgggagagctttagaggcttctgaccttggttccaaggatatttcctctcatctgtgccctggggtctcaaccctctatcagtctgtaccctactctctgggcctgtgtttcagaccctttttctattttagcacagagctggctgttcgcaagctgcgtcaggaactggggatctgtccagcagtgaaacagattgacacagttgcagctgagtggccagcccagacaaattacctatacctaacgtattggggcaccacccatgacctcacctttcgaacacctcatgtcctagtccttggctctggcgtctaccgtattggctctagcgttgaatttgactggtgtgctgtaggctgcatccagcagctccgaaaggtcagagagttcattttctttccactttccttgctattctgttcatctctagcaattgcttggcactaatcctggcatttcctattaattgccgtcccttactttggtcatagagctttggggtgggggtccttttaggccatctctcatgccccacacggtatatgaatctcttccccaacactttgtacctccttccctcccaaggcaggggtcctgtacagctctttcagaggaagctgtgctggcagtctctgaagtaggggctttggcttagtttctccacgattttctccacgattttcctcccacctgactgctaagtacccttcccctccctcttgcagatgggatataagacca

SEQ ID NO: 11778 - DNA, 1108 bp, Homo sapiens
gtgggttacccggaggctggatgatgcttgggggaaagtgtgaacaactcagctaagctccctgcctcctgtagtctgctcgccaattctgccagaccgtggggtacccctgtgtggtgcgcccctcctatgtgctgagcggtgctgctatgaatgtggcctacacggatggagacctggagcgcttcctgagcagcgcagcagccgtctccaaagagcatcccgtggtcatctccaagttcatccaggaggctaaggtgggaggctgcagacagtgaagtctctgagggcatgctgccagccctggaggagacttccttctctggtccagcagaatcataggcaccagggctgggaacagtgggctatgtggggctcgttaaaggaagagacaatcctagagtaagtgagagaagaaagtggccctatgtcccactgtctgtgtccccccgctaggagattgacgtggatgccgtggcctctgatggtgtggtggcagccatcgccatctctgagcatgtggagaatgcaggtgtgcattcaggtgatgcgacgctggtgacccccccacaagatatcactgccaaaaccctggagcggatcaaagccattgtgcatgctgtgggccaggagctacaggtcacaggacccttcaatctgcagctcattgccaaggtaataaggctaaaggaaagaactaaagggccacagctcttgcatgttctgtgctggccacagtgccatgaagccctgcactgtctcctgccttcatccaagtaggcagggaagctggagggaaagggctgtagctagagctcatggtgttggggcttatgacagtcagtgaccctgaaccctgctcagtctgatcccccagagctgaggacggagaggaagagtctaggcctatagatagtgtcagcaaggccaacctgcagaaggcctgaccagtcttctctgccccaggatgaccagctgaaagttattgaatgcaacgtacgtgtctctcgctccttccccttcgtttccaagacactgggtgtggacctagtagccttggccacgcgggtcatcatgggggaagaagtggaacctgtggggctaatga

SEQ ID NO: 11779 - DNA, 1117 bp, Homo sapiens
gaactcctgatctcaggtgatctgcccacctcggcctcccaaagtgctaggattacaggcgtgagccaccatgtccagctcacccttcctatttctgaatcttcctgtaatcttgctgcttccattttctcccaggattgattgatgtccatgtgcacctgcgggaaccaggtgggacacataaggaggactttgcttcaggcacagccgctgccctggctgggggtatcaccatggtgtgtgccatgcctaatacccggccccccatcattgacgcccctgctctggccctggcccagaaggtgagccactgcactcttcctggtattggagacccatatgcccctaccagccacccttgcttccctgagcccttttccttctgccccgccctatgggcccaggccactggtgccaggctagcctgtgtgggcatgggtgccagtgagccttacctctgtgtatcctctccagctggcagaggctggcgcccggtgcgactttgcgctattccttggggcctcgtctgaaaatgcaggaaccttgggcaccgtggccgggtctgcagccgggctgaagctttacctcaatgagaccttctctgagctgcggctggacagcgtggtccagtggatggaggtagggagtgtgcatgtggcaggaggccaccacccagtgtctcctggcttgtgggcccctgcctaagtgggctggtagcagtgaggattcaggggagctcctggggactctgggctctgatgagcacagtcagagattctgcacactccttcatcagttctttctgctcccagcatttcgagacatggccctcccacctccccattgtggctcacgcagagcagcaaaccgtggctgctgtcctcatggtggctcagctcactcagcgctcagtgcacatatgtcacgtggcacggaaggaggaggtaagagtacacctgagatcctgctgtccctgttgctttcccagtaacaccaaaggtcagggtagtccttaggggcaggagacagcaggaggagagtctggagacagcaggaggagggtctcgagccagcacccttgcaggtctacatcatcattttttgagcagggatgttg

SEQ ID NO: 11780 - DNA, 1147 bp, Homo sapiens
tgtagccactcctaccccaaggcactaatggggaccccatctgctttgcagtgctttggtcagttcatcctcactccccacatcatgacccgggccaagaagaagatggtggtgatgcacccgatgccccgtgtcaacgagataaggtggtgcagcatcagagtcagagactgcctcggggctggtggacgggaggagacttagtcctggacaagccatccatgggctgcacgataacacttcctttttttttttttttttttttgcagcgtggaagtggactcggatccccgcgcagcctacttccgccaggctgagaacggcatgtacatccgcatggctctgttagccaccgtgctgggccgtttctagggcctggcttcctcagcctcttctctttaggcccagctgctgggcaaggaattccagtgcctcctacgggggcagcacacttagatattcctggacatccagatagctcacatgtgctgaccacacttcaggctctggactggagctctctggcatgggggtggggcctcagatgctggggcccagtctgccccatcttcattcctgcaccttaaacctgtacagtcatttttctactgacttaataaacagccgagctgtcccttgatgctgagtgtagtagaacagagctttcttttagaaaattgagcagattcccaaattataagagcagcctcaccaggcagggctctggctagggctgcgtgcccacactcggcattttcacactcgtgactctttgggactcggcaggagcgtgttaactctgtgctctctgagtcctgtgtcgtgctgatgccagcgcttacctgggggctctggctggtgtccagccctccttcctcaattcagttgactcaaagacctgacagagagttctgccctcttcctgacactgggagaacactcatcagggtaaaaggaaggctgagcactgcggcctgtctgaggccaggcctggactcttcctcactctttctggttagtcctcctccagtggctaaggctgccattgcattctcaaaaccaccctggagttcttcagccactgtcactattaggagcccctcctatttcccatccctgggagcctctgcctgacattggacagagg

SEQ ID NO: 11781 - DNA, 1399 bp, Homo sapiens
gagcatctctctcttgttttctgttctcttcacaggtacgtttcagcccaaacctggactcctatggatggctggtatctggggggcagtcagggctggttcgaatccattttgtccgtggactcgcctccccactgggccaccgtatgcagcttgaaagccgagcccacttcaatgctatgttccaaccatcctcccccactagacggcctggcttctctccaaccagccatcgccttctgcccactccctagccttggcccacaccagatccttggagtgaagtcggtcaagaacaaatggcccctatgcacagagccataggaactgggggccttccctggacagtgatcatgccaggcctggacctttaggcctgcctccccaggactccttagatcccactctttctacagacttctgtgatcacagccccctgcgggcaggggggctctccctccaccaactctcaaggctcctcagcctaagactatggctcatgagaaacactcaggcctgacctaggcttgggagtcaaactgctcatattgagcatattgttaagtgggtaaagccaagtaaaggtactgggtgtttttgtgaccacttgtgaatgggtgtatggagaactgaaaagggtatctgcatgaaggctcctgtctgactattccaggatccaatattactgccttctgaaacttcctctttagggtaaccatcatgtatgcccacgagggtgatagtaattcgtgagactgaagttgcttagagtacttctttgaccaaggaataccacagacaccctaccgatagaacagtggctcagatcttacttgctcctgcttacgaagtattcccaatcactggtcatctgaccctacttgaacactcctgaacagtcatgttttttaaaatcttcctttatatcaagtcagagagtatacttctataaatttcactcatggatgttaggaaatctagtcatcttccctgtgattgccctgttaagtatttaaccatagctatcatgtgtttcccaaatcttctctagattaaatatcttcagttacttcaaccattcttttacacgtcatgatttttgatccttcatgatactgtcacattgttgactcattagaatgtttacctacttcagttctatgtataggaggtgtttagaacccaagtactgtaatgtattgttatatctcatcttgttagagtcctcttgtgggatgctgcagactcacagtgactatgatactgcctcctaagcaaggacacaccccagtgatgagaaataggcaaaccatggtcttgaaatgcctaggagtataggctggggtttggagggaaatagttggatgacctcaggaaatagaaaaaaacaggcagctgc

SEQ ID NO: 11782 - DNA, 1099 bp, Homo sapiens
tcatactggctctgggtggagcgcccattcagtcctcattacctttcattaattcctttcttcatcccatctttgatttttctctagatttagctcgatcacagcacatccagagcgctgggatgtgtccttcttcacggggggaccgctctgggctctggactggtgcccagtgccagagggggcaggagcctcgcaatatgtggctcttttctccagccctgacatgaatgagacacacccactgagccagcttcattcgggtcctgggctgctccagctctggggccttgggaccttgcagcaagaaagctggtgaggtggggttggacactgccatgggagggtggttgaggacagcaggatggggtctggacaggatagggggaagggcttggattgggctgagacaaggggagcttacctctggcagccctgcgtcccttcttcctacccaccatccccacatgctctctctctccagtcctggcaacagggcccactttgtctatgggattgcttgtgacaacggctgcatctgggacctcaagttctgccccagtggagcatgggaacttccaggcacccctcggaaggtacttcccagtcaactgtgggatggccctaggactcaaagccaggacaaagaggccctgggaattcttagagttgaaggaacgaaggttggagtgtagtggatggagtttttccagcaacttcatacagtatttcagggactagaacctcaaaggttttctgtgagtcagctgaaggcagcaagcctcagcataccttttaccctttaggctcctctcctgccccggttgggtctcttggctctggcctgctcagacgggaaagtactgctattcagtctaccccatccggaggccctgctggctcagcaacccccaggtgagtagcacagcaaggagaatggggctgctgtagtggtggtcacagcatagcagggcctgtctgtctccctggaaactcctctgggccagtctctcttagcacaaagccttactcagccacacacacaccctgcattgtgactcaggtttgttcttgagccctctctcttttgcagtcttac

SEQ ID NO: 11783 - DNA, 1193 bp, Homo sapiens
ggcccggctcttcactcaccctcgcgaacagccacggccacagcagccatcgccctcagtcctaggctccgcccgccgtggtcacggagccgccccgctgcctcgctccgcggctgcagggtccacagcgccacctgggctggaggctgagccgcagaagcgaagcgcgcagccccaatcggactacaatttccgacgggccccgaggccccgccccgcactacgggttgcaatgagggccaactccactttgggctccctatccggacaggtggctcttgccctttagactacagttcccagcatgcccaggcgattgcgtcccagaaccgacgtcccaccgccttcccacatcggatcgcagggctcccaaaatggcgagtgaggctgcggggactcgctgagcagcggagggggagcgtgcagagccgctgcggccctcacagtccggagcccggccgtgccgtgccgtagggaacatgcacttttccattcccgaaaccgagtcccgcagcggggacagcggcggctccgcctacgtggtgaggagcggccggagccgagccgggccgggcaggggcggggataacgggcccgagccatctcggagcggcctctgaggcctgaccgccacccttcgggcctggtcctgggccgccgactcccgacggcctctctgggagcttatctcatgtgtgtgattcgtgcagtggtcgcccgagctcctgtaggcccttaggccgggtcgcttccccgagctaggccgcagctgccctggtgggcgtcactggcctcttgggcagtgagactgcaacacaagcgtccgaatttcccccggactggctcttcagctttgggacttggccctggcgaaaacaagcgaactatccctcgggagattagcgcgttactccggcgagttgccaggcaacttccggccagggttctcaggggggttgcgcagaccgcaaccctaaaatgcttgactacttttgtgtcctcaggcctataacattcacgtgaatggagtcctgcactgtcgggtgcgctacagccagctcctggggctgcacgagcaggtgggactagcacccctgccttgagacagcttcaagcccttccctacacgtggacatcagtgtctccctttacccgctcttcttgttcccgtaggctgtagttcccctttaatc

SEQ ID NO: 11784 - DNA, 1248 bp, Homo sapiens
ccattcctctcctaccaccctgactcagcaagccagccctcttgtgggactgtagattcctggcaaggtgttcaaaccctgtggctgagctacccccatccctttcttagctgctggatcagtgcctggcaccagacacttctggggatggtacagggtgtgacaacatgacctgcatcatcatttgcttcaagccccgaaacacagcagagctccagccagagagtggcaagcgaaaactagaggaggtgctctctactgagggggctgaagaaaatggcaacagcgacaagaagaagaaggccaagcgagactagcagtcatccagacccctgcccacctagactgttttctgagccctccggacctgagactgagttttgtctttttcctttagccttagcagtgggtatgaggtgtgcagggggagctgggtggcttcactccgcccattccaaagagggctctccctccacactgcagccgggagcctctgctgtccttcccagccgcctctgctcctcgggctcatcaccggttctgtgcctgtgctctgttgtgttggagggaaggactggcggttctggtttttactctgtgaactttatttaaggacattcttttttattggcggctccatggccctcggccgcttgcacccgctctctgttgtacactttcaatcaacactttttcagactaaaggccaaaacctaatcgtacgcatcgtgtccttttttttctgctgccgtggcccccgacttggtcccatctgtagcatgtggcgagcccccatgtgagtgtgtgcgtgtgctcgtgtgtgtcctgcgcgtgtataggagagcccagagcgagctgctggtaggccggcctggcgggcgtcgcggctgcccctcgccccctcctgcagccagaaatgatctagttcccccagggacaggttgggaccggtctggctggcctgaagcctggagtcgggcaggacgcctcctgcgctgctccctggccggctccccgctgccgctgattggcttgctccccgcctcgtcacaatcacttcccggtcacgccattgaggctcccgccgcggccgcttcccacggactacgcgtcccgtgcgtctctgcggcggcggaagcggaagcgagtacggaggtaccagctggtctccgtaggggggtagggggctccatgaatggaagcggcggcggcggcgggagcggcctgagctgggcgccggggccaggg

SEQ ID NO: 11785 - DNA, 1248 bp, Homo sapiens; identical to SEQ ID NO: 11784

SEQ ID NO: 11786 - DNA, 1197 bp, Homo sapiens
gggactacaggcgcccgccaccgtgcctggctaattttttgtatttttagtagagacggggtttcaccttgttagccaggatggtctcgatctcctgacctcatgatccacccgcctcggcctcccaaagtgctgggattacaggcgtgagccaccgcgcccggccaacctggctaatttttatgtttttagtagagatggggtttcaccacgttggccaggctggtctcgaactcctggcctcaagtgatccacccgcctcggcctcccaaagtgctgggattacaggggtgagccaccacacccacccacctagattgtttctaaggttctttccacttctagaattctatcatccaagtacatgaaataaatatacagtgaacagtcaaaaataagcccagaatatgtgtacattataagaggtgaataaagaaatcatgggatttggatgtttaaacataatgaggctgaggctgtgtgggcacagagccctaaaaaggtcggaagaagaaaacctcagcaagggctaaagatttgtttagacagaagagaagctgaaagacaggtggggagattcaagagcccaagctgaagaatccagaacgtgaatcaattcagctttatacatttgcagatgagcccttctgactgagtgttccttcgaccccctacatctcaccagctgtttgacactctgggctgcagagcgcgtggcatagtaatgagcgatcagcagcatcgtcttgaactcctcatgggctggagagtttgcctcactggacttcaccaggttttcacactagaggagggagacagcacagcctggctcaggggtcagaggagtgccagggccatagagtggtctctgatagccacctggcagaggaaggtaaaatacatctgagaataaaggtttatgtgcatcaaagaagagatgaggacaaggacagacggagcagccctttcgcttcctcaccaggttgaagaggacatctcgaagatcagcccagctatgataggcctcggcacagttggttccaggagagctcaccatgtcagtgaagatccttttgtagatattgaagttctagaggtagagggaagaaggggatctgagaagggcatagctagaagagaaagtcactggaagtggggccaaagggaggagaaacaggctttgtgtgtagaaatggg

SEQ ID NO: 11787 - DNA, 1101 bp, Homo sapiens
tgcttaggagtttgtcatcttgatcctagtttctgagtccttaaactaggtattacggatggtactcttctaattctggattttgaaggcactttttgcgacagtagatcatagtgggaagaattgtacattggtgcctctggtgaattttgggcatttgatcattttgggggaggaaccaagacaacctggaagtgaagtgaaaggaacataggaaggtagaaagatgtggcatattacctgagaaaaagtaggagactttcaggttgtgttgaagtagggtgggtgattggaacagaattgcactaggatggatttatgttgataatcatccatccaagctggttttcctaaatctattactatattggatctttttccttcttatctttgctgaagtagaattccctcttttcatctctaacaatccctacacatagcccagttatgttgctgaatttaccagtaattcttttttgtttctctcttggaaatagggaaactttgtggctggaaaatacaaatgtcttctatgtcagaaagaatttgtgtcagagagtggtgtcaagtatcacatcaactccgtccatgctgaggtgaggtttttgtaatcctgtgggcctgatatgtaagccacaagagaggtagactttgtccctattgttatggactaaggctgtcaaggaaagtatctctaaagtggttaccagagccattagagttaaaatattctctaaacttagatatataattgtatttttctgtgaaagtatttgaagtcactgtgaggggtgggcggggtggcttatgcctctaatcccagcactttgggaggccaaggcaggaggatcacttgaacccaggagtttgaggctgcagtgagctggttgcgctactgcactccagcctaggcaacagagatcctgactcaaaaaaaaaaaaaaaatcactgtgactgtaagcatccttgaactctttttttttttttttttagacggagtctcgctctgttgcccaatctggagggctcactgcaacctccacctctcgggttcaagcaatactccctgagtagctgagattacaggcacctgccaccat

SEQ ID NO: 11788 - DNA, 1179 bp, Homo sapiens
caaacctgagcataaatatagaaaataagtaggcattttgtcagacagagaagtagactatgagaaggtgatcagtatggtcagacacttcaaatttaatatttgtgacagctaataaaaatccaaaagacctgggttattttcttgacctgttctttgcctgtggtattaccccgaagctgggatgggggtatttgggagtgggatggactagcagtcatggaatggaaagatgatggggcattttacttgtgataaatatttgtcattctttaggttttctttgtcacctacttccataagagtgttttataatcactggtttttatactctgatgttaggccatgagacaggctgttaacattttgacaagagataacaacttgacattgacagatcaaagtcttcagcttctcagatccttggattgtgccccaagatggtattggagtgctgctgatgtggctgtgttgctttagttcagcctgtttattctttgttgtcctaagattgcaaatgttcagtaggtgattgagggattcagtaggtgatagtgcctgtgaggtatgccaccctggagagggctctgtgattttgtgttgaaatcggaatttgttgtcattgacatctttttcttttaggtgatgaaatttattgagaaggcccagaacatgtccaagtaagtgatgtcagtaacacccatttattactctgtagctgacatatttctaggcttcatggaggatctgggataccatcagcctctgaaagaatatagattgagatgaaaccattaggagtgaaaaaaaaattggcaaatcattaagatgctttagaatatagagctaaatttaatatcatttcatcctcaattactttgatccccaatttacatggcttcttaggagctcttttgagactttgtcccaattcagttgtccacctgccttctcttgggaaaccatgcttgttgtcattaaagtatctgaaatacctttctaattcttatttaaatgaatatagtctacatggttcagagaaaattttttaatttacagagtgtcagaataggaaatatttgttcttatggccattacccagttagctgttgttcaaggtttactttttttaaaaaagataatttattgttttataaaaattcaaaccatgcatgatat

SEQ ID NO: 11789 - DNA, 1478 bp, Homo sapiens
catgtatcagtatgttcttttttattgctgagtgatattccattattgtggatgttccacagtttgtttatccattccccagtggactgatatttgggtagattttagctattatgagtaaagcaactataaacgtttccaaatagatctttgtgtagacgtatgttttcatttctcttggttaaaaatacctacaagtgggaccttattttagctactatgagggaggtattctttctacttataaagaaactacattttgggcagcatgatagagcatgcttctaggagacatttcctttttgagggaagtgagtacttaagtttcttagaagtaatgtactgttttctgatggatgggtgacgggctctaatcagtttgtctaatgaaagagttgaaaaagaattgcccttttttccttgcagttacagaggaaagccatgaagagccagcattccagaattttatgcaagaatcgatggcacaatactggaagagaaacaataaataggagactttagcacacttcacttgtttctagaagtccagaattttggacctccacgtgaaagaactgttcttacctctgaactgggggctcccataagggataattttcctcagagtagcaaagtttctcttattagagaaatcttgtgactcagatgaagtcagggatagaagacccttggacctggcaggttaatgctgattattccttggcctttcccttgtatttatgcaaggaaggatatactgagctgatactcttccaagcctacaacttcaagttttatcatttgaactcaagtacttttgctgctgaggaatggaatcaaaagaacgtagtctcctggtgaccacctcagatctctattattaggctagatgtatagcctctactcccccagcttcttgctcttgaccctgcactgtaagttgcccttctattagcagccaaggaaaagggaaacatgagcttatccagaacggtggcagagtctccttggcaatcaaccaacgttgctatgaaatatgcctcacactgtatagctcattataggacgtcaggtttgttgaaaaaagtgggcaagacatgattaatgaatcagaatcctgtttcattggtgacttggataaagactttttaattttaactttgttctaagactgcttgtcatgatttcaaattagaaaattatataattgcaaacagcttcacttctcctgttcaacagaggcttaaggccagatgtccaaacttgtctcaataaggaggtgatattttactaaagtttcccacgtgcacatactgactaaatacagagctaggcccagtttgtattgtactctgaacttaatgcaaagtctccttggtgattttcgcaaagtccgtggatttgggtcagaggcacatttcatacataacagcccttataaacgtttgccctgcctccacattttacagtatcttaaa

SEQ ID NO: 11790 - DNA, 1238 bp, Homo sapiens
aacccatctctgggaagtagaggtttagtgtctattactcttccagacagcgtggtccacttggttcttgctgctctctttctggagtccagctcccagtctgtccttgcttacctcctacaagagtggacattaattgggtgaaaacattgttttccatttttgtccctagttttctttcttaatgtgaatatttcttcattggttgaatatgacttgtggcataccaaggatgctgctgattagctagtggccctatagccattttctccagtctgccctggctcctgggatggaggaactgagtttgcaaatcagctccatcttcatatcaaggaatagtaaaataagagaaaggtgagggcttatggtctgatatgtattttttataaaaatggcgatgatacttaataattttctgccacaatttttttttctccctccatagtgaaacaaagagtcctcttcgtggaaaagaaaaaaatacgctccctttaaacggtggattgaaaatgactttgatttataaagagaagactgagggcggggatactgattcagaaatcctgtagcgtgtaataaaagaagaggaaatggcatggaatcactgcctcctgtgatttgaaggccattgtgaaggaaaacaatgcagtgaaagaaagttcttcatattaggacagatatcattgcatcacatttatttatctttctgggtatttttatagcccttaataaaaaatattaaaatagcctgtgctattgtgtcttagtgatgtttttccccactatttgatgttttaaaaatcaaccacattactaaaaaataaccattgttccatgtaataaatgtttccataacaacacttatgtaagagtttccagcctgctccctctgtactcagagaaaaggcagagtaacattccagagtgatcttgaagaaactcccatgtaataacagagatggcaagggggaccaggaatgacaaaaagaggagccttgtaacacaaaccaagagaacctctatttctgatttgtgcttatataattaggaaaaatgccacaggcctatattttcaaacccagatcaccaaagcagtatctaggattttctgggacagctttggattcctttattccctagatttttctttccttttaaaataaaagaaggtatagtgtttcaataaagccactgctaagacttctggggcatggtggtaccacacagctaactag

SEQ ID NO: 11791 - DNA, 1169 bp, Homo sapiens
tgtcttgtagcttggaccaggcccttgtctttgtcctgaaaaaaggcagccggacctaagtgcagatatctcataggaattggcagccaggagggtgcacgtacaggccctttgaatattcctgagagatgtcacagtagtgaactgcatgcatctcctcggaaaaatccggagggctttgcctcagcagagaaggcaaatccaacccaagatgcatgaacaataaataacaactgttctgagttagcttgaaagctcccagttgcactttgtttcaagttgtttgtgctaaccacaattttttttctccccttctttcccaccagggcttatttcaaaacctttgtccctcagttccaggaggcagcatttgccaatggaaagctctaggaaacaccagtcttgagaggtggccagccagactgcctgtccacatgcgtgtcagcacatacagccgcttcctggaagccgcctggaatgtcttcacggcagcgttttgctcacacagcagcttttgcacgccccaggcagccccgactgctgaaatccaacttgagctggctggtggtccctggatcctagagcccttcacttcgggttactccctctttcttgcctctatttcttagttggaagaaataaactcacaaattatggtgcagtaattttccggggaaagtaaagcctcaggaatgcccacgcctttcttccaaagcctttgtctctgagacctcttaagttctaagattaaatgcccctcgctgttcttcctctgaaactagtgtcttccctctgtgcgtgcatgtgtgtgtttcatacccaagcatttcctatctggggcagtccttcacggcgagaaggagttacctgagtcaatgtgaccaacctgctgggtttcagccactcatccagcctgacctaaggctgttgctcaataacaaatggcctctagcacacacagccccacccgctgccatccatacccctccagccccctgtgtggacaccttgttcccaggccagccccacacagtaggcagtcattaaagtttggtgagtgcaccaacggctctgtccttccggctctcccctctccatcccctctgggcctctgcagcactgtgtgaattatacacaaagacaaagcttgggtgtcatggtttatcaga

SEQ ID NO: 11792 - DNA, 1188 bp, Homo sapiens
accaagacaatcctgaaaaaaaaatggaggatactagccctaccaaatataaagacttattaaaaagctctagtctgttattggctcagggataagtaaaatagactaacagaatagactgtggtgctcagaaacagtggaaccgtaaggaaaggatgaactgttgaggaaataccactgggttgtttggttattcatatggagaaactacccaaaagatgaacagccttttccatgtattgttgtgctgtaagtgccatgcacatatttcctatatgtggaaagggttggaaagtactaccttaagaggccatggaagattatatttgtatggtttgtatggttgctttaacaaaagtataagttacataggctggaatacttaggcaagtgatggtcattgtttagtaaaaggtaagagggcaagaaaggaactgaaatttgatgtagatgtgctatattctataaatctgtaaattttgttcttaattgctgtatttctgtcctttaaaggtttgctctgtgatttgctatggtctgatccagataaggatgtgcaaggctggggagaaaatgatcgtggtgtttcctttacttttggagctgatgtagtcagtaaatttctgaatcgtcatgatttagatttgatttgtcgagctcatcaggtatgaaatataaaactcttaagctttttcttttttctttcttttttttgggggcagacggaggggcagacagattcttgttctgtcacccaggctggagtgcaatggcgcaatctctgctcactgcaacctgtgcctcccgggttcaggcagttcttgtgcctcagcctcccaagtagctgggacgatagccgtgtgccaccacacctggactcttaaacatttattatttgttaacttcacataagccctctcattttgttttgaggaaacatatccaagaaagctaaatgagttgtacaaggaaagcagtaggagaggtggcagagccagttcctggatctcacacttaacaatctagtgatttgttaaccttttatcaccctaaaagaggaaatgtttagaaatattttggggctgggcatggtggctcacatctataatcccagcactttggcaagctgagatgggtggattgcttaagtacaggagtttgagaccagcctgggcaacaaaatgagat

SEQ ID NO: 11793 - DNA, 2532 bp, Homo sapiens
catagatcttctgactcttaaaccagtgttcttttcctcacaacagagatacactaagttcaaaaagttttttacttaaatctaaggattggatagttgatagagttagtgtacttttgttattaaaatatgagtggaatgacaaagttcagacatttgcacactttaagaaatgtttatggaactttgctattctacatttttattgcatttttgcagtttatgccatttattgaaaatcacaattgtaacaattttcttaacttctgtacatgaaaaaataacattatttgttaataatttactttaagatattgaaaccatctgaaaagaaagctaaataccagtatggtggactgaattctggacgtcctgtcactccacctcgaacagctaatccgccgaagaaaaggtgaagaaaggaattctgtaaagaaaccatcagatttgttaaggacatacttcataatatataagtgtgcactgtaaaaccatccagccatttgacaccctttatgatgtcacacctttaacttaaggagacgggtaaaggatcttaaatttttttctaatagaaagatgtgctacactgtattgtaataagtatactctgttatagtcaacaaagttaaatccaaattcaaaattatccattaaagttacatcttcatgtatcacaatttttaaagttgaaaagcatcccagttaaactagatgtgatagttaaaccagatgaaagcatgatgatccatctgtgtaatgtggttttagtgttgcttggttgtttaattattttgagcttgttttgtttttgtttgttttcactagaataatggcaaatacttctaatttttttccctaaacatttttaaaagtgaaatatgggaagagctttacagacattcaccaactattattttcccttgtttatctacttagatatctgtttaatcttactaagaaaactttcgcctcattacattaaaaaggaattttagagattgattgttttaaaaaaaaatacgcacattgtccaatccagtgattttaatcatacagtttgactgggcaaactttacagctgatagtgaatattttgctttatacaggaattgacactgatttggatttgtgcactctaatttttaacttattgatgctctattgtgcagtagcatttcatttaagataaggctcatatagtattacccaactagttggtaatgtgattatgtggtaccttggctttaggttttcattcgcacggaacaccttttggcatgcttaacttcctggtaacaccttcacctgcattggttttctttttcttttttctttctttttttttttttttttttttttgagttgttgtttgtttttagatccacagtacatgagaatccttttttgacaagccttggaaagctgacactgtctctttttcctccctctatacgaaggatgtatttaaatgaatgctggtcagtgggacattttgtcaactatgggtattgggtgcttaactgtctaatattgccatgtgaatgttgtatacgattgtaaggcttatgtcactaaagatttttattctgattttttcataatcaaaggtcatatgatactgtatagacaagctttgtagtgaagtatagtagcaataatttctgtacctgatcaagtttattgcagcctttcttttcctatttcttttttttaagggttagtattaacaaatggcaatgagtagaaaagttaacatgaagattttagaaggagagaacttacaggacacagatttgtgattctttgactgtgacactattggatgtgattctaaaagcttttattgagcattgtcaaatttgtaagcttcatagggatggacatcatatctataatgcccttctatatgtgctaccatagatgtgacatttttgaccttaatatcgtctttgaaaatgttaaattgagaaacctgttaacttacattttatgaattggcacattgtattacttactgcaagagatatttcattttcagcacagtgcaaaagttctttaaaatgcatatgtctttttttctaattccgttttgttttaaagcacattttaaatgtagttttctcatttagtaaaagttgtctaattgatatgaagcctgactgattttttttttccttacagtgagacatttaagcacacattttattcacatagatactatgtccttgacatattgaaatgattcttttctgaaagtattcatgatctgcatatgatgtattaggttaggtcacaaaggttttatctgaggtgatttaaataacttcctgattggagtgtgtaagctgagcgatttctaataaaattttagttgtacacttttagtagtcatagtgaagcaggtctagaaaataagcctttggcagggaaaaagggcaatgttgattaatctcagtattaaaccacattaatctgtatcccattgtctggcttttgtaaattcatccaggtcaagactaagtatgttgg

SEQ ID NO: 11794 - DNA, 1174 bp, Homo sapiens
aagctatttgttgactcaaattgaagttaatgcacgtttataaaggtaaaaacttttgaggctcttttcttgacaactaagctagaatttgtggaaaaattaggagagataaaggagagttggctgcttagatatggacttacggattcatagatttttgggtatgaatctctttggttggggagtgaaggcttcgcttaggttggacctgtcaggaggggcggcctgtttctgagaagtggaaacagcattgaggcttcttggacctgttaggagagtaccaagaacatactaggttttcctatttgctgccttttttccataggggtgggagacgggggacatagaattacgagtttctcttcccattggagggatttctttttgaagtagtgagaagtaaatcacccaatagcttctctcttccccccttttaaaatgtcttttgtgggctggtgggcatttgtatttgttcattaacgatgttttagtatttgcaatactaaataaaaacattgtttttctttttttccaggaaagtccccagaggaaaaaaaggaaatcagaagctgtaggaatgagtaaccagactgacttattggctcttggcacagcagttggtagcattttattatacagcacagtaaaaggagagttacacagtaaattaatagtaagtgtgtgtatattttatttaaaagtgatgtgacagggaagctgattattagagattattaaaaaaaaaacacttcaaggtatgtgatgggatctgtgcagtagggacagttttcagtctcatctacgtttaaataactgaatagtaatatttgataaaagctataatagttaacagcagtccttattatgggtcagagtatgaagacttattgactaggtttaaaataaggaagggttacaggaactctaaggaatcatagatagcagctgtggaaagcagctccccacctcttgacctaggggaataaaggaggcagttgaaattactgctaacactgagatcttttaggggcaagtgttgtgctgctgttgctgtctcttgaagagtggccccatgggcatgggatcgagacttcaaactgagaaggaggctccagctgcctggtgctagtgtctctgatggagatgatgagattggttctcctagggttggata

SEQ ID NO: 11795 - DNA, 1052 bp, Homo sapiens
tgatctgcctgcctcggcctcccaaagtgttgggattacaggcgtgagccaccgcgcccagccgaaacaaggtttttttaaaatttaaattttattatatacaccaactatgtatccacaaaaaagaaagttaccttttaaaaaacaaaacagattttgacacagggtctctctctgtcgcccaggctggactgcagtgacgccatcatagctcattgcagccttgacctcccaggctcaagcgatgtctcacctcagcctcctgagtagctgggagtataggcgcttgccaccaggcctagctcaaaaaagattttcttaataaaaaagtttttactatgtgatgattatggtaattttgatttctagcctacatccagcatttagtccacttactgtatttgactgtggagatttagtattatatttttggaggaggaaaaagctttcactcagggcttacggaatatttggtgctgtgatgatgccttaatattgtggtttcgactcactgagagtaaaatgaggacctacaattccttggctgtgtctgagcacccaaagtatgccttttaaaatggatagaattaagtgaatctttaattcaagaatgtaagaaacaaaggtgcggagtggtagggtcatgggagttagaaggaacatctaaattttcagtattttcagatggatttttttaaaaagtgggagaattatagcacaaataaccttatttgcttagaattgaattgaacagttacttcatcgtggagctctcctttccgatatgtatcacatatggcttgttttgataatatatactattaatttttgtccctgctttgaatctgctctcctaactgagatttaactttctctagcatttcacaggacatgcaacgccagtttcgtcactgatgttcactaccatcagacctcctaatgagagccagccctttgatggaattacaggtctttatttcttatctggagcagtacatgaccggttacttaatgtctggtatgtagttcttttggatttgggaggtagcatt

SEQ ID NO: 11796 - DNA, 1052 bp, Homo sapiens; identical to SEQ ID NO: 11795

SEQ ID NO: 11797 - DNA, 1100 bp, Homo sapiens
ttataatgttaattctccccaaattgacctacagattcaacgcagacgcattcaaaatcttaggctttttttgagaaattgacagactgattctaaaattcaaatggaaataacaaatgacaataggcaaaatcattttgaaaaagaagaaaatcattggaagactaagattgatttcaagacctattatcaagcggcactaatcatgacagtgtggtattagtgtcaggatagacagacagatcaatagaaaaaaacagaatgttactcattgtttaaatctgccacaaatgcattattgctttctcttttctcaagcaaccatgttatatggtagtgacatggatgcttccgttgttttgatctttagtcactttactagttttcaaaagatgacaaagctattgggaatctcatgtgctgatctccatgcctccttaggtgtttgcctttttaggaagaaaattaaatctgtcttgctatctaacttgctggttttgttatctaggcaggtccgatcagaaaacaaagaaaagagtgcagtgatgtcatttacagttaccgatgaacctgtctatattgacttaactttgtcagaaaacaaagaagaggtaaatggctcgatttttgagaatttgtttttgggtttcacagatgttatttttacagtcaaggttttgatgatttaatgacttgagaaatagagaggacctgagggagtaacaacaaactgtaacaaattttagactgttcaaaggaacttaaatcactgtaataatctcttatgggggaagggaaaagtttgtacaggacggtagtaaattcaggaattcattatgtgaattaagaaaagttgttcaggtggattttgttactaggagtatgtatatatgattctttaatcagatgaaattgttggtgatagctcctaactaaggtgtgtgtgtgtgtgtgtgtgtgtatttctttttttatctctttttttcttttttcatttttttgagacggagtttcgctcttgttgcccaggctggagtgcaatggcacggtcgcgactaaccacgacctctgcctcccgggttcaagcaactctcctgcct

SEQ ID NO: 11798 - DNA, 1114 bp, Homo sapiens
ctatttttttgcatctttcccgatattgattaattacatgggcatatagaattatgtatcactttaaatctttattggtttgctgcatctgactcccccgatcctatttaatatcgtgtcaggacatacagatgcattttgttaatcaacagtgctacctttgacttgcttatggaaaggacaataggagagttaagagtagaaccatttactattttgagcagactgtttcttaaaaggatgatgaactgatacgttttctttaaaacctgttacgtttaaaaattctgttgaactttaaaaaataaatgtgaaaaattcaagcagttcatagctgaggaaagtaaaccttggtacccaatgtcttcagaattaccatttttcttaactgccgtcagtctgagtggtgatcgtggttaacaattgagtgtggaagtcttccatactttttaatattttataaaaatgcacaagtagtcatttatttttcattttgttcttattcccagttgctttgtttgacactcttttttttttctttcctctcatcttcccctttaaaaaaaatatattttcaggctttaaactccagagaacctcatatgtgtttagtaagagatatttcaaactgctgggcccccaaagtagaaacagctataacaaaggtgagcacattacaaatttgaagttttaagaaaaagaatatttctttgggtgaatggaactgttacttagtattatgattaaactgagttttttattctttaatatctttattctcttgtcttataaattttgtgggattatggttttagatgtcaagattgtactcctgatttgttgagtgaatgaatgaatagaagactagcagttgaagaccttggatgtggttcttccctgcccaccatgcatgatcatctgggccaggaagaatgtagggataaatatcaatatcagatttatcagtagatagtttttatcaatctcagtacttaaaagagcattactttgctgagaggaatgctgtatttcagggtgtaataaaaccgtcatggggctagaatataataccacaaaagcataggagcatcatcatggtgctccattttgcata

SEQ ID NO: 11799 - DNA, 2096 bp, Homo sapiens
taagaatgagaccttcatgaatgctttccttgttggtatttcgactaggataattgggatgaagatgaggaggagagtgaaagtgaaaaagatgaggacgttgaagaggaagatgaggatgccgaaggaaaagatgaagaaaatggcgaggacagagatacagcaagtgaaaaagaattaaatggagattctgatttagatcctgaaaatgaaagtgaagaagaatgaagacagcaaagcaagccggtcaaactatataaactctggctcaccttgcccagtggtgagggctgcctctgtgccaggatgccaaggaccgctgcacatttccaaattcacagcagtggatcccatgccactttgctgtcctgagcaccccagacttgactgtgtaaataagagtgtttcattcaaatgttaataaactttacacagtatatagacacattttctgcaatgtactgacatcagtgtccaatatatggtatatttttataatataatatcctagtatgattggttatatcaagaattgacaagtgcagataaagacctttcccataggagttcaagaactggactgttgtgaagaagtcagctcttatctcaggttggtatctttcatcaaatccagatgcaaagcagcactagtgaaaatttttttaatttagtacatttaatttggtacattttcataaaatatgaagggataactacaaactggagtaaaaatgatggtaattaaaaaaaatcctcagtatccctagcttgtctattaactgtgataatctgacttgagtcagattgaatatttggagtgcttccccagaataaccacttatttttgaagctatcatgtgaagtatttttttaaaacaaaacaaaaattatggtcattaaaaaactagagaattagccatattaaggatttttcttgactgcaaattacttctaaagaatcatcagtgtatagattagaagtgctcattacctgcaacttttaaaaaaaattcagttatagctgcttttgaagaggtttccatttttatttaaattactaatggatcaaagaacaattgtttattttttctctttggttttagatattaatgataaccttgttggaattttttttccaaagaaaatatttttataattaaataatttaatgtttttcttccttttcattacctactcttggcagtgttagggtatctgtttacctttaaaatgataagtctcactcaagattttttatgtatgtataaatattttggtgtgctacaaaagcctttgcaaattatcagtagtagtttttttttttttttttttttttttaaagaatgagccgatattggcttagtgctcactaggggacatgcacatggaagctcacctctaagaaagggctgggcagatggatttattttttcccacctgtgaatatgtaaaacaaaaccattatctttgagggagtttttaataccaatgacagaacagagatttgtgtgctcatcttaagagccagagccatataagcatcttgggaaagcaagtttgaaccagctgctggtgtaatgtacagttatatttgtctataaatggagctgtttatggcaatttaataccattctctttgtaaagtgaataaatattcatctttacccagtgcttgtcttgtggtatatgtagaggaatacagccacatgtttgggcttgtggtgtgaaggtttttaaaaagcagttttgctcccctggcattaaataggtaaatgctttcaaagcttgtggataacctagaatttgcaacgaagtgaaagaaccaagacatttgtgttagtctagtgtcagctatagccagttgattcttcatgcattcccacttggctgggttgtgacttcacaacccagggctgtagtgacagtaaagaaagaggcctgtgctgataatttcagtcctttactggtaaccaacacttggcttatgagtccggtttcccttatacctgactctgcctaaagaagtaaatgatgacaaccatatggtaatttctaattatttttttggtttagaaaaatctggagttaaattagtg

SEQ ID NO: 11800 - DNA, 1503 bp, Homo sapiens
gcgttccttctatcaaggggagaagaatttttattttaccggacagagtgtcattccaccttgcaagtctgaactcagggtccttgtggtcaaattgctctctatactgtattggaccctgttcagccctgcaatgtgcctactcatatatttgtacagtcttgttaagtggtattttataatcaccattgtaatctttgtgctgcaagagagaatatttggtggactggagatcatagaacttgcatgttaccgacttttacacaaacagccacatttaaattcaaagaaaaatgagtaagattataaggtttgccatgtgaaaacctagagcatattttggaaatgttctaaacctttctaagctcagatgcatttttgcatgactatgtcgaatatttcttactgccatcattatttgttaaagatattttgcacttaattttgtgggaaaaatattgctacaattttttttaatctctgaatgtaatttcgatactgtgtacatagcagggagtgatcggggtgaaataacttgggccagaatattattaaacaatcatcaggcttttagcgacaaggaacacacacatttttcttaaaggcccaatcctaacagactccccgtaccagaggcagatctggaactcgtcaacaacagcccggatcacatgctgttactggactgcccaggtcacctcattgaggtgagcgctgtccctccaggtactcaggcaggtggtgcccaggctccctcccttggcgtccttcttcctgcgccaaacccatctcatccttaagatcagaaaatggaaccccctttgtcgtgaaaccgatcaagcattttgacaggaagcccttcattattcataacattgtatgctgaccaagacgtcagaagaccacctgtgcccttttctctcgtggaagataaaacctggactcagggagcaaccacaggctctccactttgaaactttagtttgaattttaaaagataggaagtaatacagtttaagttcctttctcacactcagtattgcatgcttagtgctggttttcttacaacattttggcaggtgtagctttttctgttaaaaatggtatacatgaagtcacatacttttttaaaggaacactcagaacattctgtcattccagtcagaaactgtcttttgaaatatttctttacaacctaccaaaaaaggaaggttgttttttctacatgtgcttgggtatctaacatctaccattaaaacaacaaatggcttgcagacagggcagtaatggtttatcctaaattactcaaccccttgtagccttgacaaattttaccttaaaaccaaaatgaaacacaaaaattaatccttaataatgatagcaagtgatctttctttttagttttagccttcctttttcaatagtaatatttaaacccacttttgaccaattgtttgcccaaatattcttgtcatttggagtcagtggaaaatccagcacacc

SEQ ID NO: 11801 - DNA, 1147 bp, Homo sapiens
tgatggtttttataataggataggattaaaataggtgaggaagagtttaatggtcttttataatcacagaaggatttggcagatgactgtagccttgataagtacttgaaaagaattgaattggtgctcttctgatgggcttgtttttattttttgagatgttattatacctggtagtaaaatagctttttttacctaaagaggtagtatatatttctgtagtttaaatggatatttttagtattctgtatgactcatatttttaatcgtacccttgtaccctttaaacatttaatttatggattttaagaattcatcaataataattacatatgttatccttaccactattaatacatattccactttctaatgccaacacatttggaaaactttcatttaagcatcttaaatgacattttttttttttctgttttctttaagccataaggatgagtttaccattattcctgtactggttggagctctgagtgagtcaaaagaacaggaattcggaaaactcttcagtaaatatctagcggatcctagtaatctctttgtggtttcttctgatttctgccattggggtaagttctagattttaacatatcatggtagatgttatatacttctggttaaaggtatcttttcattctaagctctgattttcagttttttatcactttccttggaaagttttacttctggcagcagtgtttaaaagtgaataaaaaatcttttgatcctttaaaaaggatcagattacaatagtggattatgggtacatttccaaaggcgactggtataattggattcacactgtgaaggcatccttgtttagacacttatttagtgggagttaagatcttttaacctcatttccaagtaggtgtgtatggtagattctctgaagttagttttggtggataaatccaatgttctttagagtatagaagagcactgtgtgctgtgccagtccttttccacatttccttttttgtaattagtcttttttttttttcccctttggtgcttagtttttactcacaattgccatcagtttaaagctaccctccaaagattataaaatattggctattaagcactgtggtcatcattggtaatgtttttataagggtaaggactc

SEQ ID NO: 11802 - DNA, 1188 bp, Homo sapiens
cttaaaggccatccaacaaagacagaaataaggaattgaacttaactgaggagcaagtcattattaggtgtattagtttgctagggctgtcataacaaaataccacagattaggtggtttaaacaacacaaatttattttttaacaattctggaagcttgaaattcaatatcaagtttctgtcagggttgggccccttctgacatgatcatatctctgtgcaggcatacttctggtgtctctttttcctataaggacaccagactcattggatgaggtccccactctaatggcctcatttgaacttaatcgcctctttgaagaccttatctctaaatagcactacagtctgtgctactggggattggttcttcaacatgtgaattttggaggggaacacagttcagccattaacagttggtaattaagaaggaaaacaagtgatttgtaagaattacttttttctcttttatttaataaggtttgtgtagaagtgcaattgttacgtgtttttttgttgtgtatctcctagccggagaattttcatccttgggccttctcatcatgtgcccctctctcgatgtgcactttccagtgtggatatatataggacacctctgtatgaccttcgtattgaccaaaagagtaagtatatagaaatattatagctttcaaatagctaatgttcttttaacaggacttgtaaattaatttaaaaacttatgaatatcataagtaatatctcaatatttaaaataaaaattgttataactaatctgcataaaacagcaaaaaaagaaactcttccatatccctaaaaggcaactagtgttttttagctagctacagaaatctgtcagatctgccagtgtgcagattgtagtggttacattaatattcagaaaaatgccatgtactcagtgtaccaggagacaaaaaattagtacccataccaatttcataaagattctgggcgtgttaatttacttccatgtaacgccacttttctcactgtaaatagataatgctgataatatctttattttctttcaaatgatttttatgggaaaaaatgagcctttaattatgaaactctgaaagaaaggtgctatataaatgataaatatattttatttttaaacatgcctacaattttggttgatttatttttttccataggcgtccagag

SEQ ID NO: 11803 - DNA, 1242 bp, Homo sapiens
gagattcctcggcgggtaggcagcggtgctgggcatgctcagtgggcaggacccgttagagtggcgagtaaggaagcgttggctcttctccgggtctgccttccccggttcaggccccggccctgggcttttgtgtgcgcgtagctgcagccgccactgcctcctcgcggggctgcccgaccccagatgccgtcaggcctgtccggtttccgccgttaacctcgccgcgcggccgggaggaggagcggggcggggccggcggcgggcggccgggctggagggccctgccgggggtgggggtgggtgcggggagccccgcggggggtggggggcgggggcgggcgcggagtcacgggggtggggtcactcgcggtggctcggggaggccagctgggaggggagggggccgtgggggcggctcggcggaaccagccccggctgggcagcagcggggacgccgggggccggggccagggctttccgggcttcggtgaggccgccgtgggccccatcttccggcggtcgccggagtttgtggtgattgttgctgccgccgccaccgccccggctgccatctcctcctcctgggccgccgcctcctcctcttcctcctcctcctgggccgggctgatcccctccccgctgccgcctcctcctgggctgggcccgcggtgtctcgtcccctcgcggagccgctcctgccgccgccgccgccgcctcctcattcatcctcgtgcaccataggcggcacaggcaccaagatgtccaaccgagtggtctgccgagaagccagtcacgccgggagctggtacacagcctcaggtagggccccaggccgccggcccgcccgccgccgtcgccgcctggccccacgcccggccggccgaggtcggcggcccggccccgcggcggcggcgggcggggaagagggcgcggacgggccgccgggcgcggaccgcgtggggagggagcgagccgaggccggcctcgccgcctcccccacccgggcggcgggcatcccgcgccggcagcccggggccggccggcctcacgctctccggagttgggcgagagggagagttgccgcctcggcagcctgcgccctccctcaggaccaggctcgaggaaggaacgtgctcccggaccccagccgacttgtcgccgcctctggcttgcaggaagcgtgcggccggccgctgccacccccgggaaggacggtgtgcccggcgccgagccccgctt

SEQ ID NO: 11804 - DNA, 1435 bp, Homo sapiens
tgaaatatatatgatgaaaagaattgagaagttctaaattaagacatttcagttaagctcataaaatttcattgttttcatttaaaagattaacgttattgatacttggataactggctaatcatattaaaggactatgtggttccagctcaacttttaatatattgtctcctttaaaactatcatggttataattctattgggaaagacttttagataacaaagatttcaaatgttaaaagagataaaagtcaggttaatactatcttaaacactgagtcagaaaatcattactgtatagaagttgctttcctgatcaagtctgaacttcagctagtgctagagaactattttctatgacttaactctaaccaagttttattttaagctgtttctttgatagaagggccatgaaaatagagtaatgatatagtaggagataagggattggtttggtctttttcaataaagatagaagttgctgaagttttctgaattaataatgacttagattgtgaccttttagattcggtgttgagctctgtgttgtattacttcctaaaagataatgcttaaacattaagcattagtgtgctcttcatgttaatatggcagagttttgtaaactaaattaaaacttactgatatattggactttgagccaagggaaagaatgagtactatctttccagatatcttaagggtaaaagcttattctaagacagtctgtccattgagaatattagatttctgacttgcaaatatgtttgtactccagaagaattagaggaaaagcagatactagaattctaatttaattacatatacagccgtctttgtttatagtgtagaattctttatattttgtacaaaaactaattcttttggtaaaatgaaccatttacagttcggttttggactctgagtcaaaggattttcctttaaatgcttgtctcaattttagtctggtcttttgtacttttcttcagaagaaatgaattaaagggtacagttgcataaagtgggtttttatcctaatgtattggaaataaatgataaactttattttgtctttacttttttactttaaaactttttgatattttaggggttggagtctgataatgaaggagttgtgtgtattggactcttagtaacaattataaacgcttaacaaaatatagaaagcaatgattgggtggctctgcagagcaatcaaaacaaggtagaaactgcaaagtcctataatggaagagattcaggctgggtgtggtggctcatgcctgtttgggaggccagtatgggagaatcgcttacactcaggaattcaagaccagcctggggaatatagggagaccctgtttctgccaaaaaaaaaaaaaaaaaaaaaactaaactaaaaattagccaggtttggtggcctacacctgtagtc

SEQ ID NO: 11805 - DNA, 1809 bp, Homo sapiens
ctttgttatgattttgccccttttaggctggatcagtgcatgtaagaattcgacgagatgccaatgaacaaatggttcttgctcatgtgaccaacaggctgtacactctagtgtctactctaactgttcaaattttcaaggatgactggattaggcctgccttattgtctgggcctgttgcagccaatgtcctaaacttttcagatcatcacgtaatcccaatgcctcttttaaagggtactgatgatttgaacccagttacatcaactccagctaaacctagtagtccacctccagaattttcatttaacactcctgggaaaaatgtgaacccagttattcttctaaacacacaaacaaggccttatggttttggtctcaatcatggacacacaccttacagcagcatgcttaatcaaggacttggagttccaggaattggagcaactcaaggattgaggactggttttacaaatataccaagtagatatggaactaataatagaattggacaaccaagaccatgatagactctaacttatttttataaggaatattgactccttggcttccaatttatttagtaatccaactttgcattgactgtttaatcatttactctaaatgttagataatagtagtcttgttcacatttcatgaaacctatgaaactatatttttgtaaaatgtatttgtgacagtgaaatcctcgtaaatgttaaaggctttaaataggcttcctttagaaaatgtgtttctttaaatttggattttggtatctttggttttgtagttgactgcagtgtgatgtgaccttacctttataagagccacttgatggagtagatctgtcacattactaagatacgatatttctttttttttccgagacggagtcttgctctgccactgtgcccggccaatacattattattaacttaaggctgtactttattaaggcttccttagtttttgttttgttttgttttttgagatggagtctcactctgtcgcccaggctggaatgcagtggcatgatctcagctcactgcaacctctgcctcctgagttcaaatgattctcctgcctcagcctcccgagtagctgggattacaggcacctgccaccacgcccagctaatttttgtatttttagtaaagacgggggatttcaccatgttggccaggctggtcttgaactcctgacctcatgatccacccaccttagcctcccaaagtgctgggattaggtgtgagccaccgcacctggccgatattttctttaatgaaatttataaatatgcttcttgaataatacacattttgggaaagggaaaaatgtctgttcaaaaagtaaaagtctcttttatagcttttccaaacttaattgctaaatttttctttgaggttctcctgaattatgtcttacaaactaaaagcaaaaatttttagcagaaattttggaatacattctatctagcacaatttgaatttttaattatcaagatttttgttaaagtttctctcctttaaaaattttagtacatttgtaaatagtccatggttctcagtgttttattttgattaagtgactacccaacttttggtgatatgcagtgaaagaatcccaattttctatgttacatttaatcaaatactgacataatgaatttatctttcctgacacattttcattcattggctttttaatttcttattttattaacaaaatatatcagatatattaccaaaacacatggagttccatacataatatggaatttgatgtcttttcaagttgcacaaagaa

SEQ ID NO: 11806 - DNA, 1211 bp, Homo sapiens
tttgtgtgtaggctgggaattcttgctgaaggaattggagaaaacctgttgctgcaaaattttacatgttccagatggaaagggaagtctaagcgctttttaaaacaatttttttttgtatttaattaagcaattgcagttatctgggatttttgggtcagaattttaaattctgtttgattctccatattccagtgaataaaatacaaaagcattgtgtttttaagattgtgtcgatattcacctaaaaacttgtgccaaaagcacctggattggtaattatatttcacttaaagggtaaatttgacaatatcttgataatcaaaagtgcaatttttttcttcaaaatgttttctccagcatcacagatcctgcagatatatatttatatttatacatatatatttatgaaataattcttactcacaaaatatatttctgataaacattaagatattaaatctgatgcacaaactttttaatttggccattaatcttttttatttaaaaatttaaatttgtttttaaaattgtatatagtttttaaaatctcacacatgcttcgatacttccttgttaagaattcttaataactactaaaactgatttttaatagttgctgatatatatttggtttgtttgggtatacttttcaaaaccatttttgaatgtccaaacatctgatttaaagtttctgtttatctttctgaccaaaggagcaagaggtataatggatatggcattcattaaaatctttactatgtacaaaaacagtaatatttacagcatcagtaaatatttttaagtggtacttctaaatcataaaagttggggaaagagacctttaaaatcttgtggtgttgaacaatgttatatgaagtagaaaaaataaaatacttcccagttgtgtgttttgttttacagcaccatgtcctgtattacttgatattttaacaagtatcaggtactctctaacaaatgtacagtttttgctaagggaaatattaagaaatttttatcagtgaaatatttgttgcaaataatttcataggtttttagatacacctgtagttaatattactttgtaaagtaggtaaatcattttatttatgtccataaaatatcaaatgtctgttaactattagcaaattattgtattatcctttctggtctcacctggaagagtttcctgctgtcctcagtatgataac

SEQ ID NO: 11807 - DNA, 1150 bp, Homo sapiens
ttgttgcaaatgtgcttgaagatactgttaaggatcttgaagaacttggggcaaatccttgtttaacaaactctaagagtgaaaagacaaaggaaaagcaccaggagcaacacaacattccttttccatgtttattagctggaggtttattaacatataaatctcctgctacctcacccattagtagtaattctcacaggtcactggatggtttaagcagaactcagggtgaaagtatatcagaacaagggtcaactgacaatgaatcctgcactaattcagaactaaattctcctctggtaaggaggactttaccggttttgcttctttatagcatcaaggaatctgatgagaaagcaggaaagatcttttcacagatgaacaatattatgagtaaaagtttgcatgatgatggttttactgttccacagattattgaaatggagctggatagtcaggagcagttgttattgcaggatcctcctgtgacttacattcagcaatttgcagatgcagcagccaaccttacctctccggattctgagaagtggaactctgtgtttcccaagcctgggactttggttcagtgcttgaggctgccaaagtttgcagaggaggagaatctttgtatagactcaataactccttgtgctgacggaattcatttgttggtaggactgcggacatgccctgttgaatccttgagtgcaataaatcaagtagaggccttgaataatttaaataaattaaactctgcactatgtaatagacggaaaggtgagctggaatcaaatcttgctgtagtgaatggtgcaaatattagtgtaatccaacatgaatcaccagcagatgtacagactcctttaataattcagcctgagcagaggaatgttagtggtggatatttagtgctttataaaatgaattatgccactcggatagtgactttagaagaggagccaataaaaatacaacatatcaaagatccccaggacacaattacctcgctcattttgcttccacccgatatattggataatcgagaggatgactgtgaggaacctattgaggacatgcagttaacctcaaagaatggttttgagagagaaaaaacgtctgacatttctactcttggacacctggtaataac

SEQ ID NO: 11808 - DNA, 1235 bp, Homo sapiens
aatgtctctttaggttaatctatttctccctgttattttaaacatttcttaaatgaagttgtgtgtgttttttttgggtttctggtattgacatgcacatcattgtgctactggcaaagtattaagtattgcattgaagttgaacagtgaaacttttcataaattgctaacctaatatagagctatcattttctagccaggaggtatttttgatcattacacgagctcacacattcactgacacagccatctgacacatccagctccataggcaagaaatgtaatttacttaagtgctaaatattttcgtctccaagtatgtaacagatttctacatacaaggagtaaatacattgcagaataaatagaatataattatctactgattactagaaaagaggaaagtgtatttaggcatgcgtattttaatattatacaatacatttaaataggaaagtttactgttttctttcttgtaataggacactctgttcctgcagttttgcagagcacatttcatgcccaggcctgtgaagagctctttaaacacttgtgcatcagtggaaccccaaagatacggttacatactggtcttcttcttgttcaactgtgtggtggtgaaaggtggtggggtcaatttctttctaatgtccttcaggaattgtacaattcggaacagcttctcatctttccacaggataggtaggtcagaaaatgttggaggtatttgttattaatgatgtgtacttttcacagttactggttagcttttgaaatctttgaaatgtggatactaagttgtgaatatgaagcagatctcagagtttgtgaaatgaccagtgaagggcaccagcactgtgtatcgaagaagataataagtgataattagagtctactctttagttttctaattgaacttgtggacttcatagatctgtgtttataagtatttctattagattatgttgctttatatgctaaatgtgtttgtttgtggctaataaaattctctcattcactaagtgcttgatttcttgttaataacattagaaaatgtaaccagtagttagaaaaaaaactaattttagcttcatacctccagatacaaatcttgctttcccagtctgaaatatggtatgttttaagaaagcaaatattctatcattactctgttaaatttctatgtaaattattttaaaaattgaacaatcgaattgattcttattcttttcttt

SEQ ID NO: 11809 - DNA, 1354 bp, Homo sapiens
aaacaagtttgtagtctttctataacatgaaattatgattattccgccagattttgaagtaactcgaattaatattttgtacttgatgttatattagttttctttaccttcaagcttttacaaattatgtttaggatgttacggtaatatttatgttgttagatttgacttaataacttaatatattatctacattgaatgtctgtagaatttcacttttctgaaactctgttacatatctgatactttactccaaataggaagtaaggtatattggtcagtttagcttttaatattcttacttttgaaacttacagtgtatctaaaaattttgctctttagaagttgtaatatggagtggatattttcattacataaatctatactgaaaaaattttcattaagtaaacattgatttaaacactatacatttttgtgtgcagcactttaaggatttaattcgtttacgtcggacagcagaatggtcccgttctaatttagacacagaagttacaacagcaaaagaaagtcctgagatagaaccacttccatttactctggcccatgagcgttgtatctcagtagtccagaaacttgttctgtttcttctctccatggactttacatgtcatgcagatctcttattgtttgtttgtaaggtatgtaaactataagtgtagacttacagggttggccgggcgcagtggctcatgcctgtaatcccagcactttgggagactgaggtgggtggattatctgagtctaggagttccagactagtgtgggcaatgtggcaaaaccccgtctctacaaaaaaaaaaaaaaaaaagtgacttataggttaattaaaaactagcaaaggatgatgtttttagtcaattttcattaagagaaatgatgcctcttttggttttgcttttttgcagttagtttttttattgtgtcttaaaagatgaaaaaaattcttttcaaatttttccttaaggaaatctgatttatattttaatttatttaaaacttgagggtttgaaatgtaagtaatgtggatatgtttatctccaacctgcctttcttatattaattaaaataggaaatacacaagtaagtgtcaaattatattaaagaaggacttttgactgggtgtggtgcttcacacctgtaatcccaacacttcgggaggcggaggggcggatcacaagttgaagagattgagaccatcatggccaacatggtgaaaacccgtccttactaaaaatacaaaaattagctgggtgtggtggcatgcacctgtagtcccagttactcgggaggctgaggcaggagaattgcttgaacctgggggcgatgaggttgc

SEQ ID NO: 11810 - DNA, 1266 bp, Homo sapiens
ttgtcattgctcaactaagaatcttcaaagggatctttaacccctagagggatctttaaccccctaaaagcataaaggtctgtttaatcggtgtgatgttatagcagtagcaaccattgaaaattacttttgtatttaagtatattgatagtcgcgataaatgcaaggctttagaaaggctttgggttgttaaagtgcatgaatattggagctagcctgctttattattaacatcagtggtatgctgcttactgggtggggaaatcactttgcctcattttcttcatatataacataaggataataaggataatctttgtataaggttgtttttatgaataagcgtgttaatgtatgtacagtaattaaaataactctttgtacatgttatgtgtttactggatacttgtctctagcatttgaaagtaatggagtgagtcctagcattccttacgggggtgggaactcatttgcctcagattcttttatagttagtagagcatttattctgtcagtgactaaactggaggaaaaaaatgtgctgtaatacattttcgaaatctgtataaattattaaaacaggactatccccttacatacaggagaattactggctccagtagccgcagaagccatggaggaaggaacagtgggtgatgatgtaggtgcgacagctggtgactctgatgactcccttcaacagtcctcagttcagttgctggaaactatagatgaacctttgacacatgacataacaggtaaagttttacattatgtttcttctttattctattaaatggaaacatgtttcaaaataaagaatgttagagaaaaataaagttgatttttatatttttctattagttctttggccttataaactagatccattattttcctggtaaatacattttatcttggttctcattacaacaaaatgctataatttcataatatcctaattatgttgatatagtgtgatttggcaacgatgaagaaaatgcaatgtagaaaacatgtaaaaatacaaagtgatgaagacagcagttttaaaagctcttattctttaagatccagcatgtgatttttttggtgtatttttttcttactttttctttttttttcctttttaaaaagtatctttataaattagcatgtataatcctttatcatctccataccccttacttttcaaaagtctgttttgggtactaatctgtatatgtcagatgctgcagtcattttcaaccatttgtcattccttaa

SEQ ID NO: 11811 - DNA, 1143 bp, Homo sapiens
tagtttaaaaacaatcaatggaatagtataaagaaaacttacatttttattaatgtagctactcataattatcatacaataatgagaactacatttaagtatacagaagtatagttatagatcaccaacatttcagacagccatctaaacttcatccgagctgtgttcattgcagagtctacttgtatgttagcctacttttttttaaaggagaatcacctgtaataatttatggtggtacagttctttggtccataagagattttattagggatgctactttcagtttctaaacatataaggtatttttagattttggcagaaagtgaggagaaaattactggaccattcttataaatcattaaaattataaggggatttgggaaatttaaagggtggatagaatatttattttgtagttctgtttgggtttagataatgtaaataacgtgtcattcagccaagaggcaaaaataaaccacagttttttttccattcttttaagccaataagcagtacatggtatgattattggggtgctgattatgggacctacaattacaacccttacattggaggtctgggaattcctgtagcaaagccaccagcaaacacggagaagaacggatcacagacagttagcgtttcagtctctcagggtaagtgtatgtttatattttaagacatatgctattcttaaaacaagtctgtcatttatgtatactttgtcccttgagaagttgagcctgggtgtatgccagtgggtttagtatcacagctgtgccgtgagtaccattcagagctgtttctttgtagtcactttagaggaacttctatctttttggttctctgtcagaataacacctagcaagtgttgtatgggattggcaatgattttaatgaactgtgctgtattttaattgttgactttaatagtaaacttgtattttatttataaagagaatgaaactacattaaataagtattatttttgcagtttttttttttttttgagatggagtcttgttctgttgcccaggctggggtgcagtgatgtgatcccatctcaccgcaaccgctgcctcccaggtcgaggggcttctcttgcctcagcctcttgagtagctgggagtataggtgcat

SEQ ID NO: 11812 - DNA, 1108 bp, Homo sapiens
ccagcactttgagaggccgaggtgggcagatcccttgagggcaggaattttagaccagcctggccaacatggtgaaaaaaatacaaaaattagccggctgtgttgacgcatgcctataataccagtttttccagtatctgttactgttttcagttgccagttttgtagagtgtgaggatttttagtaaattgtattgaagtagaaatgcctatggtttggaaagtacaacatactgagagtgataacatgtcatttcaggtgttgtgggctgagctttaaaccttatcctaaaatgttactgattcttaatgcgttagttgtatttaatggagaattccttttatttgcatgttttgaagacactggttaaggagcggatttaaagaaatagtgtcttgtttttaaatttattcttttgacttagttcttcataaacattgtttttctgaaaaatattttccctttctcttttctgcatagcatcaataactagctttctcacagtgttagcttggtatcccaatactttgctccggacatggtgccttgtgcttcatagcctaacactcatgacaaacatgcagcttaattgtaagttcataaatttattcatttaaatctctgacatatactttagtgttctactattggattcttaaaacagagttttccaaggagtggtatacttgtcaaagtggttgagttggccagatgtggtggctcacgcctgtaaacccagcactttgggaggccagcacgggtggatcacttgaggtcaggagctcgagagcagcctggccaacatggtgaaaccttatctctactaaaaatacaaaagttagtgggcgcctgtagtcccagctacttgggagggtgacgcacgaaaatcacttgaacctggaaggcgaagtttgcagtgagcttagatcacgccactgcacaccagcctaggtgacagagtgagactctgtctccaataaaagtgactgagttttttcttctaacatgtctcttctgaattagttcttatatatcctttgtgcttgtttactttgataatatagtctcatatgtctcgttggatgttcaaatcatattttttacctt

SEQ ID NO: 11813 - DNA, 1222 bp, Homo sapiens
aatgaaattgtaggaaccagattattttactttcttgtccatttcccattttgaaatgcagatattagaacagtttcttatgtcttttatatagcagtgtataattatcatttttgtaaacatttgttgaatgtgtatatttctctattagaaaatacaaaggtactttaaatggttcaaattttaaatgaaattggtgtctaaatgcatattaagagaaaagataataatggatgaagacacatgctttaaaaaattctctgagttcagggagatggtttttttattcaggtaagatttcttatgtattttggcagacattttgtatttagcgtatttaaggctgtcagtttacaaaaattaactaggaaggaatattacatgcattgagtttagttcttattcacaggaatatataaagtcataatatgcatatttcattttttagggctctcttgctacttgccagttatctgagccattattgtggttcattttgagagtattggatactagtgatgccttgaaagcatttcatgatatgggtaagataatatttcaataactatcatttaagtgtagttatgtgatagtatgttacattttcatttttgtagtcttttgtggaagtttacttttgatgttgaaccatctgtcctgagatcgatttcatttcatattctttataaatttaggtggtgttcagctcatatgcaataatatggttactagtacaagggctattgtgaacactgcaagaagtatggtatcaactattatgaaatttcttgactctggtccaaataaagctgttgacagcacattgaaaacaagaatactagcttctgagcctgacaatgctgaagggattcataactttgcacccctcggtaagaaaagtgttactaaatcttacttatgtgaaattatctagtttattagctggtatgaaacaaaattagttgaagtcagttgatgatgttatatatcactattttaattacaaacagtttattttagaggtagtggatatctcgacattctacttatgagagggaatgctttgtttgtttgtttgtttgtttgtttgttttgagacggagttttgctcttattgcccaagcaggagtgcaatggcgtgatctcagctcactgcaacctctgcctcctgggttcaagcgattcctgcctcagcctcccgagtagctgggattacaggcac

SEQ ID NO: 11814 - DNA, 1153 bp, Homo sapiens
tagagacaggtttcaccacgttgcctaggctggtctggaattcctgggctcaaatgatctcttctcttagtttcccaaagttctgagattatcagcatgaccttggccttgttatatatttttaatatgctttttctcataatttttattttaagataaccacaccaatattgactaaagttaacgggagttcgttatgctaggtattcattatgtgcaaaccgtttagtactaattttttctaaccctggacacgtttcttacacttttatctcctttggtattcatatattttaagataaaatcatttctttcctccttaaaaaaaaaaaacttaactactagacccccagagacatttgttctttagctactgatttgatatgttaaaataaacttattcatattttctgtttcctttttatctttcaaaataaaaagctgcatataaatcttgcatttaactttttaaatattttgtcttgccaggttctttgtgaactatttcagacatctcctcaaagagggaaccttccaacatctgggaacatttcagggtttatacgaagattatttttacagttgatgctggaagatgagaaagtgacaatgtttcttcagtctccatgtccagtgagtatttaacacttaatcattggctgtgtatacatgtattttacaattttgtatcagagcctgcagttacctcctatgttctaacttcgagtatagcaaagtgaaactagcacagcctttatacctaatgacagaacttgacaatttcaggatagcgctctccctcatgcctaggaataacataattttaccttagcctgagaagtatagtttgatttgtggaaaaaaatgaaaaaaggtacagagtgataatgcaaaagttgaccaacaaatcatggcaactatgccatatctaaattaattatatcttgtaggatttattgagtattttattcttagatgcttttgagattattttataacaatatgtattccaaaaagttacttcctgatttctttgatttcttgattttcagctgtacaaaggtagaattaatgctactagccacgtcatccagcatccaatgtatggagcaggccacaaattccgtactcttcatttgccagtctcaacaac

SEQ ID NO: 11815 - DNA, 1124 bp, Homo sapiens
aactaccttaggaaagaatgtttactgaatgtttattttattttattttttttttactatagagtgaggggttgttaacaaagaatatatattggtcattcttacaactactatttaaagtcagcaacttttcactgaatttgatagattttatgtttggccatatcttcatgctcacatttgatttctgaagacctcctacatacacttcaataaaagttaaatggacatactccctcttttttgatttactggtacatttttaaaataataaatctgccataaaatgcattatatctggagacttgcacttgtatggatgaatttattacattcaacatatttaattttatgccttctaattctaagatgcagaaaaaaataaatgaacatgattttattctatgccaacatttgggcctctgaatgtatctgttatttgaatttaagtatttgaaaaggaatggtcaatttgaaagtcattctaaactgattttttttttctaaagggctccttttttcctggactatgtggttttatgactaaagtcacatgtatgtattaaacattgaggctctgtagaggagagaggatgtacctctctggtgctgttacagtacattctgtacctgccatacaggctcattttcatgcaaattcttcctagagccaaataaataaagacttaggtgaattagtatgtcttgtttctaaacccctttgccatggtgtgaaatgctatttctataaagaattgaacactttcaagacttaagcatgggaaaacaaagcatgtttttccaagaccagttgccgcaggggaaaggctaaggtgattctttgacagtatttttataaaataaaagtggcggctgtgcgcggtggctcacgcctgtaatcccagcactttgggaggccaaggcaggcgggtctcctgatgtcaggagttcgagacaagcctggccaatgcgatgaaatcatgtctctataaaaatacaaaaattagccaggcatggtggtaggtgcctgtaatcccagctactcaggaggctgaggcaggaactggagctgacgcctgaatctggagctgaccaggagaagccgtattctgaaaggcgagttg

SEQ ID NO: 11816 - DNA, 1164 bp, Homo sapiens
cttggacttgctcccttttttactattttttgaaattttccatttaaaaaattaattttgtaaaaattttaaacagtttccaagttaccaaaaagttgcaagaacagtgcaactgtcttttgcatcccgaagttttggagagtaagttgccaacatggtgcttcatcatcctcaaatatgagaacgacattctcctacataacccagtatgcataataacatcaggaaattaacattgacttttcactaccgtctaatcctcataagagaggcctgtgaaaactagtcaactggcaaaaaaagaaaatttgagtactgcattgtagaaaaaagatcatgataattctcagttgagagtaggtataagtgtataataccagaaaaatatgtacacttaatgtaaactgaatggcaaatgaagaggcaggagaaaatgatcatgataatggggctgctgtccacatgcttctctagcaatcccacaatgtgtcttcattcgctttgatgctgaatacatgagctcttctatgacgaatcatttgaccactggatagctccagctttgagtttgcagttggccctggtaccttgtctcaaagtcagctattttggtcttgttggtctgcttcttgatgtagcttctgagagtttagttattcagtaccattgtagaaatttcagtacatcagagggattctttcatgtatgtgggttgcagctgcccactgcactgtatagatggtctcacatgagtgaatgtccagccttattgctctgttgctgaagagtgagagaacttgctctctgtgatcaaataggctactttttcctttcattttattcctgagcaaataatcctacatagagttcttcatgtaatttttctctgatttatattataaagtgccatggtcaaagtggcattatgttgtgaaatagataagctaaagaacagttcttcatagaagaagtaaaaaggcttatcaataaggctagctctttgaaagaactattataggaaattaaaactttttctggtaagtttttaatgtacatgtttatgtaaatgtggattaggtttaaagttttttgaacatttaaagaaattcgagaaaaaattcacacatcctatcaccttatcaaaatgacttaagttctttgttg

SEQ ID NO: 11817 - DNA, 1104 bp, Homo sapiens
ggttttgagtcaactgcccacccgctttccagtccactgtggccagaaggtgaggtcacccatagtatcacttttaccaaaaggtaacctgtctgattacaatagttatcatctgttctaagactaatgattgatttgtccagattgttttaaaaagtaaatctgccctgctgaaatggtaatctaggaaaaacaacacatttcaagggagttggcaggtcagcagaccagaggcattgcctttttcatggtagaagaaggaagagaggaaatacgcaattcctctcgaacgaagctcccgctccgaacccatagactcgttccacccacactcgattggtcaaagcaagtcacatggccaagcccagagtcaaggggacacgcaaaatccactatacccacaggaagccatgacaagatgtgtgtgtggaggggggcagggtggggggaagaactagaaagaactatgcatatattatacgatttaccatgtttattatttattctcggatgaataaaatgttaggggagaaagtcaaattggtgagagaatcattcttaacaaaactatatccaccaccttctctctcctataaagactaacgaaagtgcttttcattaaatttctacagttaccaaaaccaaaacaacaacaaaaaaaaactctttggaccagaaagcatgtacctaaccgaatcacaaaaggtcagtacagtatttttgactgacgaataaaggcaaaaatataaatcaaaagattttgtttgggggaggattacgccgtaaccttctaaagtaaagcagatgcgcgctccagccagctcctccatggaatgtaagctgaaagcgtgggaggaagagctcttggtttctgctggatctgagtgaagcagttgcactcatgagatgcacctgtagccattaaggggtgttggttaaacaaggagcccagctggtgggtgcctgtgcttccaggcctcgttagggaagagcactcaatcccacacaagaagcccagataccatcaacacaggaacgaccaccgccctttcacctgctctccggatgcttttctttctctcgccaaagctttctaaatctgtt

SEQ ID NO: 11818 - DNA, 1726 bp, Homo sapiens
ccaagatggcgggcaccatggtgatcgtggtggtggtcgtggtgggcgaggtggtcgtggaggccgaggtggtcgtgcaggccagggaggaggctggggaggaagagggagccagaattatcaccaagggggtcaatttgaacagcatttccagcatggaggttatcagtataatcattctggatttggacagggaagacattacactagttgaggctaccgaaccttacattttgctagagctcaagtaatagaaacttagtttcagaatcctgaattcagcacctattttgaattaatgtgagaccacaggtggcaggcagattcctgcttggcataagcatttgtaggtcttcattcaattctgttagatttttttattggacttacataatgccgtttatttgagaaacacataacatctctcctttctatgaaaaattttttaaaaggtggttaaaattgcctttaattgcccagtagactaattccacagtcagaacatgcaaacttttttgaagaaattacttgaataagtagttttcatgttttcaatatgcagttttgaaaatgaggattcacctagacttttttagatttactactaggaaaccttcctcatatgaataaccatttatatgtgttttgcttaaagtattccaatgcctattttccaagcacagttctgccccccggttgacttttatgccacgtgtgcttcatgatggaacttttaggtcagttcctattaaatgagctcttttgcagatagcacattcagtagccttattttgttgatggaatactgtatcatatgctcaactctgaaaaccttgaacacggccaaaatccataaagattataaaagcaaactaagttgtgaagctatagtacatgtaggcatttagttaagtatagcaattcaaactgacctgcatccatccaaaacaaattcctccttcaaccttatttttacttgaaatttgctagaagaaatagcaaaccgaaatttgttttatgcatgagttaataccactggctcagcaaatacaagttagtttgctttaagcaggtaactttttttgtaatggaagaaatgcactacaaagttaagacagatttttgctaagtgcaggaggccctttattattgctgcagaaaacaaaagcctggctgagttgatgttttacattctcccttactgaaatctacatgacatgatgcttcttgctgggtttttgtacatgtaaacattgtcaagctgtgaaagaaaatggctggaggtgtgctttgtgtgaaaggtgagcaataaagtatctgttaagttctctctttggtttgagttttattttagctactgaattattctggactcttgcgtcaagctgatgagctaaggcttttgttcccaaagattcttgagtatttccttaaaacctaattttagtgaaaggtgacttttatcctaaaaccttaaataaatggaaaaatggctctttccaggttttccttttataataatatagctagaaaccgtcaccactcatctctggccactgggtgtagctgttgctacacatactaggcaaaaatgtttttagggtttttttgttatttgcttctccattcttcctaagattgggggactttttttaaaaaaggaagtaactgaaaatataaatatgtttatcaaaagagaaattgtatttcctttctactaaattgg

SEQ ID NO: 11819 - DNA, 1478 bp, Homo sapiens
attttatttactcagaagttgcctctccattactgttaacttgtttagtaatttatataattgcagtacttttaagtgttggacactgggattcaggttgtatacaaagtagtagctgacgaaaaatatgtatatttttgtgaaatgtatcaagccctaaagttcattttagagaaaggcccagaaaaacgtatctgtgtttaaaaacaaaggacaggtcattcgtcaatttgaatcatttttacttttgccactacaaactttttaattggcaatatccatcatccaactggatcttcatgtcagtgtcagggatgccaggttgacaaagtatttaacagatcctttcagtttttgttttgtttttttaattctaaaaaaaacaaatgttaggccaaacagatccctagatcccactcattgattctggcggtattcctaaagtggtgcttagggggtcagaattttctggatctttgctaatccaagctttagatttaatttaaccaggaccacatgcttgtcatctctctgatgcaaattttcaaaatcattttaatttagattctaatgtctgcctgggtttttaacaggctgtgaaccagtgagtgccttgttaatgtagaatgatttttcccccctgggtgggtgttagttagctcctctctgaaaatgtctcagagaatggtattttaattgacttgtagagagctgctaaatttgttattatcagcaatcagaaagtctttggtctaccacacatctccctccctactatctcttcattgtttggctgaagtttgcctcttgtgagaaaacaatacaactccccttctccacacactttttttccagcccagattaataggtatcccctaccctaatcccaactctatgatctaataccttttttaggaggaaccacttctttttaatattgaaatctgctggttactttatgttttctcaagttcagttgactagagctgaccacagggtgtcatcaattcagattcctaaataaccctttctctccacacccagtcctccagctggtgagccctgggccagattgtttgatcttcaggtattttaaattttagttacatcaattaatgtaaattaatccaaatgctaatttttgtggtgcaagaagtttcttatgtaaattcagggtatggataagctaattaagatatccatctttggtggctctaagtgtattatttgtttttaaataaagtgtacaaatatagataacatgctataggtgtctcatgaattggaatatttgtcagatttgggatctagctgtggctttacagtaatcagttaaattaacatagtctgatttggggcttttgggggaggagttgtagaggggtgcagagaaataaaaggatattagacaaagtatacatgagtccaaaattaatgaaccagtcttaattactgattgtgaggaaggagaagtttat

SEQ ID NO: 11820 - DNA, 2164 bp, Homo sapiens
aaagagtatggttaacttcacgcagctgcttttgcagaagcactaataaaaacaaatattttgtaccctagaagtcctctattaatccctgtaagaatctcctggaaacctggatgaaagagtttaatgccaaatattggctaaaaagttctgtctttctctctccctattcctcccccattgtttaattgagatatacatgttttaatgggcagtggatcagtattgtttctggggaaatccacaccttaaaaggccaggcttccccagcccaacttacctgtgacccacctacatgtgttcaccttttgggattctgaagaccctgctatctagacctagtctcctgtcataaagacattatttctatagtggtttatgtctctcttactctttgtcccaaatgacagagaccaatctagaaattggaaataaattattaacgtccaactttccaccaaaaaacatataaataggctcttagattttaaaaatattaaatctatagatattttaaccaattaaaacaatttctacatattccattccccacattttccatcgtcataacaatgatgcttctcatgatacgtacatctactccttgaaaaagtattctggtggtggtgtggctaatgattgacaaatatttctgtaaaatttctgcctgtttgcctctagaattctgcattatacaggcaaattttctttaaagctagagacttgtgctaaatttgcctgattttcatacagatatgctgtagtaatacagctaccttttcatttcatctttgtgctttggttaacaagcaggctcaagagactgctttgtgtaattaaatgaattgacctaaacatgagctgtcaggtgaatacttaatatttccatgcagatacagaattccatattgtgttcagtaaatttcttttggttcttcacagtgaagaaagaatgtttctaacctaacatttgtagaaggatactggaaaattccttccaggaaggaaggaaggaagatgccattacttggtgtatttatgatggatgaccacaaagctattgttctaccagttattaattaccttctaagatcttcagttactgctttattaatgtcactgaaattctaaaaaccaggacattcttcccccgttcattttatgcttcatggttgaaatttttctgtcagtgagtggaaaataaccatgagatacatagactgtagcgcaaatggaactgttgaaagttccttagaaagccagtgctgtggcattggagactacggagagagtcttctctaccagcactgcatgatctcagcctagaaatgagccaaagctgtcttccaaccagagtagcatatacatgtgtctgacttttcccctagcctgttgaacattcaatgaaaattcacagaatgaacaaattcaatgtttaaacagccattgaaatgctttcatagtgcttcatttgtaaatattttgtttgaaatgtattggaatagtatgaaaattagcgggaggtttggatccctgccttattttcatatgctgtggatacatctctgggagcttgcagcacccttctcaaaactcaactgtcatatggagctcatttgctactcaaaccatagacagattatttaacaaaagtgatataatgaccttcagtatttttctattgaacaagtttaacaacttttgccattaaacaaatacttagttatgcaaaatatttcgcttttataatcattttagttatgactaaaacgggggaaattgagctgcatcactgatgatgaactttgtgagaaattttttttttaatctgactttcattccttcagtattcttgctataaatttcttttggagataatgatgaagatttatttgaaaatgtctaaaatgtatgtatattttataaatatatattatatatattgtaagaatatatataatatataaactatatatatatatatatatatatatatatatatatatatataaaccataggtgcattttactgttttgtattttcatttttggaggtagtatacacagcagataatgatgagtatgatgagtgttgtgctgtttgcttttgcagtataatatatagttctaagtgtttaaattactgtatatacaatattcatta

SEQ ID NO: 11821 - DNA, 1180 bp, Homo sapiens
cggccggcccccgcgcccaggaggctgctccctgctgactggggtgtgggcgggagcggcggagggaggaggaggcgctgcttgccgccgctgttgcctccgctgctgggcgccggggcagctccccgggtatctgcggccgccatggacgagcaggcgggtcccggcgtcttcttcagcaacaaccacccgggcgccggcggtgccaaggggctcgggcctctggcggaggctgccgcggccggcgacggggcggctgcggcgggggcggcccgagcccagtacagtctcccggggatcctgcacttcctgcagcacgagtgggcccgcttcgaggtggagagagcccagtgggaggtggagcgggcggagctgcaggtaaagaccctcccggcctggccgtcttcatcccgcctctttgctcccttccgccccgccccggacccttctccccctcccccagccttctcgcgtcccctccccctttgctgccgcccatcccacccggagccccgtccccttcttctcttcgccttttgcctttcgctgaccccacctcgaccctgttctcactcccgctcctggtgcgttgtttaccctccccacgcctgttcgtccgccccatcccactcttaactcccagactcatttcaactctctggccatcctgcatctcagggctgccctctcggtttactaattgggctggcagtagttttgagagacgcggagcaaatcgtccgctgccctggtgtgccccttcctaggtctagagacagtctccgcagaacgtgccggctttggcccctctcttcaaggaaggtgatcaagaagacaacagaagttgtgtcaggccttgagtcgaggcgagaagttgacgttgggcaaaagtgttattcatatatcagatccctttttttatatatgtaaatgtctgttctccactttcttccgaccccccggccccctcccacgtttcttttaggtatttccaattaatgcattttgaatgaaggacctagatgatcgcagtcagagagaatggttaagaggtggttcctgttctcagaatctgaaacttcccaagggttaattttatgttcagtgttttgggagattttcttgtgctttaaaaggaactaaagggactttgaagttagttacattgccttgcataatc

SEQ ID NO: 11822 - DNA, 1174 bp, Homo sapiens
ggggtggattgggaaataaattggaggtagagaaaagtttgaccttctctagattctgggtccaaattggtatattttagcatagcttcagtgaggtgtgataagaaaagggcagggttttactggtgctcttgtgtaatttctctgagcttttcataattaactgccttatgggcatttttgtccatgcccgtgaggagacaggtaatcatgtggtctcttcacctgatgccattgtctccctgttggcaagtcccatctgggcctctatgggggactgcatcattggccactggattttgtataggggctttattatggagttattataatcaaggggaacttaaagtagtggtgcttgtccaagatggtaatgctcctgttctgtcaaagatggaactgtgaaatagaatttgtttaaagatgtgttgttcattcaacagaagtttcttgagggcccattataaggctaaattatacttccacccgaacagtttaattgacattgcactatccggcgcacgattgatcatgtctcttggagaagtaatatctagacagatccaaatggaatgtggtaattgtagatctttgtgatgcttatgtggatttctctgacatctatacaagttattaatattgaaaacaagtactcctgtaaatcagtgattaaaaaaaatacttctgtgggaattagaattgatccacttgtatctgttttctactttctagctccatatcagatttcacttgaaaaaaagtctactctgctgtagacaatatgtttggatttaaaatgaaatgtctgaaacgatggagacctgtttgcatcagtggggcgggtcattcaatataaaactttaaaaaacaatacggaatcaaaagtttattaagcacccaatatagaattggcactgtgctgggcatcaggtttatggtaggaacaaataaaatggtccctgttgtcatggagtttcatggggatgaccgactttaaataaataattacatgaacaggccaagcacagtggctcatgcctgttatcccagcactttgggaggctgaggcggatggatcacttgaggtcaggagttcgagaccagcctggccaacatggtgaaaccccatctgtactaaaaatacaaaaattagcaggtgtcgtggcatgcacct

SEQ ID NO: 11823 - DNA, 1133 bp, Homo sapiens
ggtttggggtacgagtgagcctgtcacccaggtggcaagcatagtactcagtagatagattttcagcccttgttcccctcctcctgtctcccctctagtagtcaccagtgtttgttcccataagtatgttcacgtgtacccagtgtttagctctaagtgagatgtacatgtggtatttggttttgtccctgcattaattcacttaggataatggcctccagctatgtctacgttgctgaaaaggacgtgatttcatttttttttatggctgtgtagtagtttgtagtgtatctcaggtgattctgatgcatggttgatgcatatactttgtaaaacactgcctaggtgttccctgcctagagaattaatgagagctctattccgtcacctcaagcattaatgtaaatattaaataactttaatatgatagcatttctttaatcttaataaccataaaagggcaaaaatctgatttctttatgttcaaggggttttgcgaccacaagcttcatgatgtcttaattgccccaggaacagcagatctaacagctgatgtggacttcagttatttgcgaagaatggcacagggaaaagtagcctctctgggcccaataaaacaacacacatttttaaaaaatatgggtattgatgtccggctgaaggtaaggtttattttatttcactgttattaagtactttcatagtatttcaaaaattactttaaatagtatgttcacctggccttaatgctcttgtagttagccaatccttggtattccagtcttttcaggtagtataggatttagtaactagtctggtaagttttatgcatctccatgggaggtagcattaagacttccaaatagtgtttttgtttgttaagaaaactgcgtttatgggtatgaattttctaactgttcttctgagaacacctaaaccttactgtagatcaaaccccctgaggatatttgttaaaaatgcaaatccttaggtttgtttcacaccaatctacatttttaataagtactctatgattctcaggcaggtaatcagaagtcacattttgagtgctgttttattggaatatttgagagtcattagtattgctgcatgtaactaggaatcctgtcttc

SEQ ID NO: 11824 - DNA, 1897 bp, Homo sapiens
cctagggttcagtcagtaatttctgctttttagcagggccagtgcagggtcagttaatgctacagttactgtatagcaaacagtatccttttttctccttcccctagcctattgggctttgcagatatctggagtgttttaaagtcaattattttaagcagtttgaggggatgtgtaggagtggagcatgaaacagtttataaggctggggctgtattatcagcacagcaaattaaagaatgaaagaagtacttctttttacatttcagctccagcagccagctatttaaaaaatatttttaaatatcttccccaaagtttaagatgtgggaccatctacttgtaagaaacagtggcttatttcttcatttctcagtaatcattgtaaacctttttttttttcttctccactctaacaaaagtaaaagaacaaaacttttgctgaggtcttggactccactacttgttagttatgttggcctggacagatggcaggtctgtcggcagttcctcagtctgtaaaatgaagattatcattcttgcctctccctttgtcacagtgttgtcgtgaagatcagatatgtatgaatgcagtcaaataaactaaaaactaggaaagtgttaactatcgttgcccaccgaatttgaggtagcaaaaaaaaaaaagaatgttctggtacatgaacagactgagaaggcctttcgacatccctgaagctagtctcctgtctagactaaaaatatccttgaaagaatagtagcaaacagtatgcagtactcctgtgttctaagttcttttatgttttagtttaccctcacagcagccatagtgttaagtcattatgagcttcatcttaaagataagaaaactgaggcaaggggagattaacttactgccaaatttcaaacagttagtagtatttgagaccagtagtatggctctaatcttacccttagccctcccaaccattatgctgtactatctacccataaatacctccaggaaacattcccctcttggtaatttgtccttctatagaagcttcaaagattaaatcaaattaattttcaaaaaaaatttttttttagaaatgttattttccctgtgatagaggatgacttcccagtttcaccaaagtctgtttatatcaacacacacaaaatggaataattctgagtcactaggcaatcaatctactgtggttttactatgtaaggtgaaaattaactggaacgatgtttgtttgctatacttacatagtcaaactttacaagccatgaaattaattgcactctttgtatttgttgttaaatgcctaagaagttttctaaaaattttgtaaaggcactgtcagagaatctggagttgaatgattattccagatactgtataacctgcataactttttgtctttaagtcgtgtttgtaaaagaagtaattgctagaaacatttgataatgtacaaagtagtctataatgactgttcagtacatttttaatatttttttggttatatccaactttttgtaaatatactggaagcttgataataaaatgtatttcctatcaccatacttttccatgtgaaaacctgagcctatttctagtataagtatccaaagaaaagtttgacctggttgtgttattttaccagaccttggtaaaagaactattttggaaacagtatttgtaaatggaactaatgctatatttaaaaacactgatttttttttaacctgccaaaaataaaaaaaagctcattttataattttctactaaatttgagttgattatctggaggtctcatttcttgtaaagtataactttttcagaaactaccaccaaattatccaactgttatactaccagaaggctttaaaaagttaaaaacctaat

SEQ ID NO: 11825 - DNA, 1872 bp, Homo sapiens
tatacataccagatttgatgctgcatatagggtatggaattgcacatccatctcataggaattgtaaatggtttgaataagaggaaagtaatttttgttgcattataaaatgtctagtagcatcataagtttttttgagagaagcatctttttatttcccatattcctggttattttcatcattgctttgaattgaatttttatatctatttttatatgtaactctttttttacctcatgtttttgtttgttttgcacatttctcataccacaggtattgaagcccctgggtgataatttgatggaggaaaacataaggcagtctgtaacaaactctatcaaagcaggcctgactgaccaggtgtctcatcatgccagattaaagacagactgacagttcatctcctcacggactccactctctttttttttcatgcttgctgtacaatgagaactcaaataaaaataaaccaaagtttacaatcaactgtagaagtagtttagtgtaactggcttcacagatggctgccacagagtgtgaagattgtttgttagttttaagcattcttttaatggctcctaagacatgcagatggactgaggagcattggttaatcatgcacctttgtgccatgtttaactcttttatttctttttacttaatctaatgttagtgaatttgtcttatgtaaaaggatatttcagggaaatattttcagaaatctatttagagtctctttaacacagtgtcccattgaaattttaatttttagagaatttatgaatcactgtttcaagaaccagattggaaagacaatgaagcctttattgagccactacattaaaagtatatattgctttactgccttcaataccagtattacatcaatgcatgtatcagaaacttcacagaaattacatggcaactcttgtagctaagaaagtaattctgaggtgtacatttgtcttgcctttttaaatttataaacttgccctaaaaggagatgcatatctgggaaactgaactgtctttttgcagtttagccttcatgtatataaaatatgccattaattttattggggaagaaattccatccaaaaatgttgcctacagctatgagttaagagtgtctgtacagtgtgtagcttttattttctaaaatcacagatagggcatgtatatgacttataaatatataaatacgattttgtattaaaagttttgtagtttatggcaaaatctggtcctgtggtaggctaaataagtactgtccctgtgaaaggaatgtttgtggctcatgtcagtgtgtgaatgcatagacaatttgaagtttttgatatatttgtgatatttatcttgagcactgcaatctcaccccccccccgcccaccaagggaattcaatgggaatgtttattgtgactttgtcctctgttgcattttaaagttatttcctgtaatttattttcagtacataattaaaaatttgttgtatatataaaatgaaacttgtgattcttttttaaggaatttttcaagtatgtattccacttcataaaccacatttgtttatagtgaaaagagcatgagcaggaaacaccccagttgagagctctaaggcattgtacctcaaaactaagcttgtaaaaagttacttttctgtgtctgtctctataagggaaaacctatgattagcctagttgtagatggggattgttaatttctttctctctctttttttttttttggtggtatatgtaaggctagcattttttcagtacttttgtggtcttctttgtgaacaccgattaaagtacctagttttgtttgtttcttttttgagacggagtctctctctgtcacccaggctgg

SEQ ID NO: 11826 - DNA, 1799 bp, Homo sapiens
cagcacgttgggaggctgaagcgggaggatcacgaggtcaggagatcgagaccatcctggctaacacagtgaaaccctgtctctactaaaaatacaaaaaatcagctgggcatggtggcgggcgcctatagtcccagctactcgggagaatggtgtgaacccgggaggcggagcttgcagtgagccgagattgcgccactgcactccagcctgggtgacagagcgggactccatctcaaaaataaatagcttctctcgccaggcatcctcgtggaagtgacatcgtctttaaaccctgcgtggcaatccctgacgcaccgccgtgatgcccagggaagacagggcgacctggaagtccaactacttccttaagatcatccaactattggatgattatccaaaatgtttcatcgtgggagcagacaatgtgggctccaagcagatgcagcagatccgcatgtcccttcgcgggaaggtcgtggtgctgatgggcaagaacaccatgatgcgcaaggccatccgagggcacctggaaaacaacccagctctggagaaactgctgcctcatatctgggggaatgtgggctttgtgttcaccaaggaggacctcactgagatcagggacatgttgctggccaataaggtgccagctgctgcccgtgctggtgccattgccccatgtgaagtcactgtgccagcccagaacactggtctcgggcccgagaagacctcctttttccaggctttaggtatcaccactaaaatctccaggggcaccattgaaatcctgagtgatgtgcagctgatcaagactggagacaaagtgggagccagcgaagccacgctgctgaacatgctcaacatctcccccttctcctttgggctggtcatccagcaggtattcgacaatggcagcatctacaaccctgaagtgcttgataaaacagaggaaactctgcattctcgcttcctggagggtgtccgcaatgttgccagtgtctgtctgcagactggctacccaactgttgcatcagtaccccattctatcatcaacgggtacaaacgagtcctggccttgtctgtggagacggattacaccttcccacttgctgaaaatgtcaaggccttcttggctgatccatctgcctttgtggctgctgcccctgtggctgctgacaccacagctgctcctgctgctgctgcagccccagctaaggttgaagccaaggaagagtcggaggagtcggacgaggatatgggatttggtctctttgactaatcaccaaaaagcaaccaacttagccagctttatttgcaaaacaaggaaataaaggcttacttctttaaaaaataaataaataaataaataaataaataataaataaataaataaataaataaatagataaataaataaaaagttttctactcacactgaagtgacgaagtccagagaaggtggagagctgtgagcagccagagcgagggctgcaggatggtcagcggcagcctctgctttcctccactccacagacactactcctgtctcttaacttgcccatgggctggagctgtgctaattttgctcttaaatattattagaggtcttaacatcttcctcggggatcccactgaaaagtaataacatcagaacacattattacagtttcagatacatcttaaaatatatactgtatctaaaattttacattttggatgaataaacactctcattaatcaaataaaccaattaataagaactaatatatatttcttttttctttttctttttctttttc

SEQ ID NO: 11827 - DNA, 1844 bp, Homo sapiens
gtctcactctgtcacccaggctagagtgcacaatcttggcttgctgcaacctccacctcccaggttcatgcagttctcctgcctcagcctcctgagtagctgggactacaggcgtgcaccaccacacccagctaatttttgtatttttagtagaggcggggtttcacttcattagccaggctggtctcgaactcctgacttcaggtgagccaccgcatctggccaattttacttctttatattcctgctttatattcaccatatttcttatatttagtataaaaaggtgaagtaatttactctgatacttcaaggtgatcttgaaagtttgatgaagtgaaatattaactgttttttactttttacagatggttccaatccctatacattgaagctttgcttttctacatcatcccatttataagaagagaagagcatgttagaatttatgttcacctttattacaatttcaaagctacacttcattaaaaaaaaatctaaaatggttgatctcatgttgccttgcttactttaagatcctgttctgtaataaacatattttgccttgagtaaatttgttgtaagcttaaatattgaattgttttcattttaagatagaatatcataatgtagactatctacagcttcattgtagattatacagatatatgatttctaaccttattactggaatttttcttccacagtaaaaatatatttgcattcttaatgctaattatctgcaagtattttttcattgtgtaagagattaatgcaggtgaaagtattgcattttaatatagaattcctattatatgtttagatgtttaagtatgttgcagttactcatattaaacataacttgtatatttattattttaatgaagtttgagaataacgttacatatgttgaattttaagtactacagatttaactgattttatatttctgaaaggctaacagacatggatacacgtgtacagtatgcattcaaacttatttaaattggtgtatttttttttaagtcactgtccatttgtattgacatgcctctgtttctagtccagtttggagattttataaagttataacaatgagttaatgtgttcattttcatttgttgcatgtgacttaaatacagctagtatttggcattgagattttaatagaggttataattaacagttcctcttatagataataatctgggatccatgggtgggcttcagagaatctgtgtaccccctaaaattgtatgtagaattttggatatttacatttttattttttaactcttggatccatcagtaatatgtatttttctatatggtacaagatttaaggatctaattttatttttattccaaacagatagctatttgtctcaataccatttattaaacattctttctcccactggatctgttttttttttctttttaagataatagattttatacataggcaagtaagatttaaggaccaaacatggtattaagagactatagcacgattgttaccaagttcacagcttttttacaatagaaaaactgatgtggccattttgttttcatctttaaaagaagggagaatatgtgtcatctacctagaataactgatatcagtagttgacaatatcagttttgtaatcctgacacttttaaacaaatttgtaaatgaaagttccatttagatcttttgtaaagactttattttaaattttaatataaaaaatccttttagaaataaggcaggcatttacaattttagagctgtttaataggaagtttagatggaaactaaacacacattaacatttatttcccctcattttgatggcagt

SEQ ID NO: 11828 - DNA, 1195 bp, Homo sapiens
aattatctatcttaaatgataaattttaaaaaatatttaaaaatctttgtcctttttattagagacattaatgtcaacttgagaatattttaatgtaactgagggcacatctgaaacaacagctgtaatattgttattttagacaagagttagggtcgtatcactcagattttgcttagcgatacctgctttttagttttatgatgataaaacgtgttaaaatgggcacgtttttatgttaaagttttctaatatgagaatatatttaatagattttctttctaattgatgtctaaactacaagagtgattgattataacccaaactaaatcctctatttaaatagctctatgtatgcctttttttggttaagatttatgcaagcaaaatatattagcattctgagactacttgctgctttttatctaacaaagtacttttgtatgtcttttctttacaatctttagcgtgtctaaacaacattcagttgttccaagtcaaatatttgagctggaggatggtaccagcagctacaaagattttgcaatgagcaaaaataatcgctttacaagtgctggccaagcatctaagaatataatccagccaccctcctgtgttttgcattattataatgttccattgtgtgtcacagaagagaccttcacaaaggtaggcactgaaatacaaatgtgtatagaatgttgctatttcctattttaaaatctgttttagcttcattttgaagtcgttttgctcattcttttgcttttgatgttattactattttatttacttggtactggatagtttattctttgaccattgtacttttctggcctccattcctcattgggcttcgttgatttgtggctcaatccttttgagagttggaattagaatgaggtcatcttaatcctgcattcagaaagttatttaaagacatatcgtgtctttaaatctcacccataacaaaattttctctatccatattgtttcccctaacttagaaaatgctaagtaggaactgtaagaaatgcttcagataagaaatgattttgtggaactctactccctaccttaagtactagataaatcctggtcaactctgagaatatatattttagttaacaaatctgtggttttattgtacagcactaagttacttaatatagtttatagaattttactgttttta

SEQ ID NO: 11829 - DNA, 1581 bp, Homo sapiens
aagatggtacccttgtataaatttaagttgtcatgtgtttaatgaattaatactgctaagtgagtatcctcaagttatagtgggactagataaccaattaaacaagaacaaaagatgatacaaatctactacgttacaggaaagataagtatattatcttcatgttgaggaaaaatttttgattggaactttttgttcatttgtactagttgagattttgattttatggaggttaatgagtatcaaatatacttccagttgtagcatgccctatgtatctgctaaattttctttctgagattttcttgaagttgaaatattattaaataacatctttgtacttcttactgagatagaatgctcccttttaagaaattaaaaattttaaaacaaacatttattttattctcatatccttttgctaacttgtgaattgcgatttggtttgggattaaaaaaaatgtttactttttaagcaggtttgaatttactgaaagatgcaattcaacttagacttaaattttttttgttttttttgagatggagtctcactctgtcgcccaggctggagtgcagtggcgcgatcttggctcactgcagcctccacctcccggattcaagccgttcttctgcctcagcctccagagtagctgggattacagacacgtgccaccatgcctggctaatttttctatttttagtagagatggggtttcaccatgttggccaggctggtctcgaactcctgacctcaaatgaccctcccactttgacctcccaaagtgcagggattacaggcgtgagccaccgcgttcggccttagacttaaaatttttttaactagaaattattttctcttgctaggaggcaggtggaagtcatcataaagtttctgtttcacccgtcgtccatgttcgaggactctgtgaatctgtggtggaagcagacctcgtggaagcgctggaaaaatttgggacaatatggtaaggatgatagggacttcatgtagattgaaaactgtggtagaataatccttgcttgcttgttacaagccttgatgtttagcatagtaaatattgtttgtatatataaacaaagtagtatctattgtttgcctatgactgtatttctttggaacgttttaagcctactatttttaaccttcctgggtgatgcatgagtgtatttttgtggagctatgatcacttctcactccccagcaaagttgtataaagaaattatgtgtgcttttcatctgattttcaaatgagtccgtgagtcctgttcaaacactctttaaaccattgagttgattacatgcttcatcttcagagtttcaagtagtgatgcttaaatattgatttttttgttgttcttgattttggaatatttaggaattaattggcaactaaaagtaagcagattaagggtaggcattatttgtttaggtgcatattgctgtgagttcttttgttcatgtgcatattgctgagttctttttattttttgagacagggtctctctctgttgcccaagctggagtgtagtggcacattgatggctcactggagcctccacctc

SEQ ID NO: 11830 - DNA, 2112 bp, Homo sapiens
tcaattgacactaattggatccaaacctaatgtttttctttttagtcgttccccatcaggaagtcctcgcagaagtgcaagtcctgaaagaatggactgaagctctcaagttcaccctttagggaaaagttattttgtttacattattataagggatttgtgatgtctgtaaagtgtaacctaggaaagataattcaaccatctaatcaaaatggatctggattactatgtaaattcacagcagtaagataatataaattttgttgaatgtattaacatcatatggtctgaaaatgtgggtttttatttggcacatttaaataaaatgtttctaactagatttttgatttgtgttcaatattaacacttcttaatttgatatatttgagagtcagacattataattgttaaccttattcatacatacctacattcagaattgaaaggtgttggttaagtcttgaacatcactattctatgcataaaacttggccaggatcttaagggactttgaaaattccatcttacccttgtagctctgggtaagatgacctgagtcccttatgatacagcctgaatgcatcatgacagatccttaagttagctaatccgtttgaagttggtgttagtaggtattgtatgatcagtggtgaagcaagtaggaccactgatgtgtctaaatgagcatgacaggaactaaacgaaactgattaaatgtatgagaaatagaaacatttctggatgatctttatactaattgcagctttcaggctactaggtggcatagtgttaattaggactccccaagatatggggagttctactctcaatggtcttgtttctttgctttctacattagttaaccagttttataccaaaaaatgcatgtttgaggaattgtctgaaattgggacaaaacaccttcatgtaaaccagctttgcaaaattttccagcccagatactcttcatctattcaaatggattgtcttattctgagcaaagacctgttgttaatcttcaagctaggttttgcagttcccaaccacaacattcttctattttgccaggctggtgcaaagtaattaaagatgtcaatcagaaatgtcaatgagactaaagtggttttgtaaatctcagctatatttagcaacactccatgtagctaatattttttggtagcatctggtagaccttagaatgttacatagccagtaggttctttattcaaattttaagtatcttaagaatagtagggcagtaacagttacttttgagagttttctggtcaagcttttaccaggcattctctagccttggtacaaaaaaaaaaaaacctgctggttgcgcagatacctaggcttgtccattttatgcatttcagcaaagtcattggatactattgcaacttgggaatactggtctgcatcaagtttattcggtagtttgaccgctagtatgttggaagttatttggattgtttttggaattttgactggctgaattatggttggtataaagttatgtgtataactggcaggcttatttatctgttgcacttggttagctttaattgttctgtattatttaaagataagtttactcaacaataaatctgcagagattgaacaaataatcctgatacttaatttttggaagtgggagctctcagccaaaagtaggaggcattaatcctgtagctttaggatgggcagctagtagcgtcctagaaatgagtatagaaaggataaaaaggtgtggaggaggggtaggggcaaaaatggttttaaacaaattccagccttgtggggaaaagggctgtttgggccaatacctcttaggtcatgtgcaacttggcacccgttactgatagatgcatttcaaaataagctttggtgcatccccccacttgttttctgtgattgggattgccaaattgattgtcactgattggaagtgctgctccagactcattccttctaaactagcctagcactgatgagtaatcagtcagtttttatttttaatttttaaaatttttttgcttggtgcggtggctcgcgcctgtaatcccccagctacttgggagtctgaggcgggagaatcacttgaac

SEQ ID NO: 11831 - DNA, 1094 bp, Homo sapiens
ggaggacgagagccggcgcagccctgctctcctggcccggcccctaccgaggccctcccgccgccgacgccgctgccgctgcgggcccgcgcgctcccggtgcgcccggggctgccgggactcatgggtggggccgggccaggttccgccccacgcctcggtgtatcctaccacgcgtttctgcttgtgttcgggagggtcaccccgcattatttagaacgttaagaattttgtcaaaagtctagtttctcagggatttgcggactttcaccagttttacgactaagttttgtcttggatagagggcattaaatgtgctttacccaatcttgaggatggcccgttttaaggcaaataagtaattgaaacttgggccagattttgcgtaacgtgcattcttctatttgcgtttttaaacagaaaccaaggtgtatgttggtaacctgggaactggcgctggcaaaggagagttagaaagggctttcagttattatggtcctttaagaactgtatggattgcgagaaatcctccaggatttgcctttgtggaattcgaagatcctagagatgcagaagatgcagtacgaggactggatggaaagtaagtaagatgttatgaatcttctgttcattaaaatatactgtggctagataatgaacttagtgctaaatttggattctgaagtctggaagagaccttaaatagctggtcatagtgttaaatgctaaaggcacacgaaggttaaagaagatagcggagatggagttagggcttggtaaagaccgccaaagtttgttgggggggaaggagtggttggaaagagtgagtggttggaaagagttctttttaaatctataagtcctgaatatatttttaactttagaattttgttaatttgcttttattagggtgatttgtggctcccgagtgagggttgaactatcgacaggcatgcctcggagatcacgttttgatagaccacctgcccgacgtccctttgatccaaatgatagatgctatgagtgtggcgaaaagggacattatgcttatgattgtcatcgttacagccggcgaagaagaagcaggtatttat

SEQ ID NO: 11832 - DNA, 1171 bp, Homo sapiens
tgggtttcaccatgttggccaggctggtctcgaactcctgacctcaaatgatccacctacctcggcctcccaaagtgctaggattacagacgtgagccactgcgcgtggcctctctgcaagattctgacttcaattcttttggatgtatacttagaagtggggttgctggatcatatggtagttctatttttagttttttgaggaatctctatcctgtttttcatagtggctgcatcattttacattcccaccaacaacgtgcagggttccaagttctccacatccttgccaacacttattatcttttgtcatgaactctgtttcataatttgatcccactgttatggaaagaagcattttgaaagtttatagagagaattttgttctgaatatgaataagtttcagaatctgaaagtgtttttgtggtttattggtagaagtagaaaacatgagattttaaaattttttatttaaacttgtaaattattatcactcacaaaagaaattattcctctgtgtcatcccaccagaaataaaattgacaaattattattttgtttccttttcagaattaaaattttagagatgtttagtgctcataatctccagtctgtgttctctcggctcattgaacctccacacaccgattctcttcgtgcctcaaaaatacgattacgagacttaggagcattaactccagatgaaagattgacccctcttgggtatcatttggcctctctgcccgtggatgtgagaattggcaaactaatgttgtttgggtctatcttccgctgtttggatcctgctctcaccattgctgccagtttggcttttaagtctccgtttgtaagtaaacaacattcatctaaactggagtctctaagaggaccataggtctctaaggggaccatgggggaaatcaagggcatgtgagccccctaaaaatttgcttgtatgttagctgtgaatttttagggcacatctgcatgggagggagaaggtcaaaaataaatttctgaaaagacaaaaacaaataaaacaaacaaaaggattttttagggagcaatgtcatccaatcctcaaagagatccaccctccaattaaagactgagaactagagatataacttattaaaagtaatccaggccaagcgcggtggcttatgcctg

SEQ ID NO: 11833 - DNA, 1196 bp, Homo sapiens
tccacgacaaagcacttctcaacatatccctaaactccctccaaaaacttacaaaagggagcacacacacccatccatgcacagagatggaccaccactgttggagaatgcccattcttcctgagttcctctgtactgggatgtatattttcctagccccaaatccattgctggcaatggatgcactgaatgtgccagcactgaggagttaaaatgagaactccaaacactaacgactcttcttcaagatgcagtataagacaatgaattttaacctagatgtaattatacaatggaaatggtattccagtttagaatatggaaagaccgacctagaggaattggacaactgattgcacctgaaaatcataaagggactttttctggccaataggcaggagtcctctttttgtgaagtgatcttttgtgaagtgatcattaaagggatggaaaacacagtctagtgtccagcaggcccacatgacagtttttgtaattcaaattatgcacttttaaaaaaaaaaacttaaacagggatcttaatatcttcctttgttttcctttgctttactcttctactttagaatattttcttaaaaatcactcaaaggactgtgaggaaaggctgtggtacctgaccttgttgaaatcaaggcccggcactgtactacaggcctgtttacagattattacggtgaactgaatgggtaccgaggcttcaccaaagaggtacttttttgttgttgttgttgttttaggaataattgtaccaattttaagagcattccccccacctgtccccacacacccaaacaaaatgtggtggtgttgccttcaaaaaagagaagttttgtgtcattaacatgacagaagaactttttaaaaaaaaataactgtcaactattctatttgcatttaggagactgttcatctatgctagattgtcattttccctccttctcccacagaagtttactggtagtccatgtcatggctcgtagctatccctctaaccataccatggaaatgcaggcacccaatgtgaaaaggagcacttgctgggcatcactgacaccgctcatgttttacacatagttgagtaatcagcatatctagaattatcttgcattgcctaaatcatatgtatatagtgaatgttatataatatacctggcaggtctgttttaatttaattg

SEQ ID NO: 11834 - DNA, 1954 bp, Homo sapiens
ggcgggtcatgaaaacagttactgagaattgttgtgctttgacagttaactctagaaagaaagaacactaccactgcaacattaatggatgcttgaagctgtacaaaagctgcagtaacctgtcttcagttactttgtaatttattgtggcatgagataagatggggaaaattttgttttaagtggtatggatatatttagcatattgaaccacacaagtgcttaattcattgttatgtaatctttgtacatataggcagtattttttctgtgaaacttcatattgctgaagacatacactaagaatttatgtagataatgtacttttatgagatgtacaagtaagtgtcttatctgtacagatgtaaatgttgatgaaaatgcaattggggttaatattttaagaattctttagtatattcttgggtgtggctatattacaaaatgggatgctggcaatgaaacaatacatttaacactattgtatttttattatatgtaatttagtaatatgaatataaatcttgtaacttttaaaattgtaatggaggctgtaatcattttataatctttttaattttaatgcaagtacactggtgtttatatttgcacaaagtattgatatgtgatgtattaagtcacaaaagtaagctgtgacattgtctataagcatttggctccacaaatgtatttggattgttttctatgtgaagcaaaccaattataattaaccacatgttgtagtaactggtctttttatatttaagcagaatcctgtaagattgcttgtctttgcttaaaaacaatacctttgaacatttttgaatcacagaatagcggtaccatgatagaatactgcaattgtggtcagaattacagtatgcacaaagaattaattagcattattaaagagtcctcactaaacatttcatatgatcacactgaagaactgtaacattccatagagtgaagtggttcaaatttctcttggaatttttacttttgttggccttattttatgatccttttcatatttcttttgacttagagtattaatacatggccaaaataatttagttactacctcatacaaacaatataatggttactacacatcacaggaacttagttttggtttaagtcatttttgattgcttttttccaatggaatatgtatataccaggttttagcaaaatgcacacttttggctctttttggtatatgttctttatattttaatgtgagtatatacactaagaacaaactaaattgtgatttatgatcttcatttattttaatgataatggttttaaaatatgttcctgattgtacatattgtaaaataaacatgttttttaacatgctgttgtatagtagcttgtcatctggtttaatctgtatatagtaacactaaaatatattaagaggggaaagctttatttgttttgtagttaaattcttaagtattgaattttggtccctcaaatcatgatttttatttgatatggggtttcagtttcatgaagcattaatatttccacacaggagaaaagggcatcttttgcagaaacttcgacttcctgataagaaaagtcaaacattcatagttttctggttagaggcaggggtccacaaactacagtcctcagaccaatccagcctactgcctgttcttgtaaataaagttttaatggagcacaacaccacgtattcactcacatgctgtctatgctgctttggtgctacaatatttgagttgagtggcttctgaaacactatatggtctgaaaagcctaaaattcttactttgctgaccctttacagaaaaaatgtgctagtgcctgggttagagaaagtaaggaagcattgggaaatgcagttctggaggtaaggaaggggaagattaagagggaagaactggattggggatcaagagaggcaccatttccatat

SEQ ID NO: 11835 - DNA, 1155 bp, Homo sapiens
ttgcatatattattcagaaaaattccaagaaaaacactcaaataataaaatacttaaatcaggactatgaactcgtgaaatccttctttttaagaatgtatagcaatacagatttatttgggggtctgggacttatcttttaaaaataatatgtattatatatattaatgtatcatggtgtgtcatatactactattgtgctaaatattttattttgtactattaggatctgcaactggaatatggacaaggacaccaaggtggttactttttaggtgcaaacaagtaagtaaagttcttttaaaacttaatttaaattcaagaattattaagttgcctttaatattatattttaatatttaaggtagaaaattgtattaggctggtagatatattttacaatatgcatttcacctttttccattgcttccttgctcattatttagttaatagttgtcctaatgggaagcatcaacataatttttttatatcaagctacattgctgatcttgtatgttagagaaaaccacatgtattgccactgaaggcagatacatgttttagcactttatttctaaaactgatctgtttatttcttataaaacttgctttggtacatctctaagatgggttggtcactaaaaacagctggaattattcatacaacttagaaatcttaactttttagctataaggtttttttaaagtaagatagcagttaaaatgtgtgtctgaattcttaaaagttaccaatctatgcagtaaataaattcaacagttatttaatgcctcttctacaccaggcactgtctaattgatagaggcacagaggtttaaaaggcagcttacaaacattaacaatttaaattgttcatttgccaggtatgatgggagacagaattttgctattccccttagagtctcattttctaagtttgtggataaattatgataaaaactaatttataagggaatataatttaaattaccaaaatcttccagcagtgcatatattattttaatagtcagaacaagttaaaattccttttttttttttttttttgaggcagagtgtcactctgttgcccaggctgcagtgcagtggcgtgaacttggcccacttcaacctccgcctcccgggttcaagtgattctc

SEQ ID NO: 11836 - DNA, 1597 bp, Homo sapiens
ttagctatccttcctagagatagctagcaaggacagctaatcaactctttcaacatttcaagattaaaggatgaggataccacctgggttttaatacggagatggctcaagccctttccactgccatgtaaaagatttttagatcacatgtgttgatcattacagtgatgagatggtattaaaatgcttgacaaattggtctccatggcagtgcttgtagtcccagctactcagagaggctgaggcaggaggataaagtgagcccaggagttcgagtccagcctgggcagcaaagcgagctcctgtctctaaaacaaaatacagacttgacaaacacctactgaaggcaatatgatcattacttacagaaaggacaggatcagagctaggagagtgaaggactagatttatgaagcttcagtcccttctttacgggcactgaagagaaacagttcaagtcctccagttgtcccataggctttgtcatataagaatggataatttgctacaagctcgaaatggcaaaaccaattacctaatgttgctactgtactgactaatcatcttactcatgaaactatctacaccttgcagagaactttaagaaaaccactgggcatggtgggtcgtgcctataatctcagaattttggaagaccaaggtgggggcatcccttgaagccaggagtttgagaccagcctaggcaacacagcaagatactgtctctacataaaacaaaaaataagaaaagttagccaggcatggtggctatgcctgtagtcctagctacttgggaggctgaggcaggaggatccttgcagtgagcactccagcctgggtgatggagcgagaccctgtctcaagaaagaaagaaagaagggaagaaaggaagaaaggaaggaaggaaggaagaaaggaagaaaggaaggaaggaagaaggaaggaaggaagaaaaagaaagaaagaaagaaagaaagaaagaaagaaagaaagaaagaaagaaagaaagaaaaaccttgcagtatacattttcataagcccaaaagttacttccttccatttattgcaaggctataagaacccaaatgtctgcctgttatgattttaaccagcacttttctacaagtgagtatgttcaagaacccctaaaaagactgtaataatcagatatcaagcacctatatgaggtagcaggaggaagaaagaggcagtacaaacaacaatccacacataatccagtaatgcaagctctgaaattccaacacttcatttcaactgcttcccccaaaattccataccatgttcttgcttttggataaagtcagtgacaagaaacgagatggtcatacagcagcagcaaaaatataatcaggaaatataatgactttgtaatatccctgtgcgaaagaaataaacctgagtagtgagaggaacatgggtcttggattaggatatagaacaatgtttaaaccctggttggccaggtataagctatgtaataaccttgggcaattcacctaattcctctgagtcttaatttcctcatttcttatatgtggtaattgtgcctaattgagaagatgcacaatagaaattc

SEQ ID NO: 11837 - DNA, 1202 bp, Homo sapiens
tgatgttgtaaaaataggggaaatttgaccgtggggacaattgtcaccattttaatgatttgtgaagtttattaacttattttaaattaagatagctataaaagtctttatagaagttaatatgtgtcaacatgatgagatgttatggagttttttgttttgaaattttctttcttttttttttttttttttgagacagactcttgctctgttgcccagactagagtgcagtggtgcaatctcagctcactgcaccctccacctccggggttcacatgattcttgtgcctcagcctcccaaatagctgggattacaggagcgcatcatcatgcctggctaattttttgtggtgttagtagagacggggtttcaccatgttggccatgctggtctccaactcctgacctcaggtgatctgcctctcttggcccctcaaagttctggaagtacaggcacgagccacttcacctagccagaatttttctcatcttttgtaagtcttatgtgggatggtttttctaatcagaaattacttctcaagcagtttacttaaaaatattccatattttattttattttatagatgatagtatttctgctgcaagtacttctgatgttcaagatcgcctgtcagctcttgagtcacgagttcagcaacaagaagatgaaatcactgtgctaaaggcggctttggctgatgttttgaggcgtcttgcaatctctgaagatcatgtggcctcagtgaaaaaatcagtctcaagtaaaggtaattgtgttgtaaagttaaaaagagtcttgctttttgcaatattttctttgaaagttgaagctggaaatataaaactagtttcttatgtggattacttgtgattatagtttgttttccatttcgtttttttaattcccaaaaagttctgaaagtttattctttattatttaaaataaagaatttttgtgtaatccactgattatactcacaggttttttatgttacagtatttgtgtgaagttagtatcttccaactagatgataagtttactcagggcaggaactgaatcatcgttttgtgtctctcatttcatattgaacataggtggtaggcactcatgtgttcttaaaattctgttgtcaatacagaaacataattaaaatcatcatagtttaaatagctttattctgaaccctctgtggttgttagca

SEQ ID NO: 11838 - DNA, 1141 bp, Homo sapiens
aatgaggaaactaagatcttaacatactgaaagagtcaggttacgctagggataatggcaggatatgagttttccttttttttggtggaggggtgggggtgggcggcaacagggtctctgtggcccaggctggagtgcagtggcacgatcactgctcactgtagccttgacctgacctcctgggctcaagtgattctcccacctcagactcccaagtagctggaactacaggcacaggccaccatgcctggctaattttttttattttctgtcgagatggggtctcactattgcccgcactactctcaaactcctggactgaagtgatcctcccaccttggcctcctgaagggctaggattacacgtgtgagcactctgcccgtccaggacatgagttttctagttctagttcagtcttcttcattgtaccttcctaattccttaagtatccatgaaaaatctgttaacaacttgaaaactgtgtttatttaaaaccttgactctttttctgttaagatatggttatcgaggaaaggactgtagagctaatgtttaccttcttccgaccgggaaaatagtttatttcattgcatcagtagtagtactatttaattatgaggagagaactcagcgacactacctgggccatacagactgtgtgaaatggttggtatcatttaacattggttcatttttgttctttcaggccctcattttgtattttttaaatttgggttttattgaaagtgatttcttgtggaaagctcagaatgtaaaaatattatgggtcatctgttgaatatattttaaaaagaaaaaaaggactttcggcctccaaaatggtggtgtggtatcagcagcaacaaaacacatcctccataaatcatgattggaacctcttctgctttctcatgtcgtacagtccttctcttctctggtctgtagtgtgaaacatatatgggacagactggacattttcaggtttctgaaagtgattattggttactcgatatttattgaggatttgtcctatgtagataaattttatacttgaagctttattcttttgggaagaaagaaatctagctgaataaggatcataagtatgccgtaggatgtcatactacaaatgtgagaact

SEQ ID NO: 11839 - DNA, 1156 bp, Homo sapiens
aataaaacatgtaatttcattccatctttaaagctttagaaatctagaggaaaaattcagtaggaatacgactgatgtaactgaagggcttatgttaagttttttggtcttaattgtgtttgtaggattattttagaaaattcaatagcatttataattgctataattgcattataactctttacagtacaagggttgatctctgtgtagatcaagctgtacgttgtaagagaagaatgtaaaatgcattgaagctgggtttatatgagccagaaatggacttctccctctgacaggcatttaaaaagattcaaagtgatagaatggctttaaaaagtctgtgtaatatttgccatactcttaaataacatcacattactctccaactcctctcttaacagttttgttttgagtaagcttcaagcttttagcttgttgggcagaaagatgatgtgatgtttaacttaacattttgaaagaagtagatttgattgtacttaaaaggaatataagttgtcagaaaacctcaaactttaaaaaacataaatgaagatatagattgacttccagttattcagagtaatttaacattgaaacatagggaagttgcatgaaaatgaaatatatcaattttgattcttcatagtaaggtttaccagatgaagtcttgtggttttcctcctactggcgatttctcgatctcctttccaggactttaaatgttggtgttcttcagagttttattccacatgctccactgatactatatgctgctcccatggcctcattttctatctgctgagtcccgtatcagttatctccagcccagatctctaacaggtttaactcatatttctagttgcatcctagacatctttatttgaatgtcctctaccacaaatgaaaatcaccatgttcaaatctgtacataatcatctttcctagcccccaaccaccagtttcatcccttagtgattgactccgcatttcacctagctacctaagctagaaacttggacatcattcatggctctttttacctcacttctcacatccaggtagtcaggaagttctctaaacaccgtgtcccaaatatctgcattatagcactttctagtacaagcgactgcaaaacaattgaaattaacttaatctg

SEQ ID NO: 11840 - DNA, 1392 bp, Homo sapiens
tgataaagttcaggtaacaggatgggcagtgatggagaatcactgttgattgagattttggtttccatgtgatttgttttcttcaatagtcttattttcagtctctcaaatacagccaacttaaagttttagtttggtgtttattgaaaattaaccaaacttaatactaggagaagactgaatcattaatgatgtctcacaaattactgtgtacctaagtggtgtgatgtaaatactggaaacaaaaacagcagttgcattgattttgaaaacaaacccccttgttatctgaacatgttttcttcaggaacaaccagaggtatcacaaacactgttactcatctactggctcagactgtactacttttttttttttttttcctgaaaaagaaaccagaaaaaaatgtactcttactgagataccctctcaccccaaatgtgtaatggaaaatttttaattaagaaaaacttcagttttgccaagtgcaatggtgttgccttctttaaaaaatgccgttttcttacactaccagtggatgtccagacatgctcttagtctactagagaggtgctgccttttctaagtcataatgaggaacagtcccttaatttcttgtgtgcaactctgttttatcctagaactaagagagcattggtttgttaaagagctttcaatgtatattaaaaccttcaatactcagaaatgatggattcctccaaggagtcctttactagcctaaacattctcaaatgtttgagattcaagtgaatggaaggaaaaccacatgcctttaaaactaaactgtaataattacctggctaatttcagctaagccttcatcataatttgttccctcagtaataggagaaatataaatacagtaagtttagattattgaattggtgcttgaaatttattggttttgttgtaattttatacagattatatgagggataagatactcatcaaattgcaaattcttttttttacagaagtgtgggtaacagtcacagcagttttttttaccaacagcatacttaacagacttgctgtgtagcagtttttttctggtggagttgctgtaagtcttgtaagtctaatgtggctatcctactcttttgggcaatgcatgtattatgcattggaaaggtattttttttaagttctgttggctagctatggttttcagtacatttcctactttaagagtaattactgacaaatatgtatttcctatatgtttatactttgattataaaaaagtattttgttttgattttttaacttgctgcattgttttgatactttctatttttttggtcaaatcatgtttagaaactttggatgagttaagaagtcttaagtatgcaggcgtttacgtgattgtgcca

SEQ ID NO: 11841 - DNA, 1871 bp, Homo sapiens
atgggactacaggtgcataccaccacacctggctaattttagttattctgtagagacagggttttgccatgttgcccaggctggtcttgaactcctgggctcaagccatctgcctgtctcggcctcccaaagtgctgggattacaggtgtgagccaccgcgcccagcctctcctgcctgcacttcttttagctactgattacctttgccttttaaaaaatgcaccaatgctccagttaagcaatatgtgataaatgtcttagacatttggaatcttttgcatgcatgcttcctgaggcagcattttggagaatgactttggatttacaagctttagctacatttataggaacttctactagcattccatggattagtgcttttcccactgtcatgtgttgatgaattacttaccgagtagacaaatttgttattttttaagagtaaaattgtaaaatatttttcttctcaaccatgcccttgttaattcttgctttcaagaaagctgatggtgtgcccgtctacctgaaacgaggcctgcctgaccaaatgctttaccggaccaccatggcgctgactgtgggagggaccatctactgcctgatcgccctctacatggcttcgcagcccaaaaacaaatgagttaggctgcagaggactggtttgttttttggcataaaccctttgaagttcctttttcattgttaaattaaaatttttttttttacttggatggcttaacatttttgcaagaaaaataggaagatatgaagatgatgttttggtttgtttatgaaatgcatatggcttgtcagagctcattcgacagttaaagccattgtttaaagaaatggtgctttgctctgtgtttgtgctcctgatttccctggaggttctggatgaaggctgaacacaggcttgttaatgtcagtctgtgctgaggacctcagggacttgaggttgcatttttgagcatggggtgcaggagcctttctggatttggatgtggctatggaaagaacacagaagccaaggtcatgtgcatgaaatgaggagtttgagttagtcacctcggggattttttccattttgcagtaaaatgttaaattaatgtagcctgcctctatttgttgggcaggtaatttcaaagggttatttgcctcatctcctatctttagtgaaatcttatgtgtaattattccaccgtgggaacagagaatacctgtttagtgttgcactttagactggtgtctgttttgttaatgcagctgtgccacaaattctcctttatcttttaaaaatgttatagctttaaattttgatttattttgactgtggaataaatacatgaatgaaaaattttaagtttgaagttctttgaatgacctttcagagtaatttcagaacaccagcagcatcttaaacctgagtctaatttctttcttgttaattaggcaccagataatctttataaaatggttcttaaaagtctagtaataggagtcttaatggcatattgatgattaccacatggttttttataaaaacctgcctgccccttagtgaaaggtacctgtaactcacagttcatttagacactaatttcctttgctgtcatgattggtagacttcacttaccctatattaattttgaaaaaaggtggaattttattatatatgaaggaatagtttgtatcttaccatagcacagaacagtgacctcttgctcaggataagatgtggtgatttgaaaatactcaatagtagccttgcagtgatatctctctctctctctctctgcaaatctaaattttattctctggtatttcctccaagtttttattttgaaaattttcagactacagaaggact

SEQ ID NO: 11842 - DNA, 1113 bp, Homo sapiens
aatgagattttagtagaaatctgtttcatgttgaatcctcacaggaaggggttgctacagttaatgatatattgggggaaaaatgtaactgagttttacaatttgggcttaaaaagtagtcaaaacttgctttgctgtaatagtcaaactctgcagctgactttttattttttgagccaatttgaataaatgttttactccatgacatgttataacagagcttccctttccttcttttttaccccctgcacaggctattttttttcttgatttcatgataacgacctgtttatagtaaattggcttgtcaattattatatcttatagagtgaaaattctttttatttgatgtttgattctcattcagaaacttgtttttgcctcttcttttacagttttttatttactatccaaatgtgttttttaaaacgttaaaaaaacaaaccaaaacagatacttaattcttccttattgtgtttgtggtttattcagtgctgttgggacattcgccagagccctggattgcagcagttctgtgaggcagcctagtttgcatatgagtgctgctgcagcttcccgagacatcaccttggtaagacatggtttgaaattttgtgggtatttatccttctgttacttgtttaattttaaagccattgtggcaatactgtagaccgggagcttttgggctcttagccttcctgactgctaggttgatttggcttggttacttggttgactgggttatgataacactcgtctgtgagttgagagttttttgtgtctgttcattagaaagaggggctgtttttttttttttctttctttttatatttggagatggagtcttgctctgtcaccaggctggagtgcagtggcatgatctcagctcactgcaacctccgcctcctgggttcaagtgattctcgtgcctcagcctcctgagtagttgggattacaggcacgtgccaccacacccagctaatttttgtatttttggtagagacggggtttcaccatgttggccaggttggtctcaaacttctgaccttgtgatccacccgcctcggccttccgaagtgctgggattacaggcatgagccaccacacccg

SEQ ID NO: 11843 - DNA, 2470 bp, Homo sapiens
tccgggaccgctcgtttagcgagaacggcgatcgcagccagcacctcctgcacctgcagcagcagcagaaggggggcggcggctcccagatcaactccacgcgctacaagaccgagctgtgccggcccttcgaggagagcggcacgtgcaagtacggcgaaaagtgccagttcgcgcatggcttccacgagctgcgcagcctgactcgccatccgaagtacaagaccgagctgtgccgcacctttcataccatcggcttctgcccctatgggccgcgctgccacttcatccacaacgcggacgagcggcggcccgcgccgtcggggggcgcctccggggacctgcgtgcctttggcacgcgcgatgcgttgcacctgggcttcccgcgggagccgcggcccaagttgcaccacagcctcagcttctcgggcttcccgtcgggccaccatcagcccccgggcggcctcgagtcgccgctgctgctcgacagccccacgtcgcgcacgccgccgccgccctcctgctcttcggcctcgtcctgctcctcctccgcctcctcctgttcctcggcctccgcggcctccacgccctcgggcgccccgacatgctgcgcctccgcggcggccgcggctgcggccgctctgctgtacggcaccgggggcgccgaggacctgctggcgccgggggccccgtgcgcggcctgctcgtcggcctcgtgcgccaacaacgccttcgccttcggtccggagctcagcagcctcatcacgccgctcgccatccagacccacaactttgccgccgtggccgccgccgcctactaccgcagtcagcagcagcagcagcagcagggcctggcgccccccgcgcagccgccggcgccgcccagcgcgaccctccccgccggggccgccgcacctccctcgccgcccttcagcttccagctgccgcgccgcctgtccgactcgcccgtgttcgacgcgccccccagccccccggactcgctgtcggaccgcgacagctacctaagcggctccctgagctccggcagcctcagcggctctgagtctcccagcctcgaccctggccgccgcctgccaatcttcagccgcctctccatctccgacgactgaggcaagagggcgccagtgaggaggaagggaaggcggttcagagatgttggaggacacccctcgccatctcgcccttgctgggggcacgggagtggggggggtgacatgggccctaggcagactgcaagcccgaccgagcacttggactcgaactctgtgccgggaggggcccccacccctcctttttcggtttcctcttgtctttttttttttatttttattacgaagtttcattctttttgagcaaaaaagtcgaactttttctgttgaacaaaatattcacaacagggcagttgtgatacgaatagaacaaaaaaaaaaaaaaaacacttaaactttgttaggactccgatgagtttgggacttcaggaaaaatcaacccagcaccagcagctaccaaccaccattccatctcttcacttgaacagcattagttaagtccagatgtgggaacccttctcttggaagaagttcctaattgtgtctcagaccggtgtaaacaaaccagccagccgccaccttgctaaacctataagctttttaaaatccaatatattctgccaagaatatgccttgatagttagccctcagcccataggtgttttttgttttttaacagaattatatatgtctgggggtgaaaaaacccttgcattccaaaggtccatactggttacttggtttcattgccaccacttagtggatgttcagtttagaaccattttgtctgctccctctggaagccttgcgcagagcttactttgtaattgttggagaataactgctgaatttttagctgttttgagttgattcgcaccactgcaccacaactcaatatgaaaactatttaacttatttattatcttgtgaaaagtatacaatgaaaattttgttcatactgtatttatcaagtatgatgaaaagcaatagatatatattcttttattatgttaaattatgattgccattattaatcggcaaaatgtggagtgtatgttcttttcacagtaatatatgccttttgtaacttcacttggttattttattgtaaatgagtacaaaattcttaatttaagagattgtatgtaatatttatttcattaatttctttccttgtttacgtaaattttgaaagattgcatgatttcttgacagaaatcgatcttgatgctgtggaagtagtttgaggaacatcctatgagttttcttagaatgtataaaggttgtagcccatccaacttcaaagaaaaaaatgaccacatactttgcaatcaggctgaaatgtggcatgcttttctaattccaactttataaactagcaaaaaagtgtttgcttattc

SEQ ID NO: 11844 - DNA, 2702 bp, Homo sapiens
gaggcagttaactcttccaagaacagaagcggcatgttgaagaaaatctgggggattgggatgggggtatgtgtggatttttcctccactaaatctgcaggaaacatgttgaacataaattcaaaaattttatcccattcatgcctcccctacttctgtgagtccagtcgtctgtcactccttacagagaaacttttcttcagttcactcattcagggcagcctattttattgctgctactgtaggaagtgaggcgactccgttgcagatttactctgtccccaggtgcaggccacctgcaggcctgaatgagcctttttcatcccccagggcctctaatgccctgccatagccgccctgcattctctgtgaaatgactacagagagttggattttagcacatacacatgatccctcccctctccccttttctggctttatgtaggggctggattagttggcaaacagcccatttggtcagatttgtgaattttgttccattttagcaaagcagaaatatgttccaaatgttggatcctgggagaattcaggatcaactttgcacaaataatttatttttattgtctgcatgtgttaagtcctgcagtgacctacacattccatcctaattattcaaagagccattgagcatttcccctaccccccaaaaagtatgctaatgctaggaaacctgattttgccacccagtgaaagtatatccgtcctcttagctgtgaggaggaacctggggaaaggagagtcagagaaaatgacttattctgtgcctacattgtttacctatcgcttggtggcagtaacaagtgtctcacttaaaatgccattaaacacatttatcagctgggcgcggtgtttcacacctgtaatcccagcatgttgggaggctgaggcgggtggatcacaaggtcaggagttcaagaccagcctggtcaagatggtgaaacccccgtctctacaaaaaatgcaaaaaaaattagctgggcgtggtggtgggcgcctgtaatcccagccactcgggaggctgaggcagagaattgcttgaacccgggaagcggaggttgcagtgagccgagatcgcaccactgcactccagcctgggcgacagagtgagactcgtctcaaacactcaaacacacacacacacacacactctcactctctctctctctctctcacatcctttgcagtgattttaatctagaaaccttaatgattttcttccttttcaagcccagcccagccctcttcctcacacatccagcaggtggcgctcttgcaaacgttttgctgctggtccagtttttcactggctcaccatttttcatttataatttcagaataagtgttacccactaatagttatcttgagaatcatagctttggaagggtagtagcttcatccgcattcatttttcatcctactgatctgaaaaaaacatttcatagtatgtaaatttgctccagattttagggtctgtaaaaaaaaaaaagtactcaggtaaatgatcacttagagtaatttcattgatgtttcacagagtctgaaggggcgggttagaggagagtgagtttacaatcatttcctactgcagaaaagctcatatttcaaatgtaattcatcgctcttcgagagaaaaccatctaacactaaaaatgcagctgtaagccaggcatgatggtgcacacttgtaatcccagctactcaggaggctgaggtgggaggatcgcccaggagttcatgcctgtgaaaggccactgcactccagcctgagtaacacagcaagaccccatcactaaaagaaaggaatttaagaacaaaaaagcagccatactggaagtataggaaaggggctttgtaggaagaggcaggaaagaagttaactcagtgtccaaagttttgtcctaaagagaacaggaaattccctgggtggttttgcaaccactcggccccaaatgtggtttttgtgatcctgaattaattacctagttaggaaactgtgtagcccacacctgatggaaagctgccaacctaacactttttgttctaagacctagctggtgagaagtgagggacttggtaaaataaatgtggtgataaccacagaaaaataataatgaaactggcccaacaaagcccagctcattggaaatggccagcacttctttttttctccatttaaaatgaaataaaagcagctacattagacattttatactagcaggtactctgtacacaagcatgtcccgtaacatgtccacatgttatctccagaatcctaatctgcaaagtgggtgttctcacagctgttgactgggactcaccccagatttggacgttgtttcaaacagatgtttccactggttctgtatctgaaatcttgttactaacctaataggagtgcctagggaagtggctgtttcacagtttggtgagatgtttggggtcatctcaccaaagaacaaaccagaccacagttgcccaggtatgtcaaggggtcagtgtagggtaggtgctaaaagtgaaactggtccctctgaggtcacctgctcttggctgtgagtcctagggtccaggacttgggtgcccccacagctctgcactcatgattctgtggctctctgtccatctggccacagttcagaagccaggctttctccacccttacgcttttgtcaatttggtt

SEQ ID NO: 11845 - DNA, 1198 bp, Homo sapiens
actctaattatgtaaatgataagctttgagaagaggatcctgtacgaaagcccatttccctgttttgctagtagttttttcttatgatgcacatttgggagataagaagtgaacgtagaaaaaaaaaagaaaaaaggaaaactatccccttgattgtggagtctcacttcatatacataattttgtttttgaaatggagtctcactgtgtcacccaggctggagtgcagtggcgtgatcttggctcactgcaacctccgcctcctaggttcaagtgattctcccacctcagcctcccgagtagctggaattacaggcatgcgccaccacatcggctagttttttgtattagtagagatgaggttttactgtattggccaggctggtcttgaactcctgacctcacgtgatccatccgcctcggcctcccaaagtgctgggattacaggcattagtcaccgcacccggccatatacataattatttcatgagaaaaatgtttgaaggaggagtgcttcactacctaaatgtgaaatctttcatgtgtaataattgttgtttcagtgatatgggagaaccaaatcgtcatccaagcatgtttctcttacttttggtgttggagagactctacgcttccccgatggatggtacttcttctgctctcagcatgggaccttttgttcccttcattatgaggtagtgtcatgctgtgtagaaattgtctaggttggcgtgggagttttacgggaatattttatcttcttcttatttcagaaactattttatatatatcatatatattttatatatatatattatttgtttgtttgtttgttttttgagacggagtctcgctctgtcgcctgggttggagtgcagtggcgcgatctcggctcactgcaagctccccctcccaggttcacgccattcttctgcctcagcctccggagtagctggggctacaggcacccgccaccacgcctggataattttttgtatttttagtagagatggggtttcactgtgttagccagaatggtctcgatctcctgaccttgtgatccgcccacctcattctcccaaagtgctgggattacaggcatgagccaccgcgcccggccatattatatatttttttatatatgtaaacctattgtatatattaaaaactattatatatataactattatatatatta

SEQ ID NO: 11846 - DNA, 1240 bp, Homo sapiens
ctctttagtgccttgatcacaagaatttttggagttaaaagggcaaaggatgaacattccaaaacaaataggtaagctccatttaaggctaactttactttttttaaaaaatacaatattgtcctggccaaaaacaaattttgaaattgtgcctactgttatagattcatctagagcataaaactataaaaatactgtaatgaattaacctatgctgccaagttataaacccttgggcaaaaatatcaactgtttaataagtggacctttcaaagcaacaaaaatttagcaaggtagcaaggggtgaaatgtagagcttgtttctccatgcaaaagctagtgttttttttgtttttttttttttaattgcatcttctttaagtagtcctgaaatgtcttaactttacttgtatatattatcctagcttgtataatatctttaattttataggtggaagtttaaatgtttatgatcctctcattagaacatctctcacattacctttgcattaaactcttgtactaagaggagcacctatatgtgttaaccacaagaaataaacagtgctttttacttttggtctttagttttatgtttaacctctaatttgtttttgtctttaaaaaacagcttttttgttatgcctgaaaagaaacctgtggaaccattttgattttgggtagtttttagataaaaatgcacaagatctgtttgtttttaaagaagaaaagctttgaatagttgttttttagcacttaagaggatttaatggtaatctaattgacttgcagttgttaacactagatgtcactgttgctgcacatttaattacttccttaactttatttaggatccagtttggcccagtggtctttctcttgaggatctagagttatattcaaagccctattcccttcttccctaaaaaagtcattatgcttcatatttaagttttaagctaatgtttattgaaatgcatttttgtgtgatggaactaaatcttaggaattaaaaaaatatgaaatcattttgtgatgtactagtgataattctaatgaaacctactatggtatttccgaattatcatttaaattgcttcttgtcaccctgtaacattcaccagatatttaaaaggaaggtaactggctgtaagtataaatcccttgagcatgttcaggcaataccagagagctttttaattttttttttaactgagtattttttaaataaataaaacat

SEQ ID NO: 11847 - DNA, 1134 bp, Homo sapiens
ccagaggatctggttgaaaattttgtggtaggcctcattttgagagagatgaaaatgattactaaaatacagtttaaaatgtgttttctttgaatatgtgtaatccctataaacatagaacataaattatagtaaactataaacttatattctctttgttggaaatcttgagttgtatagtatgaaatatctgtgagaccatgatcaaccttttcctgaatattttgagtgtggatgcaaacccatgtatcaaaatttattttgcagacaagacacatgctttaaacactgcagttgttagaaatgaaatctttagatcttaagacccataataaagaggaaagtaggtgaaaagtatgagacatgttttagtttcacccccactcaatataaggatatttattatttactaacagtgtaaatgtgcatcaatagtttgtacttttaactttgatacctaattccgaatatttgattatatatgccttttaggtgcccaaatgtgagtctgcaaaagctgccagaacagtggctatggagtgttttagaggaaattaaatgcagtgatccttcatctaaactctgtgctacaaggcgcagtgctggaattcctttctacatacaggtatttatctgtaggaccctagctgtttgtttatatttgtcttttgatgatagtgtatcctaacctgtttgacgtgtgagtgagcgtattacacataaaggacatttctgtcttttcagcaccatagcatttgtggctttgttttaatgtggggatggtgtgttcctgtgacaagatctgttcttggaacaaaccctctaaaaggtcaatcttgtaatataaacagagggtggtataaatttctgtctgtgtattaagtaggcagacatcactgtggcacagtcattgctcacttccaggaagtgcacatgttaccccaccaccccactgtatttttttttaaaaatagtcttcctttcatctcaagaccttcaatactctctgtaggcaaccagtgttaacattttcttttcaattctcctataaaacgtccatccataaaataatcatgatcataatagtagctgacatttattagtggttatttcacctcattaactccttccctg

SEQ ID NO: 11848 - DNA, 1107 bp, Homo sapiens
tcagcttaaaagttaattctattcaaaaccttagtcaacaatgaattgtccgttttgttttctttaaaataaataatctggccggccacagtggttcatgcctgtagttaacagctactcgggaggctgatgcagaaggactccttggggcccaagagttggagactgtagtgcacagtgatcacacctgtgaatagccactgtacttaagccgaggcaacatagcaagaccctgtctctacaaaaaattaaaaaattaggtgggtttggtgacatacacttacagtcctagctgctcaggaggctaaggtgggagtattactgtaacctcaaactccttgagcctaggagttcgaggttacagtgagctatgattgtgccactgcactccagcctgggtgataaagcaagaccagaccctgtttttttttttttaaaaaaagtcatatttgttatttgtctaatcttgtgtggagaaagacagcatgtaggaaagccactgggtgacattctggcaaattccatggttctgtcttgaagtgaagcctagtagtttttcaggaggtcctttgcaccacatcttgcattgtcattaacaattttatgtctctaaaaggtaatacgggttattttttaatgggtatggagtttccatttgggaagatgaaaagttctctaaatgcatgatggtgatggttgtacaaaagtatgaatgtacttatgccacttaattgtacatttaaaaagggttacaatgataaatattatgtatattttaccacaataaaaaagaaaaaaaattttaaaagaaggaaaaaaggtaattatttcacctagacctatgtgtgtgagtgttgtcgctttgtgtgattttctgttggagttgaataacatgagctataacagaaaacatactgaggtttgtgaatgtgacataggaaggcagttctagtgtagcagttaaagatggtcaactctggagccagactgcttggcttcatgttctggttccattgctttcttgctgtctgaccttggataagtttcttagcctttcttggcctcagttttccaattgtgaagtagagataatgatcgtacttattt

SEQ ID NO: 11849 - DNA, 1099 bp, Homo sapiens
ggctgacgtcctagcctctgaaaccagcaggctctttgtgttccttttttaatctttactagtgagaaacagccactctaaaatatgcagagaggttcagtgtttacttttagagaagtaatagtctgtagccactgatgtgcttatttctccacctgattttatttcctgatttgctgcctgattccctttctaggtgttagggaaaaagcaaaaatgttagcaggtaaataatgatttgtttatgttaacgataagagaattatgcttacttgaaatgattgacaaaagggcaaatcatattaaataatgattattttagaataggaactttaatttgtgttagaaatgagtttaaaatgtgatttttatttattgaaataaaatgttaattggaaacatgaaaattagcagctgataattatagtagtcattgcataatacagtaatggtctttgttattgtgctttcaggacaagagcaatctttcccatccttagggtcttgtaatagcaggggggctctgggagctttgatggcatgtctgcgaatagctagagctcatggacatcttcagtctgcaactgatacctgggagaacctcgtgtctgatgcaagaataaagcaaggcttaattcatcagcattgccaagtaagtaaagaaaattacctggatttgtacatgcagtagatccctttcatgtagcagttcaatatagaggcccctacattgtatcctgaactgttttagggagttcataaagagaatgagtagaaaccctagtctcccaactaaactttcagtaggccctttcttcaagctactgaaagtttagttgaggatgtaagaaaacttacataaaacaactggaaactcttagaactgacaatacagatacaagcatgccatcatgtgcccttaaatacataaggactcgcttggaaggctcagaagagactgatcagagcaggtggtgcttgattaggaaagtgatagatatgattagaaaagaggaagccttggagcagcatacaaaatggagggacccaaatgagcaaggtctggaggatgattaagaacattgcttatcaggggtgg

SEQ ID NO: 11850 - DNA, 1193 bp, Homo sapiens
tattatttttgagacaaagtctcgctttgtcacccaggctggagtgtagtggcatgagcacagctcattgcagtctcactcctgagctcaagcaatcctcccacctcagcttcccaagtagctgggactgtaggtgtgtgtcaccacacccagctaaatttttaaattttttatagagatggggtttcactatattgcctaggctgatcttgaactgctttctggattattttttacaaggtaaaaagaatcatatacaaatttgagatctgttttggctttacttgtagttttttgttcttgtaaatttaataattgaaatttgtggtcattctgtgtatttaatatttttaaagtctaaattgttataaaatgaaatttcttttactaatcagtttacaataatggctcatggctcatttttcttcaggattaaagagccaacgctggaaatgtttctgtctagaatcttagcatcctggactaattcagccatacaagtccttgaatcaagttccccgagcctaacggacagcctgaatgggaattcaagtatagttgggagacttttggaatatgtctatacccattgggaacatccattggatgctctgagacaccaaaccaaaatcatgttcaaaaaccttctccaaatgcaccggctcactgtggaaggtgcagatttcgtccctgatcctttctttgtggaattgactgagagtcttttacgattggaatggcatattaaaggaaagtacacgtgccttggttgtttggtagagtgcataggagttgaacatattttggctatagataaaactattccatctcaaatcttagaggtgatgggagaccagtcattggtaccttatgcaagtgacctcttggaaaccatgtttagaaatcataagagtcatttgaaatcccagactgctgagagttcttggattgaccagtggcatgagacttgggtttctcctctcctttttatattgtgtgaaggaaacttggatcaaaaatcttacgtgattgattattacttgccaaaattattaagttacagccctgaaagcttacagtacatggtaaagattcttcagacttctattgatgctaaaactggtaagaaaaatgcatttttgttttagtagtttctaattatgatgcttaaatgtaggtagctatgcagatac

SEQ ID NO: 11851 - DNA, 1113 bp, Homo sapiens
aacgatgctgccaacagccgcctcatcataacgcaagttaggcgggattatttgaaaggtatgtcacaatgcttgacctttacgtcacattaatgcctctgcagatttttcttgtaacgcccttcgaatacttggataaaggagtccatttagcaaattacctgcttatcaagagccttttgtggtagctgagagacataaattactgtacatgcatttataatacagcttgaatatgaatgtacttgtcatttgaccacttagtccagtttccattccatttaacacaagatgggttttcttaagatgaatcacagctcttcagacatgcaaaatttgtgttccagaacgagagaaagtacaggctttcaagtgcgttaaaattcacagcacaagtcattttgctttggaaattaacatactttagagcatctgaaacaattcccagcagttgtttcttgcatattgtgttggttgtgtgtgagataccaaatcagttaaattgagtgttaaatgtgtgggattgtgcaccaaatgattataatattgatttttaaaacttaatctaatacttttttaatagttcataataccaacagcaataaaatacagtgtttgtttgaagtttggagttttcaaattaatgttaagagaatgacacctgaaagatgtggacatgactttggggaggattgggattggggtgggggccactggtttgatagaggctgtttatgagttttgaaggggatgaattgggatgtggaggtcttatgaatgatctcccaaggggcactatgacgaatctcttaaatttagctaagtagctttccactttaagatttacatttgaatttgagtgaatacagtgatactgcagttttgccagtacaacaaaacccacttaggagatcttcaagaaaggttgaaaaagctctggaaatgtaaccttattgcttcctatctctgtaataatggtattattcctcactgcatgttctggttttgttttgggtttttttttgttttgttttttttttttgtttttgttttttttgagatagggtctcattctgttgcccaggctagagtacagtggtgggatcgcggctc

SEQ ID NO: 11852 - DNA, 1196 bp, Homo sapiens
ttagaattataggctatattctctttagtgctattgtgctgaaatgttaaccattgtaaccacccacttatagattaaagattgctttaaaatgaatcttttgctcccctcaatctaaattatacctctggtttatttggactttaacacacattttgcgatttattttgaaactagtatcgtcttttcataaattcagaagagctgtttctcatttttattacaaagaaaataatgtatcaacttaagaaagctggtatgagaaatcattttaagaggaaaccccttcaggcaccatccattcagattaaggtgtagtttccaaacctgtagctttgtctttaaaatatttgaagaattatgtcagtgtgtctctctatagagtggtaacagtgggttggtattaaaaagcaaaaatatttgggtttaggtctttgtttcaggattttttccatccttttggcatttcagaataatgtcatctcattttttttgtctgttttctctcataggggcatatgatattttcctgaatgcaaaagagcaaaacattgtgtttaatgctgaaacctacagcaatctcattaaattactgatgtcagaagattattttacacaagcaatggaagtgaaagcattgtaagtgttagtccatttattaaacctcttgtttaaaaaagaatattggctgccattagccaataattataatagtaatgtgctgtgtagtaaaattgcttgattggcctcagctacccataaaaatcatatgaaatggttaactaactttatcaggttttttcaccttcaaaaaaaaacacctttactggccatatacagtgcagtacattttgcttactaagttatattccatcacaattcatttaagatatccatgcacagaaaagtaattttattatattctgttccttgttcaacatctaaatccatgtaccttttgtggtgggagcagcctgagaaaacaaagacaccatggactttgaacttagaccaagatttgaatcttacttaaaagttctgtgaccttgggaaaattacctgctatctctgatccttagttcttcttccgtatgatgagtgtatgataatattacttaatattaaagatttcttctatgtgttgaagaaggtagagtgaagtagagaaaacataggtactgaacacatcttatttg

SEQ ID NO: 11853 - DNA, 1099 bp, Homo sapiens
ttttccttcttacattgtaaaatatgaaatcagaaattagtaacaattagggaactttttacataagtgcttaattgaaaacatgttttgaaatcagtcacttctctttgcagcatttattctggtcaaattttttgtgtacaagtccatcattgctctataatagcagtgttgtattataatcactgtttggggtgccagaaatgttgggcacattgcttaattgtttcaagtttctttatacttataatttcaaggatagtttcttgaaatttactgtttcacagagggggatgaagaaaggaggagttaatttttttatcattgtatctcacagtgtttcttttctgccttttagacaaacgaattgctgagtaattttcttatactgtgattcagaaaataattgaactgaacttaccgatcttttcttactttattctaagttctctatctctgtgcttctacattttatttggtaggtataattgaaatcctcaaaggaatgcaagaattgggagtacatcctgatcaggaaacatatacagattatgtgattccatgctttgatagtgtaaactcagcacgagccattttgcaggtgagtacaagtgtggttttaatttaataattgaagaggatatctttcctccttaatgtttagtgttgacacacaaaaaagtcattgaactgaggactcaaaatggtcaaatctgtatacaattttctttttttcttttttttgagatggagtttctctctcattgcccaggcaggagtgcaatggcacaatcttggctcactgcaacctttgcctcctgggttcaagcaattcttctgcctcagcctcccgagtagctgggattacaggcatgcgccaccatggctagctaattttgtatttttagtagagacagggtttctccatgttggtcgggctggactcaaactcccgacctcaggtgatccacctgcctcagcctctcatagtgttgggattacaggcatcagccaccgcgcctggccctgtatacaattttctaaagctttgtaaaaatattagttggtataacatttatagtggttaaactttcaaaac

SEQ ID NO: 11854 - DNA, 1223 bp, Homo sapiens
cctgttttttaaaagaagtcgtaaacctttaggtggtatttttccctagttttttgaatctggatattttatttagctttaatacttaaataaaaacactctaactttgtcttctaatttctggaactctctatagactctggagaaggtggagaagtccgagcttcaccttatggaccgtgatttactgcaaattatttttagcttcagtaaagctgggtatcctcagtatgtctcagaaattttggaaaaagttacatgtgaaagaagatatattccaggtagttttaaaaaaatctatttacatgatttttataaaaatctgaattgctattcttacatgatggaaaggacattttctaacaatgggcattgtgggagttgaacatagaactcttaaagtcagttaaataagcccaaaaacatgagttaatgaacacatggggatgatttgatttgcaggtgttttattgttatttaggcagttatatgcttttgatgtttgcaattcttattttgtcttcagtattggaacattggttgcagtgtaaaaatattgttcagtttattaacaaaagatgtctttgttttcttcccagatgcaatgaacctcattttacttttagtcactgaaaaattggaagatgtagcgttgcaaattttactagcatgccccgtatcaaaggaagatggcccaagtgtctttggcagtttctttttacaacactgtgtgactatgaatacggtattctgtccacttttactttgtagacaatgtaattggcagtgaaataagattctttaaagtataggaacatttataagattagaccagttgtaaacatcataacaatgttcttgtgttgcaagatttttgggtagaaagaggatgcggggtttaaaatgctcatctcagaagtggtagaatatttgcagcaggtcaaacggtggggtgtttgccaatccagctaatgtggtgacttttttcccacagcctgtggagaagctaacagactactgtaagaagttaaaggaagtccagatgcactcctttcctctgcagttcaccctccattgtgctttactcgccaataaaactggtactacattcttaaagttaaagccaagtaaggaagttttgctgaggtagctttgtgatcttttatgatatctctttcagatttggcaaaagccttaatgaaggctgtgaaggaggaaggttt

SEQ ID NO: 11855 - DNA, 32124 bp, Homo sapiens
ttctaaagtatattagtataccttcctaccttgatttattgaacaagatgactcactgttttgaatattctcattgtccagtcttctgtaaacttacatgtcgaaccctagactcaccttgtaaattaaatcagaatgaaattattaatgaagttttatttcttgttttttcctttctcctagaacagtggtctcaacgtggctgcacatacaagtcaccagagaggcttttaaaagatgatatctgtgtcccatccctagggattctgatttaattggtctgattattcttacgcgctagggctgagaaaccactgttctgtaggatgtaggggaggaaatttcttgggcttttgttgttgctcccgtaaattaggataatactaaaaaaaatacttgaggtaggagttactagactatagagggaatattgtacatacattttctgtcaaatttaaacatttaacacctgcattttttatttcagatttattgctaaacatgggtgcatttttggataaacccaaaactgaaaaacataatgctcatggtgctgggaatggtttacgttatggcctgagcagcatgcaaggatggagagtggaaatggaagatgcacacacagctgttgtaggtattcctcacggcttggaagactggtcattttttgcagtttatgatggtcatgctggatcccgagtggcaaattactgctcaacacatttattagaacacatcactactaacgaagactttagggcagctggaaaatcaggatctgctcttgagctttcagtggaaaatgttaagaatggtatcagaactggatttttgaaaattgatgaatacatgcgtaacttttcagacctcagaaacgggatggacaggagtggttcaactgcagtgggagttatgatttcacctaagcatatctactttatcaactgtggtgattcacgtgctgttctgtataggaatggacaagtctgcttttctacccaggatcacaaaccttgcaatccaagggaaaaggagcgaatccaaaatgcaggaggcagcgtgatgatacaacgtgttaatggttcattagcagtatctcgtgctctgggggactatgattacaagtgtgttgatggcaagggcccaacagaacaacttgtttctccagagcctgaggtttatgaaattttaagagcagaagaggatgaatttatcatcttggcttgtgatgggatctgggatgttatgagtaatgaggagctctgtgaatatgttaaatctaggcttgaggtatctgatgacctggaaaatgtgtgcaattgggtagtggacacttgtttacacaaggtatgtaaacttttttgtcattaaaataacatgttaattttgaaaagttacggtaggtaaagttaagctaacttaaaattttaaaacttttaatattttcacagaagctgtatattttgaagtactttaccagaaatgaaaccattgttttctttgccatccttgtttgtcccagccttctaatttgaaaattaagcttgataaatttgaggcatttgttgtcatttaagtacttcatagcttgttgctgtagcaaaagcatttacacagagtgactttttcttgacattggcagtaaccatcttatgcctgattatgaagcagcttgataaaatatgtatatagtagaattctgtactagatattactaaaagatcaagagccatgtgaaatattggaagatgtactagatgcctagcctgtataaaatttagtcctgagcctcctagcagtgaagacaaaaactgaaataaaaatatgggttgtatatttctcattgtcttctaaaagcagctcttatctggcaatacaatctaaaaaggatttacatgtggctctctaagtaatacatgacttggatagtatcttttgtagaagataaaattcttttcatatagatgtttttattatttctgattaaaaaccaaaggcttctataaaacataatcttgtgaaaaattcctgtggaacactaaagtttatttagatttgtaattttgtatgaatcattgcttgatacagtaatagaaaaaaagtccagagtaatagataattggcaatcctttgaatatctttaaaatactcagttgtttcaagtgggtttttgacagcatctatatataattcaattaaaatttgagttatctggccagtgtctggagtgtgtaagtatttgactgaaaagataccaaggtaaaactgacctttagttacatgaaataaataaagggtttgacttatttattctgtctagattagaaccactgtatctccctactccaaaatgtactgtggaaggtatgggcataaccagaaagtttttcagaaaggatctctgggtctctggaaatgcccagattttggttaaataccgatttctttttaatagaatggaaagaggcagttttaaaaacagaagatttaaaggccgttcttgtcagtggacagcctttttctgaaaggattttaatgatggtacctctagctcctctgatttttatttttaacacactgtatctttttacttctggatgagttaagtaaagaagtattgatggttgtcagtgatcaaatagtaagtgggtctaaaattatgtatttgtctttgaactctaaatgaagcaattctgacctgtagatttttgagacaagcataggcatatgtttgttgcctgactagctaatgaaaacagcattttccccaattataaaaaaaaggtatatacttactattggaaaaaaaatccagatgatgaagaaaatatagagaaacacccaaaattttgccatccaccctaagtcagctactttcattgttgtggtgtatattgttccagtcttttctgcctgcctgtgagtgtgtgtatttttataaaaccgagatgattatacttgttattctacagcctgccttttccaacaatatattgtagagagatctccatgcctataagtattgatctgtatcatttttcttggctgcgtagtattttattgaaagaatgaggttgtgagggaatagccaaaaaatctattaggtctgtaatttggactaaggaaagaagtttgtgttagtagattaactcacttatccattgaaaggatgctagtttttgagaattttgactcgacccttctgaatgaggtttaaatatttctggtggtatatcttcacttgctagcttttatcaatttagagtgattaaatgttcatgttgatggtgttaaaagattctagatggcatcctagaatctcagaaatgaggaatgataataacagacaagaagttggggcccatgattcattcaatgttaatggaagctgaccatcatagttccttctaatggagctgcattcaaattgaaatcagtttggaggtttgaattgaaacaaaacagacttaaaattatttttgaacctttgaaagttacttatggaaaccttcatttctgtttaacttcgtaattttgtctttccatttatttgtattgtaaaagcaagggttagcaataagatcaaatataattactttgaatttactcagaaaaattgtaagttaaaaattcatggaaagcacttagcgattgcacagtagttacctgctgtaagaggagaggaaacattaataagtagatgtttccctgataagagatttaaatgaagtcctagttttttctaacacctccatcacttgtcatactttcataatttataagcacttttatcttaactcattaaatcttgggaggttatcataatcataatcgtggtagtattagtaaattattgctttctgtaagccaaacactattctaaatactttacatattttaactcatgtaattttcacaaccatatgaggtagttaagatgacgaggtcaggagatcgagaccatcctggctaacgcagtgaaaccccgtctctattaaaaaatagaaaaaatcggccgggcgttgtggtgggcgcttgtagtcccagctactcaggaggctgaggcaggagaatgacttgaacccgggaggcagagcttgcagtgagccgagatcacgccactgcactccagtctgggtgacagagcgagactccgtctcaaaaaaaaaaaaaaaaaaaaaaaaaagataagcatttttcagggttgccagttaatattaatctgtaagtgttgtatgactgtggtcaggtattatcctatttaaattaggtatttaactcgaggggagaatgggagctaagaaagcaaccctcccattttatttgcaatgctggcatttatggtgtttactgccaactaatttcgggttgcttaaaatatgtaactgccacgtgcatagcttttcataacttgtaaatgatacatacttattaatcctcatagtaactttctgaggtgaacaaaataaaaagtttttttaatttgcaagtaaggaaatggaggttgtttgatattaaaagatatccataagtcatatacttggtgagtattgaggctgagactagttttctgactcaagtttagtatttttgttaacaatatttcccagaagggcctgataaaataaagaagagtgggtgtgggtgtgggtgtgggtgtgtgtgtgtgtgtgtgtgtgtgtaagtgtctgtctgtttcggttttcatggtctgagaaatttttccccaagggaaacattaagactaaattttttttgtaacaaatacagagatgtttgaagtaaagtgattccccttgatgtttctgctttccagtctcatctcacttagggaaccactgctcatggtttgctgtatatctttccaaatggttctctgtgattattgatagaaatgtataaacgtaaaataggattttttctttttttgtattttatagaaaaagatcatgctatgtttgttactttgtcacctgttttgtttttcttaaattataaaagtcggtattcttttaaattgttcttttaaaacattatttgattttccaaaatttcatttatataccatctaccagaagcctatttattttaaaacatgagatagtacctcatagttggataaaattgagggaaattatcattttccaaaggcaacatcattctatattaatttatataacatagaaaatgtaaccccctcaataattgtttagttctaaactcaggagaattgcttgaacctgggatgcagaggttgcagtgagctgagatcgcgccattgcactccagcctgggcgacagagtgagactccgtgtcaaaaaaacaaaaacaaacaaaaaactgtatcagattgttttctgtttaagtttagatgcccttatttatggcaggggcactggcgtctttgatctggtactatgattattaagagtgttaactgctgtgctgttgtaaaaagtaaaaagaacatgtaataatcaatttttatatgcagagctaatttctttagttatccaaactggatttagaaaaaaaaatgttttatttatggacttagtgaaaactttatactgattatacaaggatgttttgtctctaaaaaacaatggcacaaaggaaaggaccttttctgttgctgtataacagctactgaaacatattcatacttggtgtttaggggaaagccatctttacatagaaatagaagcaagccaggcaaggtggctaagaagcaacatcactgaaatcacacatgcctgagatgtaaatataaattatttcccttaaatgtctttggagaaccataaatttattggaactctctttcaattaattttccaaaagtatttatattttataacttacaaaaatcgaatggaaattagataaggaaatgttccacaatgctcatgttgttgttaccaaaaactcaaaagggttaaaagaaattagatttctaaaagtgtaaggtgttaattccgtttatgcataaaattgctttataaagtgtaattatgcttgattctttttttgttgttgtgttttagaaagggtgtctcactgtgttgcccgggctagtctcaaactcctggccttaaatgatcctcctgcctcagcctcccaaactgcggggattacaggcagccaccatgcccagctgtttgattcttgaatatccatggtgtactttaaaattatttttaattaaaaatttttgcttgaactgcccttatgacatttatacaagtatattcatataaccaaacacatacagtatttctaatataaaagttttggtgggtttcattaaggaatgaattaatttggccaatttggaaatggtttttccagataaccgggaatctaatgaaatactcaagttggttccttgttccaaagcacaacaatctgtgacaagttaatttattttgaagtcttctgaagacccaaccttcactgccttcaaactttactcccattgaattaggaggtgaaggcagaagttattcaaggccacctgtcttttgggctgtgtcatgtaggttctgaaaggcataagtctgaaccgagccatgcctgcctagattctagtcataataactgaaaagactagaaagggtgtggtcttggtttctttcacttgagttggcaaatttggcaaacactatcagacaaaatagcctaccacctccactgactttgttttttagagtgaacagaaaaagaaagtttgaaaaaaatcgttattccaagaacagtttcatctgctcctgctcttagaaactcagttaaagtaatatacctttagaaaaagtaatgagaacgtatttttaattgattgcacataatctcatggtactagagtagtatatatgatatgctttttttttttttgagagagagtcttgctctgttgcccaggctagagtgcagtggtgtcatcacggctcactgcaatctccacttcccaggcttaagcgatccttccaccttagcctcccgagtagctgggacctgggactacaggtgtgtgccactaagcccagttaatttttgtgttttttgaagagacaaggttttgccatgatgcccaggctggtctggaactcttgggctaaaatagtctgctcaccgaggcctcccgaagtgctgggattatagccatgagtcacagtgcctggctttatgctttttttttttttttttttggagacagtctcactctgttgcccaggctggagtacagtggtgcaatctcagctcactgcaacctccacctcccgggttcaagtgattctcctgcctcagcctcctgagtagctggtattacaggtgcgcgccaccacgcctggataatttttgtatatttgtgtagagatggggtttcaccatgttagtcaggctggtcttgaacccctcaccttgtgatctgccctcctcagcctcccaaagtgctgggattacaggcgtgagccaccgtgcccagtgtatgcttcctttttaacataggtaatttgtgatggtgtggttaaaagggagaaataaaatatgtccttaaattagctattttagccactttataaagattctgaaactacttgcgactatatagcaatctgatgtcttttcttttaaaagttatcacatgactacagttggatctcagttgtccagttacagtcccccctgttactgtgccctctgaatagtttcttgtattaatagttgtggggctgggcgcggtggctcatgcctataatcccagcactttgggaggctgaggtgggtggatcacctgaggtcagaagttcaagaccagcctggtcaacatggtgaaaccccatctctactaaatataaaaaaattagccgggcctggtggccgtcacctgtaatgccagctactcaggaggctgaggcaggagaattgcttgaacctgggaggcggaggttgcagtgagccaagattgcgccattgtgctccagcctgggcaacaagagcgaaactttgtctcaaatagtaataataataattgtttagtttagtattttgggtattctgccgaataacaattttcagctatgttaaattcatggagtcgtagcattgctctgaggcagtttaaaagctaagctggaaaacatttgcatatgtgtttgggaggatccattgtggacttaagccagtttgggaatagacaatcttgagtgggaaatagtttagaagatttaatatgtattgaagatatcttcatttctcagactggaatggctgtgggtaataatagttcaccagaattaaaaatacagaaatgcttacagatatacccatacctagacaccttgtttcttcaagttgtgtttttagtaattcattggaataaaaatgaatgtgttaaacataaacgttctggatgattaaataaactataattgcttaaagtattttgaagtaaataatagttgattgtagaaatacaattttttttcttttttttctttaatacacagggaagtcgagataacatgagtattgtactagtttgcttttcaaatgctcccaaggtctcagatgaagcggtgaaaaaagattcagagttggataagcacttggaatcacgggttgaaggtaagacaaatgctttttaaaaatatagacaggccaggcacggtagctcatgcctgtaatcctagcacttttgtcgcctgggcgacacaccaaggctctgtctcaaaaaaaaaaaaatttagagagggaaagtattctttttgtttatcaaatgattattttaaaatttcctggtcaggcgcagtggctcacacctgtaatcccagcactttggcaggctgaggcgggcagatcatgaggtcagatcgacaccatcctggctacacggtgaaaccccgtctctgctaaaaatacagaaaattagccgggcatggtggcacacacctgtagtcccagctactcgggaggctgaggcaggagcattgcttgaatctgggaggtggaggttgcagtgagccgagattgcaccactgcactccagcctgggcaacagagtgagactccgtctccaaaaaaaaaaaaaaaaaattccataggacaaacaagtatttcaaaacaagtccttgaaaaaacacatctatctgtctaaaatttactgtcttggaccaatttctggggattgattgacagggagaagacaaatatgtctgtttcaccaccaaagagaaacataatttgaaggtagttcgttagagcttgctggtttattttttctttctttttctttccctgcgtacattcctagtagtaagtggagaatccagtgaaatttcccctaacagtgtcatgaaaacaagtactcttaattccgctaatactaattctcccttttcgggttaattatcattggaattcattacggtatcctttcccttttattgatagagttaacattagtgtttcaaaagattattttacatatttttttaaacttcatttggcaataaatttttttttttttttttttgagatagggtcttgctctgttgcctaggctggagtacagtggcatgatctcggctcactacagcctcaactccctgggctcaagtgatcctctcacctcagcctctcccaagtagctggaactacaggcacgtgccaccacagctggctagttttctttattttttgtaaagatgaggtctcactgtgttgcccagggtggtctcaaactcctggactcaagcagtcctcccacattggcctaccaaagtgctgggattacaggcatgagccagcacagccagcctaataattttaaacatacagaaaagttgcagaagtattacaggatctcccatgtacatgtagtgtcctttacctagattccttatttgtttatgtaataccacgtttggcttatctctatatatactttctgtaacattctcattttctgtctccctccttccttccttccctctccacctctctctcctcttattcccctgccccccatattactaacctttttcctgagccaaatcaattgaaagttgcaaatatgatatatcagtactacttaataaaacgaagattacatgacactacataactgtagtatatccataaaaattaggaaattgacccagcacggtggctcacacctataatcccagcactttgggaggctgaggtgcacggctcacgaggtcaagagttggagaccagcctggccaacatggtgaaatcccatctgtactaaaaatacaaaaattagtcgggcgtggtggcaggtgcctgtaatcccagctactccggaggctgaggcgggagaactgcttgaacctggaaggtggagattgcagtgagccgagatcatgccactgtactctagcctggatgacagagcaagactccatctcgggaaaaaaaaattaagaaattaacgttgatacaatattactttgtaatccacagatcccatttaaatttccctaattatcccagtaatgtcatatgtaggtccaggatgcagtctagagcatgtgtgctgcatttagctgtcatgcctctttagtctccctcaatggaaaaagttccatagtcttttttatttctgttgaccttgacatttttcaagagtacaggtttgtggaatgtgcagcttgggttggctgatgtttcctcttgataagatttaggttatacattggcaggaatactgtggaagtgattctagattcttctcagtgcatcacaatcagggaggcatgtgatgttgatttataatgttaacatcttttgtgacttgcttgggttgttgtctttcaggttacttaattaataattatgttatacctaataagtatttaataaatatgttatacttattcataagtattctatggggaggcactttgagattgttaataacctattgctcattaagattttagcagatagttttagcatccatttgcgatttttgcctgaagaatgatagccaactggtgattttctgattctgtcttttttttttttttttttttttttatgatggagtttcgctgttgttgcccaggctggagtgcaatggcatgatcttggcttaccgcagtctctgcctccggggttcaagtgattctcctgcctcacccttctgagtagctgggattacaggcatgtgccaccacacccggccaattttgtatgtttagtagagagggggtttctccatgttggtcaggctgatctcgaactttctgacctcaggtgatccgcccgccttggcctcccaaagtgctgggattacaggcgtgaatcaccgcgcctggtttagtcattctttttatatgtattagcattttactgcaaggaaaaatgttcttttctgcctgtttgtttatatgagcacagactcacggattcctgttctattcattgtattatcaactgtttcaggcaatgagagcctcttaaaacttgttgtagcgtctttttgtcctgcctgcagctatacagtactacaggatttattatagttttctcccttttcatatttataactctcttctacagaaagaaacctgtcctctactgtcaacccaacaaatctgtcacggctaactctcatgcatatgccttcctcactccaaattgcccatcccagttcaccctatagccatcctaaagctatgcttactgtggttaggcatgaatatcccattctggatcaatttgtggccactatttccccctccactccctgaaagatttgttttgcttagctaagcaaatccaatcgtgttggacaaaattattcaggaacatgagaagggagaagctagtctgtttatctttaacataattgctgatatgtttgagtttaaatctgccgtctttcgtgtttcatctatttttttttatcctccattcttgccttcttttagatgtattccagttcatcctaggatttgcttattagttacacattctttaaaaaattccgtttagtaggccagtcatggtggctcacgcctgtaatcccagcactttgggagaccgaggcgggcagatcacgaggtctggagattgagaccatcctggctaacacggtgaaaacctgtaactactaaaaatacaaaaagaaattagctgggcgtggtggtgggcgcctgtagtcccagctactcaggaggctgaggcaggagaatggtgtgaacctgggaggtggagcttgcagtgagccaagatcctgccactgcactccaggctgggcgacagagcaagactccgtttccaaaaaaaaaaaaaaaaaaaattccatttagtaaaaaggaaaaaatttagtggttaccctgagaaaatgaaaatttttcagtcttaaggccctttttttttttttttttcttttccactttcaaccctgagaagctaagtatcataatcttaatataaccttttggttttatatatgctgtttttaagatatgaaattactttttataaagttagattgtcaatcttttttcttttctttgtgggaggactttgatatcataccaagctcttccactcaaggttacatagttacctgtattttctcctaacacttttatgttttgattcttttttttttttttggagaaaatacatttgaatgatataacttacgatgatggtataatagttcgttgaatttggccattttgtatatagtataatagctttgttgaatttggtcattttgtatatagtaggccacagtaattggtgagagttttgaagtgtgaagatgtgtgatttctaatatgtaattacaattaaaagtataaaaccaagaagagagtcttttgcaaatttggagaatggggatttatcttttctgtctctacaactatctagctatgcaccctaaacaatgtgcttaaagttttttttgcacctacaatttcctcagccctaaattaatcttgtttttaggtctcaatgcttttgagtttcaatgagtcctgctttgagggtgatgaaaacgtgagaaacatgtaagaacacattgaagattatgtcagatgcggtcatattcctattgataatatcattaagaggagctgtttttataggagttaatatttaatgataaattgtagtatattggggttgcagattgctgactatagtttatcagaaggtgggaggaattctcttagtttccttcttcctcattcataaagaaactgggtagtttttattttaggaagagctctctagtttggtcagctggctgttatgtgaacttatccaacttgcttaacccctcaaggcaccagtttctttattggaaactaaagataaaaacaccaaccatagagttttttgttttttgagacagagtctcgcactgtcacccaggctggaatgcagtggcgcgatctcggctcactgcaagcttagctgcccgggttcacaccattcttctgcctcagcctccgaagtagctgggactacagatgcccgccaccatgcctggctaattttttgtatttttagtagagatggggtttcactgtattagctcaatctcgtgacctcgtgatctgcccgcctcggcctcccaaagtgctgggattacaggcgtgagccactgcgcccgaccccatagagtttttttttttcttaaataaattgttacaaaaaaagcttattgatgacacttgttaaagatggtaaggcagatattttttcgggggtggggggggcatggcagtagatatagggaccactatgatagaatcttgcagtggcagaaagaaattaaactcaacttggggtcccataaagataagtggaatttataactaaggagctgagtgcttgaagggagtgtcagtggatggaaaattattactaagaggaagcatcaacataaggggtttctggctaaactgacttgatagcatggcaggccaggctaaaatatccagagtggtcctatatcaagtgtgtgggggttttcagtaaactgactgagcaggattctcattcagcctggtttctacaaggacagagagggagcctaaagttctcctagtcagaaagaactcaagagtcttgctgaaggtttggtccaagcaaagagtttttgtcaaaataaatgagaattatgtttgttaagcacctattatggtgcctagcacgtaagtcctcagcaaactgtaactttatatgaactcttaacttctgtaatagccacattttaatttcttaaaggtgtggtcaattcagtttaacatgagttaataatttaatattaattttcttctgcatagttagtaactttctaaagtatatattatataggagagataacaaatatgtaatatgatctctagggcctgtagcaaatagttattattaatcaggagacaaaattgttagctaggcagccactacaaatcaatttaagttggtacttaaaatgtaacttcacagtagcttacacctataattcttgggatgccgaggcagaaggattgcttgagactaggagttcaagaccagcctcggcatcatagagctacaaaaaagttttaaagattagctgagcatggtggtgcacacctgtagttccagctacttgaagactgaagcaggaggatcacttgagtccaggagtttggtgttacagtgagctatgatggcaccactgcactccagcctgggccacagagtaagaacatgtctttaagaaaaaaaaaaaagtaactttttatttgtaaagcagtgttcttcaggagcattatgtttcttctggggttttaaatcatgtaatatgacattaaattttgtggtaaatacattctggtgtacttggtaaatctgtgtgtatgcttttaatgatgactggtcaggtgggaaaggaataatattaaaataaacagggaatagtagttcacctgaattgatgaattatatatttaatgattgctttctacatacaggtttactcagtgtttattgaacatgtgtcactgaggatatagcagaaaaagaaatctcatagaatttgtattctagtaaaaacctatttttttttaatagagaaataaaatagagtaagtagagagcaacaaggaatattggttagaaatgtctctgtgaggaaggatgtttgagcagccgtgcttggagagagaatatctgagggaagaacattccaggcaatgacaacagcaaagactaggagggaatgttcttagtgagtgcagctgggttagaataagccagtagaaaactagaggaaaattaagaggtttgtaggaggcatatcatgtgaggactttggactttgacttgtgggaattcattggaagattttgagtacaagagtgatttgttcttttttccaaaggatctctcttagttgctgtatggagaagagattgtataaaagggacaagagaagccaaaataccgattagaaattatgcattaatgcatggtagtggtaaattggactagagtagaggggtgtaaaaatgtctggtgacatttttggtgtcatagctgagggggtgccactggcatctagtgaatggaggccagggatgctgcttaatattccacagcacacaggacagcccccacaacaaaaaaattgtctggtgtaaaatgtcggtgttgttgatgttgagaagccttatactataagacacagatttaaggtagaaaacttacagtcctgctttcatgaagcttgcagtctatgacccaataaacatcgtgtatgtgggagtatatagcattatggtatacagtacatgtcatgcatatgggagtgtattgcagtgtacctactcagacttaggtcagagaaggatttgagaatgtgacatataaaattgaaacctcaaggatgaaaataggcattcatagctgggcgtggtggctcaggcctctaatcccagcattttgagaggctgaggtgggtggatcacgaggtcaggaattcaagaccagcctggccaacatggtgaaaccccatctctactaaaatacaaaaattagctgggtgtggtggcacatgcctgtaatcccagctacttgggaggctgaggcaggagaatcgcttgaaccagggagtcagaggttgcagtgagctgagatagtgccactgcactccagtgtctcaaaaaaaaaaaaagggacattcaccatacagaggggttggattagagtgaaaagtgttcccaaaccaacgaaaagagtatgtgaagatctagaagtagaagtctttgaatggatcctttggagatgagggaggcgggcagagttgaaagagtagtggaagtcaacgtaagggtcttgtgaggcatggtaaacagttgttttgaaagtaaggcctgggctgggtgtggtggctcatgcctgtaatcccagcactttgggaggccgaggtgggtggatcacctgaggttgggagtttgagatcagcctgaccaacatggagaaaccccatctctactaaaaatacaaaattagccaggcatggtagcacatgcctgtaatcccagctactcgggaggctgaggcaggagaattgcttgaacccaggaggcagaggttgcagtgagccaagatcacgccattgcactccagcctgggcaacaagagtgaaactccgtctcaaaaaaaaaaaaaaagctgtagaatgtaactatttcaggtaagtatcaacttgtaaaaatgatttttaatttctcccctttttcttataattcttatctagctaaacttttattatcctttagtaatggcattcataacttttatattgtttttacttaatattagatcagaagtatttttccatatagctgttactgtattcatcaagacacctatttcgtaatttttagtgattataaaccatttcactcaatggctacaccaaagtttttaactgtcctcttgttggtgaacatttagtttgttccagtttttgctttttatgaataatgctggaatgaacatacatatgcaaataactgttttttcttttttccccctgcatagcaatgtttcagtcaataagtagctttttgtattacttcttaaaaattttttgtgtgttgatggtaattttttttaatatattttaaaataggtactaccaaatagtatctcttgtttcacttcttggtgagtactggcttatcacattaatttaggaactttttttaaaaaacctacagagattatggagaagtctggcgaggaaggaatgcctgatcttgcccatgtcatgcgcatcttgtctgcagaaaatatcccaaatttgcctcctgggggaggtcttgctggcaagtaagtagaacaaaaagctaattttgagttcgttcataattagtaattaaataatttggggtaaaaaaacttaaatcagaagtacatcaattatctagaggtgaaatgggttagtgtttcttatactagagaagaactcttaaaacttcaaccaaaaacgattttttaaaaggaattatctatcatactctttgagtatgaaggtccttctttccttgctaaggagtacaaatggattgtgcaaaatcagattctgagagtaaagtgtagaaggtatgttcttgacaagtatagagtgtaccagttacttttttagtgtggtcaggatgaaatattgagatattcacaagcttaaaattctgtgtaatttaataaaactaaagcatgttttttttttttaggcgtaatgttattgaagctgtttatagtagactgaatccacatagagaaagtgatggggtaagttttattttatttcataagcatttgaagtaatttcacaatataaatactaaatatgaatacattcacattaacgaagtctataataaattatagtctgtagtaaattactactgcttttcattttaaagtgtcagttaaagtttaagaaaatgtattgaaatgaaggtagagataaaattttgttttgtagatagttttgttgtcactttctgggcatcaaatgaccttttttgtttgggctgtctttatttcttctctatatgtctgcttttccttcttctcctttaaaccttaattttgaggcaagaatgctcttttaaatatctcaatttctcctccagcaggctgctgccatcaccagaagttagtgatagtgagtgagttgttattttaataactagacctttcagtacccctgtatgcccacttggaatacccgaggatagtttttttctaatattattgttgtattatgggtacatgagtgttgagctgagataaccatttctgttgtaccttgctgtacttcatcagagcaagactctatgcccttaccttttattttgcttttcttcgaaatgtcagtgagctgccagctgcccctctatattgttttgttttgttttagtactattaccaggagacagaagtgtcctttttttttttttaaatccaagttagttcaaataagtatttttctcttgggttttcaagtttttatgtctaaaaataaattatttaatttttaatatatatgcttcaaagctttaagggaaccaaacagaaatgaaactgattgggaggaagagtccacctccagtctccagctcctcttggcagattgagagagagagtatccattggctagaaatcatatgtcatctcaattgcattatttgctaggattcattgttgcacagcaatataatatgatttcttttccttaacagtaaaagttatcctggcaaaaaggaaaatttaataattaatataattttagtgagtcatataaaagtgatgctatatattgctaattataatttatatcttggtctagagcagtgattctgagtctttttttgtggcaggttcctcagagtattaagaattgtacccaaggccgggcacggtggctcatgcctgtaatcccagcagtttgggaggccgaggcgggcggatcacctgaggttgggagttcgagaccagcctgaccaacatggagaaaccccgtctctactaaacatacgatattaactgggcatggtggcgcatgtctgtaatcccagctactcgggaggctgaggcaggagaatcgcttgaacccgggaggcggaggttgtggtgagccgagatcatgccattgcactccaccctgggcaacaagagcgaaactccgtctcaaaaaaaaaaaaaaattgacccaaagctgagaaaattaatttaaaaatccaaatattttatgtgatccatcagagaaccctcaaagaaatgagtataggatgttgacatatgactaaaaggatggtggtaatttggaaggttgagagaagagaatcttaactcttcagctagattatagattcttcagggcatccactaccttgattagaggaaataagccctcagaagacagttattgattcattattagccatagaagtactcccatttcctcaggtgtttcaaagtgtcaaccctcatgtgtaatctttaaaaatacatatatatatatatatataccttgctggattttggggtccttcatagtctatttttactccaaacaaggttttctgtttaacatataccaaggataacttttaaattttttaaaaagaaaaaatgattacacatagtagctacataaacagggaataaataggcaacggaactatgaaactggggggaaatgctcaatatataaaccttaccttaaatagattattatttggctatagaaatgggatatatgtacttaattacctttatacataaatgttctatcaacatcagcagatcaaacactgacagtgtgttgtatagtggattcacagagggagaagactagaaaacgtaagacgtgaccccacctgtgtgtctagtgcagcttacactgtagttataaacacaccttaaatgatcaaaatatttcgtatagcttggtaacaaataaatgacaaaatccagaatgtgaccattgccatgtgacttggacagtgattgctgtaaaagttcagctgcttaagcagggggaaagtcagcttcttagagaaaagatagtatttgaagaatgatttgaatggtagaaatgacatgaggatgatgacctttcaagtggactagagaggcaaggacaaagtataagatatcttcaaaagaaaggacatcttttttggctaaagcagagaactgttgtggtgaaaaataagaatttaggttgcagaggtacttgctaagagaccagccttttgaacatcattttagggtaatggaccaccttatgtttagagcataagaatgatagattcaaaaaaatatctgtggtattttaatctgttagaaacatttaccatattagattaaagagatgcaggcagtcaggtagttgtgaaataattacagagaccaaatggtaactgtagacttattatcattacatagatatgtggattaaaggaactttccttgtttactgtgaaaactgactttacagcctagaattttaaatggggaaatattatatgcctttcacaataatcactaacttagaaaaatgttgaactataattgcaagtagcagaaatgtgctgaaaaataccgcagaaggagagagaatgaagaaaatacagacgtgattaaattctgagctcttaacttgacccactgtagcaaaaagctagccgcaaaggtgctccataaatgcttcttaacagtgtggatgatgtcgccgggagctggatgttaacttgcggggtgggaaagatgaaagtatgctagaattacagaagaggagaaagttggaaggtattataaaaattaagtttttttaaataacaaaaattatttttgtttagatatttaaacaaagaattctagccagagttaaatcagagggtttctttagactcctgaatgtctgctttatgtcggagagaattgttctgttgtaaatgattataagtagtaccactagaaatagggattcattcatttttcttataattaagacatcttttaaataaatatttttcagaaagtagagttgagtataagtcataaattaagtaattttaatatatattcagaaaggttactatttaggggaaacttcttaagttctttactaaatttgttttttagtatgtgttccatactaaactaactttttagaatgtgttccatcttcttaccacaaacaatattgatattttcccaacttttaaaatacaaatttgtaacaaagggtttagccagggattcttagtctagggattcacgaatccccagaaatcttttggaaaatttccagaaaaagcaaaactacattttgctgtaagttgtctttatattagacagggctctgggatcatactccttccctttttctaaaatgctagtttgtgttttataattagaatataaattctgtgagatctgggacttgatctgattcatttgtgtctatagtccaagcacaatcctggcatacggtgaaagctcagtaaatattttttgaataggaaatatttgtatttattcatttctagtaattttcttaaggctgtccttaagtcatatatttaaaaattaatttgaggttactaattggtatgaaagtctgtatttatagagttttatactttcatgcaaaaagttcttcccttgaaaaagactcataatgcttttgaattagtatgccactgatcaagtagttgcacaagttggtaattttccaagggtaaagttgagcaggggggtgacctgtatttacccagctcctacttgtgccaggccccttatttatacacacacagagtcataggtaatcttctcagcacccttcttttacacatgagacttacagagatgaggtagtttgcacaggtcacaaagctaaataaatcatgcagccagaatttgaattagtctgactcctattctctttacattattccatgtggcctctttaaggtagagattatgtatgtctgtaccccacctgtgtctaccatgcaggaaaaatcatttcccattcttttgtaaatatcatgtttatcagtcttaagatactctattttattgattgagacagggtctcattctttgtcccaggctggagtgctatggcaccatcatggctctctgtagcctcaacctcccaggctcaagcgatcctcccagctcagcctcctgagtagctgggattacaggcacacagcaccacactcggctaattttttgtattttttgtagggatagggtctcgcttcattgccagggctagtcttgaactcctgggctcaagttatcttcctacctcagcctcccaaagttctgggattacagacgtgagccactgcatccaaccacaagataatctgtttttaatggtaaatattttataaagttgttgaaaggaatgagttaagcccaattccttgtcagttatttttcacttaaatacacatatttatcttaatccaaaaacggtttaaggcattttgatcttagagaagggaaggaaaaacaggatagattagtctctttttgagcccaaaagaatctctgtattgttttcagattattaaattttgcatgcatttttctgttttactttaaacggataaatgcaatacccatagctgcttttacatttttatatcacagtttttagaactatgtgaatattagttttttcatatttactttttattcacttgtcaaagcattgctatggagaagacctatactgtttgaaaatgcaggccgggcgcggtggctcatgcctgtaatgccagcactttgggagggcgaggcaggaggatcacgaggtcaggagatcaagaccatcctggctaacatggtgaaaccccgtctctactaaaaatacaaaaaaaacaaaattagccaggcgtggtggtgggcgcctgtagtctcagctactcgggaggttggggcaggagaatggtgtgaacctgggaggtggagcttgcggtgagccaagattgcaccactgcactccagcctgggcaacagagtgggactctgtctaaaaaaaaaaaaaaaaaaaaaaaaaaaaaagagagagagagagaaaatgcactaacattagtcactatgtttttaaggtatgattgacataacacttacctttgctatgtggtcttgaccattcaaatgacactgtctaaaattattcattaaatttgacatgattcttcaagtaacatgtaatttattagagtcttcattagtcatcaattgtatcacattttgtcatactggagaatttttagtttaaaaatttttttgtctgacaagcagcacgtaggacttcataagaaacatttttactagtgtttactttttctctactgttataagtagtcattttaagaattttggttatgggccgggcacagtggctcacgcctgtaatcccaacactttgggaggccgaggtgggcggatcacaaggtcaggagattgagaccatcctggctaacatggtgataccctgcctctactaaaaatacaaaaaattagccgggcgtggtggcgggcgcctgtagtcccagctactcgggaggctgaggcaggagaatggcgtgaacccgggaggcagagctttcagtgagctgaaatcgtgccactgcactccagcctgggtgacagagcaagactccgtctccaaaaaaaaaaaaaaaaaaaagaattttggttatgagagctgtgtttcaaaagataaatattgctgcaaataaatattagctggttaaattttattttttaaaatgtgcttagttcccttccccctcctattactactctctgcttgatttatctaatttctatgtcttatttggtgtaagttagtattttcatcatgagagattcgacttttaagctatgttagtctagctgatagtaaaagcttaaaaactagggtggatgggagatgtcctgaattctcatctcagtaattgccttcaatttactttacagaataattgtaaacatcccagctgatatgatagtttaatcaacataactagtgttctatagttttattaattttactatattaaggaaatataaacttcaatatgaaataacctgtggtgttctataataatttcaccaatatttctttagtaagagtcttacctgtatgaggtacttcctatgcaaaaaaggtcactcgccataatgtattcaacagagcgcaaagatagacattgatgttaattatacctgtgcacaaatcagagccctgccatttactaagattgtcaccgtgacaaataacttaaatctctctgagctttagtttcatcacttataaaaatgataactggaatccttactttgtagggtacctgtgaggattcagtaagattatgtatataaagttcttagcacaaatattatttttccttccttagatggtaggaggacatagaatggaatatgaaattgtctttactctaaaagagtttgcagtctaagtggagagtcttgtgaaccgttgcaaggtagagttaattgctataatagatgtgtaaaaataggtgtgctatatcaactgtacgagttcagataaagaaagtgcaggaacctagataataggtttctcttctaatattaatgaaagcccatgagagagttacataacagtgtttggaaaaatcaaatataatggctgcggaagaggtttcagtcctctattgtctatccagagtgatgagaaaatgtaatttgccataagataaaatgacttttaagtgtggtcattagctaaagttcttctcaatttagtgattctgtaatgtcagccattgcaaatccgtgtctacttgatttattggtttggttttcttttgctttttatttttttatttttcattttttgagacggagtctcaccctgtcaccgaggctgtaatgcagtggtgcaatctcggctcactgtaacctctgccttccaggttcaagcgattctcctgcctcaccctcccaagtagctgggactacaggcatgcaccaccacgcctggctaatttttctatttttagttgagatgggtttcaccatgttgatcaggctagtctcaaactcctgaactaaagtgatccacctacctcggcctccaaaagtactgggattacaggcatgagccaccgtgcctggctatggtttggttttagtatgtctttttttttttttttttgagagagagtcttgctctgtcgcccaggctggagtgcagtggtgccatctcagctcactgcaagctccgtctcccaggttcacgccattctcctgcctcagcctcctaagtagctgggacgacaggtgcccgccaccacgcccagctaactttttgtatttttagtagagacagggtttcactgtgttagccaggatggtgtccatctcttgacctcatgatctgcctgcctcagcctcccaaagtgctgggattacagacctgagccactgcgcccgacctagtatatcttttaaaaagcaacttctcttccccaactgtcactactatagcaattcacagaaatacaggtgattaataatgtaagtgtcagttggaaagcgagaggtactttatctgttgaacttgccaaaattgacccaaatacgacaaatggaacaacctttcatccaaccttattaataagtccacctccaaattgagtcatgccatttagtctatatcagtgattctcaaccctggctgtatatcagaattacctgtcaggctttaaaagaacaacccaaatccactgaatctgtgtattttgaaatggaactttggcatgtgtgcaattttaaaagctccacaggtaattccaatgtggagcaagggttgataatcactttatgtgtaaatctttgaagcagattttgttttaatgtcctgtaatttttttttaataaaatggtaggtttttatcttttttttttttttttttttttttggtttgggggttttcgggggaagagggttgtaggccctgcattaaaaggtctttgtgatataccgtaaagtagaaaatttcctcttaaagactgacaaggtttatcattagagtatacttatcacatgttgttccatctcaacccttcctgaatagattaaaatgggaaactttttatttatttatttatttatttatttatttatttatttatgaatgaatgaatgaatgaatgacagggtcttcctccattgcccaggctggagtgtagaggcatgaacatggcttactgtaatctcaacctcctgggctcaagtgatcctcccaccttagcttcccaagtagctgggaccagaggtgtgtgctgccacacctaattttttaaatttttgttttgtagagacggggtctccccgtgttgctcaggctggtctcaaactcctgggctcaagtgatcctttgaccttggcctcccaaagtgctgggattacaggcatgagccaccagccctggatgagaaactttatttagggaaacatgttttaagtccacataataaattttgcaattaaatgacagctaatatgcttgttgtggaaaattggaaaattcaaagaaaataaagtatctagaactccctacccattatcattatattgctgtatttcctttctttccaggtatttttacatatgctaacatgaacagatacacagacgtatatgtatccaaaaagcatgggccatacacagtatcatcttttttttttttttttggagatggagtcttgctctgtcgcctaggctggagtgcagtgggtgtgatcttggctcactgcaacctccacctcctgagttcaagcaattctcctgcctcagcctcccgagtagctgagattactgatgcacacacaccatacctggctaatttttgtatttttagtagagatggggtttcaccatgttggtcaggctgatctcgaactgctgacctcaggtgatccacccatctcagcctcccaaagtgctgcgattacaggcatgagctactgtgcccggcccagtatcatccattttttgccatgaggatacttccccgccccatccccaccaccaccccgtctgaggcaggaaaacaagcactttttttttctttttcttttctttttttttttttttttgagatagagtctcactttgtcacccaggctggagtgcagtggtgcgatctcgggtcactgcaacctccgccctccgagttcaagcgattctcctgcctcagcctcccggagtagctgggattgcaggcacttgccactgcgtgctgctaattttttgtatttttagtagagatagggtttcaccatcttggccaggctggtcttgaattcctgacctcgtgatccacccgcctcagcctaacaagcccttttttttttttttttttttaagagggtctcactctgtcgttcagactggtgttcattggtatggtcatgggtcactgaagcctcaacctcctcgacttagctcaacctctcgcctcagttccccaagtagttgggactatgggcgtgttccttttaaacattttttgtagagatagggtctcattgtgtttcccaggctggcctagaactcctgacctcaaggaatcctcctacccgtctcccaaagtggtgaaattgcatacacgagtcactgctcctggccaatgagggcaactttttaaaaaataacattcatctgctctcatttttctaataaaacattgccatttattatatggctttattagtgttatctttgttgcaaaagtatatgtaatagtctctaaagatggttaagagtttgtgtcacatcaactgtatcaataacctattttgtattttattttcccaatattttaagatgaaaacttccaaatgtatttaaaaaggggatatgatatgttggaacagctgtatattgtctctctagattcaacaactgttaacattttgccatagttgctttatttttctttttatatctactgttttttttctttctttgactgaaccctttgagagaaaattgcagacatcatattttacctgtaaacatttaagcatgcagctcttaagaatgaagatatttttcagccaggcacggtagctcacacctgtaatcccagcactttgggaggccgatgcaggcagatcacctgaggttgggagttcgagaccagcctgaccaacatggagaaaccctgtctctactaaaaatacaaaattagccgggcatggtgtcacatgcctgtaatcccagctactcgggaggctgaggcaggagaatcgcttaaatcctcgaggtggaggttgtggtgagccgagaacatgccattgccctccagcctgggcaacaagagtgaaactccatcccaaaaaaaaaaaaagaacgaagacatttttctgtataaccataataccattattatacctaagaaaattcatttttttaaatttatttttaatttttgtgggtacactgtaggtgtataaaaaaataaattgtataatattgaatatcaagtttaaatttccctagttgtcactagagtgactattgtaattgttattttgaatcccagtctaatcaagtttatcaatcaagcacattaaacaagtctttaatcagtcaagcccctcacctgtttttttccccttgaaactgactttgaagaatctgagccagttttttacaatacgtcctgcattctgaattcatatgattgttttctcatgtgtgctctaacttgatcctctattcccttttttcctgtaaactgggaattagcattattagattcattctaaacattttttggcacgaatacaggacatgactgtactttataatgcatcatatcaagaggcacatactgtaaagatatctttattttagtctgtcggcttaactgtgatcagcttggatgattagagcttgttctgtacagtattaagtagttactattgtagaaacctgtagattttccaaaattcactaaaatatgaaaggattgagtagtttattattcatactgagaatacttaatttatttttatctagagatgtttttatcaaaataagagcaaaaagtaaatacaatttttatccgtaaaaactctaaaatctttcaaaaatctgtttaaatctatatagttttatgttttgtatttcctacttatttagcagaaatgatgaagaaactgttctgatggcctgcttttctgtccttttcctactgctttaaacattgattttcttttgtactaaatcatatagccaaatattgtttaagtaagtcagttttaggaaatgcttgtgttgctgttgaattataaaagctgagtaaatttcagattaaactttaaatgactgtgaaataagacataaactagttaatggtaatttgcttaaaatgacttgagattattattggaagtttttattaattgatacaggtaagaattgatatttaataaaatgttctcatgcttagactatattacttttcggtagagaaattagtattttgctgtaatgtgttatgaaatacatgtgatatcctagtttgtctactgacactggggtcttgaatcttaaaaaaaggcctccgatgaagcagaggaaagtggatcacagggaaaattggtggaagctctcaggcaaatgagaattaatcataggggaaactaccgacaacttctggaggagatgctgactagttacaggctagctaaagtagagggagaagaaagccctgctgaaccagctgccacagctacttcttcgaacagtgatgctggaaacccagtgacaatgcaggaaagccatactgaatcagaaagtggtcttgctgaattagacagctctaatgaagatgcagggacaaagatgagtggtgaaaaaatatgactttcctttttggtaatatttttgtgatctttgatggtttttaacctaggaagtgtaatgtatgcatttatataactgttttgttatttgaatcttggaaaactagttttattatattcagatagccttgttttttaaaaaggcctttgcatacacctttatgagatagtgtaaaattgactatttatagtactatggatttaatgaaattatatgtcatttcacattgtatgccagaaattaggctaccaattatgaattaaagtcagtagttaaattaatactagatagaattagaaattttgattagagagattatgctatattatggaaaaacttgttaatgtagaattatactgcttcatattattttacctattagtacactcatagttagctttgtaataaatttatgttttctttaataattttagttcttcaaagaatggctgatgctggcctgtaatttttctttcaaggatgataatttgtgtgttgtttgatttgtttatattttacatctctgtagttttatttttagaagttgtgagatattggatgtgtggctatttttcctttctctgtattctttatgaaacataacttttgaaaaacctatgtattattcatacagctttggtttgtatattctgtatagcctaactacacacatcaaaatgtatgtcaaccaagtgtttagaatgaaattataagtgtttaagtccaaataaagcatgtgatgtggaataatctatgcatgttgtacttatttttgaattaattttttaaaaacaaccaagtttggtatattggaagaatacccattagaaattcatttgtatttatataacatttagaacacttttggcttaccttttttcattaacaaaaaggaaaagtttaatattaaaatatatgtgttgcatacttaaatctattctttttcttatccatcttttgtggtacaaaatattaatctttggacattatgggcacacattagacatgtgagaaaattgccacagtgagcattttaaagattgcagaattgtccattttgttacaaatttttgttagttattaagaaattgaacaattatgggctatttttaaaatagtggcagatgagagtttttgtttaaagggatttttaaattatagatttgtcacatagggaaaaatattttttaaaaattattttataactgtagaacattaacttttcgtctttacgtttatatttatatcatgtgtctaaagttgctttaagttaccataaattgaaacttcggaatctttggatgttatagctgatgttttgatgtatttttccaatgccagaatatttttaagtgctttgagaaaggaaggcatttgatggagaggggaggaaaataacccaacccagttatctatccatattagatacacgtgtacacacacaatatgcaatacacaacatctctctgtaaaagtacccttttcagacaaagaaaggaaggtaatttgttcatcaattttgttttcttttgaaattcaatccaatctggaagtggcataggtaaataataatattcttccttttctcttcctgtagggtgctggagatctagaagacccatggtagccttaaaaaccttctaaaatgcttttgattctgaaaattgggggaaaaaacttttaatcacaattttcttcaatacaaggggaaaatattcttgcggattcccaacgttttgtgatatgagcagaaaatcattagcatttcccatcatttgttcatatttgtgttttctgacagttgccacttgtagcattgcctgtactacagtattttttgccaacctcaggcatactcgttacatctgtattgaactttcggccctagaaaccagtggagttatttcaccacaaatcaacaatgtgcctgaggtgcatgggaaatatagttagctatactctgaaaatacattatgttttttttctttaaacaaaacacacaacatgtaagcatgtaagagtaaagaattgtatgatatgttccttttttcagttcaccaagttggaagccttttgcagctctgtggcttggaatttcatttga

SEQ ID NO: 11856 - DNA, 1114 bp, Homo sapiens
atgaagagtaaagtatttatctgaaagaagtttctgggttaggagaagtaatgaatgtatccatttgtacatggtttacatgttgtggatgctttgtaaacattttcctgtatgtttaaattgtgtttcagcaggatgtaattgcccttgtgtgtagttaaaatgagtcatcatctggtcctttgtgaaatggaattcatggtattttctgtaacgttttcctgaagctgtttctggagagccacacatttaaatacagacagctttcctgatcatttgatttattgtgcacctgatttttggtctaaaaggaattattgccacaatatattttatttattctttagattttagccttgtaagttaaagtgctttacatgatgatgtgaaaagctgtttgtccctttactgggtttggggggttgttaaaagatagggaatgaagaatgcaaaatggtttatcgttcaaactgtccactctgatccaaccctgtactgatagtacttcccagtatgatattgtgatgtttcatacaatgcagtgaacataaccaacttgttacctaaataaagaattgataaaaacagtgtgacatattactatttggtatgattcagtttttaatgttattttaaacttcttatatggttggcatatttctgaaaatttaattccaaagaggaattaaccaaactgtacaggacaatattaaccccttctgtactctagaaatatttatactccttttaaaaaaacctgcctttggccgggtgcattggctcacacctgtaatcccagcactttgggaggccaaggcgggtggatcacgaggtcaagagatcgtgaccatcctggccaacacggtgaaaccctgcctctactaaaaatacaaagattagctgggcatggtggtgcttgcctgtaatcccagctgcttgggaggctgaggcagaagaattgcttgaacccaggaggcggaggttgcagtgagctaagatcgcgccactgcactccagcctggcgacagagcgagactccgtctcaaaaaaaaaaaaaaagaaaaaaaaaaacttttccggcagggggcagggtgggggttactggtgcttgaaa

SEQ ID NO: 11857 - DNA, 2342 bp, Homo sapiens
ataagctcctataagccataatttacttttaaacattttatttttttcaaaacatttgagaacctttcttaaagcagttacattcaagctacagaaatatcgaagaattaatgattgttcaccaagcagcatgctgtacatgaagctattacaaatgcttacaatcccactgaaatgccagtgtcttcatctcttcataaaggtgcctaacacgaggtatacagtatgttcagtacactggaatagcatgctcgattggaaacaaagcatctatctctgaaagctgtttggcgatgaaggagattcttcgtgttgtgttcaaagatgagtccctctcccttgtccagaaaaatgccacttgtatcaactttactgcctttgtcggcagaattggtacttaaccttattctcattttagcgggaaggcccgaaatcatattatgtagatttaacagtgttgattctccaaaattcagaaccacgataaagattctgtcgatgccatccagctctcttgtgtacacaacatagtggctgtcattcctcaaatggcaaaaccagcccctgttgaggagtagctcattggcatgaagtagacttaaatcttgatataacttcaaagccgatctgggctgagtcttttggacctatttttttaaaaaagtatttacgtaagtgtttgattctaagaattgtttgtaagtatttttaatatattgtaaggagttatttacccaaaacacttgctccaattttgccccttataattgccaaattgtaagcatcaataagtaggtaagaacaatttatataaaaactgatagaaatgacaaattcggggtttcggcttgtctgggagtcaataagtacgcacagtgctctgctacattgtagagtttctgtagagatcaaatttgactccactttaggagtcccaaagcaaatgtccatgtctaagatgaatatttaacttgcatagtcattctgtgctatattgtaactgccagatggccagaaagaaggcaacagtggactcagacttctgaggaatttgggtttgttcccctttgtagactaatgtgtaggttgctgttgtgcgaagatcgtgtaactttagcagacatgtatttcttgcacagctaatagaagacaaagttgaaaaaaaggatgcaaaataaaaagctgcctaaggtgaaagttagaaattgtagacttttttttaccataatagtatgtgttcattaaagatgatttgggtttattttacagctatataaaacataatttgatgatgtacttctaacctttcaagcattttctgttattgactatataatatagcctccataaatgtttttaatgacaatattctgttgaacggttgtaccatactcagccatgccctttcattttgacgatagtgtttctaatattttgtatttttattcccctccccccatttttgtattacttaagatagattatcagaaagacagttactttgtcaaagagtatgggcacttgatacataatgccaaattattcttcataagagctgttgccaaatcagtgataatgttcatttaattgtattcttgccagccatgtttactggggtgatagttgttattgtggttgttattgttctttaggggtaggttcccaatatgtggtctttaaataattatctaatggtgtttaaaaagatgtttattctgtttgtcaggtacaaagatatttatgatacatgtatgacttgtctaagttattaacattttctctagccttaggtaatgcatgaaagcacatgtttcagtgccactcacataagaagtgcccggtaagtgttagctattattgtctacttgagttactactttctaaaagtatgttgaagtctttttctgtaattgcagatttgttgattttgcatttgagtattttctatattttgaagctgttagatgcgtagtcatgatttttggtggaatgttttatcaatttttgaaaattgcctttgtctcatataatgcttttcatattgaactatattttgtctgctattaaatacttccaagcctgatttttgtaattttattttttattcaattacaagaatacatactataaaaaggttttcttcaacacctttccatagcttcacagttcccctcagagacaggcactatatgttcttttgtttttaatgtatcatatgtttgcataggcacagaatgtatcatttcatatgtttatatatttttctttacacagttggtgatatgttaccattctatactttattgaatacctgtttgaaatggtctcatatcaatgtatat

SEQ ID NO: 11858 - DNA, 1196 bp, Homo sapiens
atttcattatacattttataacatcaaagcaaaacatggcataatttcaggcactgaatcatcatccaactgagttgtaattaaggataagaacatcattaagttttaggtaatgcttgcaattgtaagtaagcagtgcctttctattcttctggaaaatgtcatttagggggtttcaacaattctcctaaatctagactgtaagtgccatgcttgaatttttttttggatgcgtgcccaacaataaataatccacaatgatctgaggacagcacttccacccaagaacttaatcagattaatgatgtatttgttttataaaaatgaagtacattaagcctgagaatacctaatttacatactaaatggttgctagggaccaaaaatactagtggtttttataaaatcgaggttacaaaattgtccattgtcttgaaatctgttagtaaatagcagtgaaatgcaaaataataaaccaatgttaattagtagtatttacgtatgtaaattcattagatggtgtactgttgttcaaaagaacctaacgatgctcatatttgaaaacatacgtgccccagagacaatgatgccattatatgaagttggaaataacagcaaacttacttataatgttttctaattgacttgacctcaaattgtgattaacatgctactctgatattttcatttagggtcctagtttaatatatgcaaacataaacagtaaattagcagtctaggtttctgccattttttgttggaaacctattagcaacctttatctaaaaatgggaggagagctttcacaaaatagctgaatttcaccaatccctaaatcagaggaatttacagcatctctggatgtttcttctggattgtcacagacacatacacacacacacaaagctgcttcattcattcaacatacttgtgttaattgatcttggggagacaatattgaataagacaaagtcactaccttctttgctaaggacattgccaagtaagcagataattaccatacagtaggacaatattacaattagggcataaatggagagcttaggtcagattgtcaatgaaagctttattttagaatgaaatcaaacatcagtccaaatatcctaaatgagttaatattgaaagacaaaaatttgttacttttagaagcaacaaattcctacagaagagcaaac

SEQ ID NO: 11859 - DNA, 1174 bp, Homo sapiens
tacaaaaagggatagttgtgcttgcaggaggggtagtgtctccatctcctgatgccagggagaaggaggcaggctgctggggtgacggagagcaccctcaactaggtcacactgcactccctctgtgcctcagtttccacttctgttagatggctgatatgatctctgccctgccagttggattggggcttccaaaatatcaactactgcaaaagaagaggttgtggccactgtgactcatatacatgtacatgaacgtatctgaagttttcagggctgatactgatgtgaggcaacccatgcaggcaacccggaggaactgtgtccctcactctgagacagtgagaacggactgagccggaaagctgatggccgtgagaggagcaggtttgaaaatcactgaatgaagtcatgttgtacagagggggcgggggtgcatactgtgggacggaggtgagtcacagtgcataagtgttggggagtcaccttgaacttgggccagaagagtagaaatattgagacttgggtttatctgcctcacatcaggtacatcaagttctggatggctgcccactggccagagacatgaggtggacggctcccttttgctgccctgggaaggccttctgctggcttcggccccactgagcaaagtctgcttgttcactggagttcacacagactccttgccaggcctgcccagaatcctgtctcctctgacttcctgtgctcttgcataatatttccttgctccctgaatggctggccccagtgcaggagcagctcactcacactgctggaccgagggcaggatgtagagggagggcagggatctgcaaacgtcacccaggggtgctctgggctctgagggtggagggcaagaggggcagagccccctcaaattctttggaagattatagcacaaggggagttgggaaggccctgggaccatgtgcacacacatctatctccatgaattgtctctcctgtaaaattatttttaaagttgctaagttgttttcttctgattataaaaaatatacatgttccccataaaaagtcatagtaaaagaaggcatggagataaaaataaaaatcaccaaaattccatcacccagagataaccactgttaactctttggtgaacatacttttctctatatcatgaatattg

SEQ ID NO: 11860 - DNA, 4199 bp, Homo sapiens
tttttggacacatatgagcgtggatattttgttgttttgtttttccttttttttttttttttttttaataaacagtgccatgaaagaacatggatattttggacgttagttaagcacttcttccggtaaaatgcgcaactcatcattgtctaatttgtattttgtaggaagggagtgaacaggcaccactaatgagtgaagatgaactgattaacataatagatggtgttttgagagatgatgacaagaacaatgatggatacattgactatgctgaatttgcaaaatcactgcagtagatgttatttggccatctcctggttatatacaaatgtgacccgtgataatgtgattgaacactttagtaatgcaaaataactcatttccaactactgctgcagcattttggtaaaaacctgtagcgattcgttacactggggtgagaagagataagagaaatgaaagagaagagaaatgggacatctaatagtccctaagtgctattaaataccttattggacaagggcttgcttcaagcatctgtattagtctgtattaatgctgctgataaagacgtacccgagactgggaagaaaaagaggtttacttggacttacagttccacatggctggggaggcctcagaatcatggcgggaggtgaaaggcacttcttacatggcagcaagagaaaatgaggaagaagcaaaagtggaaacccctgataagccatcagatcttgtgaaacttattcactatcacaagaatagcatgggaaagactggcccccatgattcaattacctccccttgggtctctcccacaacacgtgggaattctggtagatacaatttcaagttgagatttgggtggggacatagccaaaccatatcattctacccctggcccctccaaatctcatgtcctcactattcaaaaccaatcatgccttcctaacagtcccccaaagtcttaactcttttcagcattaacgcaaaaatccacagtccaaagtctcatctgagacaaggcaagtcccttccacctatgagcctgtaaaatcaaaagcaagctagttacttcctagataccaacaggggtacaggtattgattaaagacggctgttccaaatgggagaaattggccaaaataaaggggttacagggcccatgcaagtccgaaatccagcagggctgtcaaattttaaagttccagaataatctcctttgactccaggtctcacatccaggtcatactgatgcaagaagtgggttcccatggtcttgggcagctctgcccctgtggctttgtagggtacagcctccctcctggctgctttcacggctgttgttcagtgcctgcggcttttccaggtgcacggtgcaagctgttggtggatctaccattctggggtctggaggacggtggccctcttctcacagctccactaggcagtgccccagtagggactctgtgtgggggctcccacaccacatttcccttctgcactgccctagcagaggttctctcccctgccgctgagagggcctctcccctgcagcaaacgtttgcctgggcattgaggcatttccatacatcttctgaaaactaggcggaggtttccaaatctcaattcttgacttctgtgcacctgcaggcttaacagcacatagaagctgccaaggcttggggcttccactctgaagccacagcccgagctgtatgttggcccctttcagccatggctggagtggctgggacacaagacaccaagtccctaggctgcacacacatgtcaggggctgccctgacatggcctggagacattttccccatggtgttggggattaacattaggctccttgctacttatgcaaatttctgcagctggcttgaatttctccccagaaaatgggtttttcttttctattgcatagtcaggctgcaaatttccaaacttttatgctttgcttcccttatttataagggaatgcctttaaaagcacccaagtcacctgttgaacactttgctgcttagaaatttcttccgctagttaacctaaatcatctctctcaagttcaaagttccacaaatccctatggaaggggcaaaatgctgccagtctctttgctaaaacataacaagagtcacctttactccagttcccaacaagttcctcatcttcatctgaggccacctcagcctggactttgttgtccatattgctatcagcatttggggcaaagccattcaacaagtctgtaggaagttccaaactttcccacattttcctgttttcttctgagccctccaaactgttccagcctctgcctgttacccagttccaaagtcacttccacattttgggtatttcttcagcaggtcccaatctactggtaccaatttactgtattagtccgttttcacgctgctgataaagacatacccgagactgggaagaaaaagtggtttaattggacttaaagttccacatggctggggaggcctcagaatcatggtgggaggcaaaagacacttcttacattgtggcaagaaaaaatgaggaagaagcaaaagcagaaacccctgataaactgatcagatctcatgagacttattcactgtcacgagaatagcacgggaaagactggcccccatgattcaattacctccccctgggtctgtcccacaacacgtgggaattctgggagatacaattcaagttgagatttgtggggggacacaaccaaaccatatcagcatcctttcaagaatattagataattggagctgagtactcaggaacttgactgtagtagaatactgctagtttcttaattttaattcacatcacctgaaaagtaaaacaacaggctttgccaagtggatgcttttcagtaacagtgaagtggagtgaataccaaatgtttgccctggtggttcctatctcttcaggcaaacatggtcagtattctgtaaagttcccctggcctaaatgattacttgctctgggcaagtggatatttattaggctatttcaaagccacagcataagaatgtcagcctagccacagagtctgagattctgagttcagcctagccacagagtctaagattctgtatcctctgacattttggaaatgatacactactggcttaagtgatgactctttcagattttcagtattttatacaactactgccacatccttatactttattgcttttctgtcttcttcaacctgggagagaccctgaatttgagtgtgttctctaatcaatagtggtttagctttcttttctatttcactcgtttctagggttttttatttgcagtttaggaactattaggaatgtcaggactttatcagcaggggtaaaactaccacctggcctagcctaagtaggaagtgaaaagataattcaccaaacaatgattaatcagatagaagttctagtcaagagggatattgttgaagttacctcttttagcctagatacatggattcttttcaaatcaggaaagattagaaaaggaacccaaaaaaccctttaacagtgtgaatctttatagtatttgaaaatgagaagaagcagcagattgtaatttggtttattggatgtgatggacgttctgtaatagaaaacctgaaacgatgattgaatgggaaaaagagactacaaaatttgtcgtaggatgtatacagacttattttctttattacagtattataagaaaacatatgtatttgtaaaaatggtttcctgtgtcaagtatttgtgcagtcagagctgacttgtaaactattcttgtaatagctcattattttgaaagatttatatatgatgaattctggatatatgaccaataaaactgatgaagcaaaacctcgagcagttgattttgttcacatcagcttctcctgccacatgcagggtgtgtttactacaaatgttcacatgtgcctgctcttatcatagttcctgtgactatcttcggctataccctgctccttttgcaggagtcaattctcagaattcaaagttactttccccttttaggcattttttcttctgaatgaaatcacttttggatcttcattctctggtcaaatttaaattatgacaccattctctaggagactgcatagcgttttcccctggtctggcgactgttttttaatttgatagcattattg

SEQ ID NO: 11861 - DNA, 1180 bp, Homo sapiens
tccctctgctccttgttccctctctcggggagaccacaggtcctgtcgggcccggcgggggaagctgatctcctgttgtattccctctctgggcatggccatccacccgggtgcccaagccagaattgggcatcattctcacttgcttcactcctttacccacccacatcgaatcccttgcaaagttgtcttggatacgttcattctccagtcccatccccctgccctacctagttcaggccaccttttcttctctggactacctcggtgtcttcctgatgatccctgcatctcttcttcatcctctgtagtttgttctatacagagaggctacagccatggtcttaaaacagaaatctgatcatgtgaccagaagcgtccccccattcccttatcaccctttggtggattctcattgctcttccaagctcttgaacggggcttgcaaagcccttcatgacctgtcttcctttaactttagattcatttgtctcgactgtactgtgtcttcaaccatactgaatcttttttggttcttagatcagaacaagttccttctgggcttacatgttccttcagtatgttcgctatgtctgaggcactgtcctttggttgaaataatccttcttatcctttatgtgttatttcaggtgtcagttggggatttcgtggtaccccatgggtgtctgcctgccggtctctcttttctaccaggttgtaatctgtgtgagaggagtttgtcgaggtcatagtactatcttcagtaccttgtgctgttagtacggtcattaaatgtataaatgcagcatgggtgctccttgggctccctagatgaacaaatagatcaagttattaatattaaatgcctgctttttcagaaccaattctcaaccctcagtccgtgtagaggtttctttagcttaggaagttggttattttcttgccttcattccaggaccatgacaggggtaagtgacaaagtactggtcagtttttctttggcattggctgtgggtacaggatgtctggatgttggtgagtttggctgctttgggtttgaattcttaaccaagggccccttgagggagaagctgctactagctgctggcaggaaggctggccccaaacttagtgctgataggactgatgacacaccaggaagaaagggttgggccaggtc

SEQ ID NO: 11862 - DNA, 1265 bp, Homo sapiens
gcttcccctgcctgagagagacctgaggaggggacagagcccagcccctctcctgtggctgagcaggcctctgtgtccatgacacctgtcttccgggcctgggggctgtgggtgtatgtcctccctactggcttccccggcccctgctgcatgatgctcttggaactcttctccaaggagtcagtcccccaggcctatcaggggatccttttgtatctgcactttgggttttagtttcaaagctccatcaggtacagcttgcatttcaggatgtgtggaaagctcgggtgagggctgccctggttcatcatagctccaccttcctcggaaggagtgggctgttggagaccccccatccatggcacactagctcagcactgcatttcccgagatgattcccaagacagctggtgcctcctggctttcctgtgccaggccaaggggcaccacagaggaccctggatcctttgcctcttcttggttgaaggatctctatgtatgtgtgtatataaatatagttttttatctatatatataaaatagagatctattttttttctggaattctgttagaaaagtaaagaaaaagcaaatgctgttggtttatctcagggtgcccaaagtggttatagtcaatttttggtactaggaaaggcacccaatgcatttcctgacttttaagcatttccttgttggaagcagcagagggccaggccaagttgctgacagtgactttgcaggttgaataaagaaacccttggaggggaagcaggcttgtctgaagcagcatgtatattcactgggcatgtagctcccacaccagccttgagccaggccctggacaggaggggctgttgcaggatgagggaggccagagaaggcatcgaagccaagacctgggcccacctggggagggatgtgggaaaggaaggatgggagggaggaccctctgggaaaatgtggatttgagctggtgagagtgttgctaaggctgggctaaagcctggagagggtaggaggaggcaagaggggtccaggcagggctgatcctggcctctgacctgtccagggcgacccctgaagcccctgctgcctctgggcattgctgggagaggccaaggcaggactcacgtctgaacagagatcccctcgggcattgctgatgggccaccttcagctgcagggaagaagcctaggagaggaggcatgggagggacctgggccttgttcagattggccacctctgctgagaagtccataccagt

SEQ ID NO: 11863 - DNA, 1320 bp, Homo sapiens
atttacaatattgtcttgtaatccagcagacttaaaattcaagtctaaactaagagccaagaatgctcttttttatattggcctatctaaagcgttaatttggctcttactaataaacctgaatagttatggttaatgaagttccagcctgggcaataaactagcttccctctgtacttaatggtaattctgaggaaagagaggaatggaaagagtactcagtaattgagtaaatgtgattttttttttttttttttttttttggtcttttgctattgactcattttttgtgtacttcttctttttcagagtttgtacaaatgatgacagcaaagtgaagaccttgtacagaatgtgttaaatttcttgtacaaaattgtttatttgccttttctttgtttgtaacttatctgtaaaaggtttctccctactgtcaaaaaaatatgcatgtatagtaattaggacttcattcctccatgttttcttcccttatcttactgtcattgtcctaaaaccttattttagaaaattgatcaagtaacatgttgcatgtggcttactctggatatatctaagcccttctgcacatctaaacttagatggagttggtcaaatgagggaacatctgggttatgccttttttaaagtagttttctttaggaactgtcagcatgttgttgttgaagtgtggagttgtaactctgcgtggactatggacagtcaacaatatgtacttaaaagttgcactattgcaaaacgggtgtattatccaggtactcgtacactatttttttgtactgctggtcctgtaccagaaacattttcttttattgttacttgctttttaaactttgtttagccacttaaaatctgcttatggcacaatttgcctcaaaatccattccaagttgtatatttgttttccaataaaaaaattacaatttacccaatggttgctctgcatctgagtcatttaactgttgaagtctaataattttgaaaataaaatatggcattggtttctgcttggtatagtctagataattttttctcgtgtggggaagcatatggagatgggtggcagaaatagtgaaggtgggaaaggaaggagaaaaggattggaaaagtgagaaaagagggagagaagcacagaaaataagaggaacaaaataaggggtgtaactaaggagagattgaagaggaaggccgaaaagatggggatctatgggggctggcttagtgtagtcaccttttgggggccaccatcatgcgtgcccacaacattcctccaccaccatgtgtgtcgtactgtgctactgt

SEQ ID NO: 11864 - DNA, 1411 bp, Homo sapiens
gatttagacatagtggctaactctaaacacagtatacagaaacagtttaattactctgtagaaatacgtatttgggtaccagtagtcttatttttgttttgtgagtgtaggttaggtctgtaattttgaattatgttccacagagcagcttcagtgacagaggagccagtcatttggggatttggttcttttcctctgtaaacctaggataattttacttaggtcagcatgaaagtacagtggtatgattggtcaaagatatatttgaaatattatcataaggtatcataaagattggttaatctttaggagtcaaagtcacatttcaattgctacctccattggtatttttccgttaaaagtttttgggtttttctgagacgtggggtcttacagtttggccaggctgaagtgcagtggctgttcactggcacgatcccaccactgagtaggctttaagagttaatacgtttcatttaggttacattttattattaatctgtgtatttggattgtggtctttctttcaaacagaattcaaagaagctttttcactatttgacaaagatggtgatggaactataacaacaaaggaattgggaactgtaatgagatctcttgggcagaatcccacagaagcagagttacaggacatgattaatgaagtagatgctgatggtaagtcttcaattttgtggggctgggaggggttgaagaagtgatacttagatgtttccactaaacctttgctgtttgcttatatgtttccactaaagctttgatgtttccactaaaccatttcaggtaatggcacaattgacttccctgaatttctgacaatgatggcaagaaaaatgaaagacacagacagtgaagaagaaattagagaagcattccgtgtgtttgataaggtacgtcaaggactggatatgttaaattttgaggatgaaatgaagataccaggactcattatgaagacttgtgtttttttggttgtttttttttttttttttttttttttttttgatgatttaccaacatattttaattaccaagcaaaagctttttaagaattcagtatagactttctaatatatgtattgcgttcatcttgtcaaaggaggtgtcacttgactttgggactaggaaataatgatttcaatgtaggacattttgcttggctcttaatgacatttgtaggtcaactgtgtagatttgtatgcatttctaaagtatgtttttcccccaatgtgaaatttagtagtaaacttaataaatttccattccaactctcaagtctgtaatttgactcagaaactatactaaattttttgctaggatggcaatggctatattagtgctgcagaacttcgccatgtgatgacaaaccttggagagaagttaacagatg

SEQ ID NO: 11865 - DNA, 1201 bp, Homo sapiens
ttagcaagtgccaggcacttaggcagtagtctatagctgaaaaataaaacattcagaaccactttttaaggttttgtgtccttgtaactttaggcattattattacaatataacttagctgggacatgagagttaatagatccacattttaaagtagattttttttttaattttctagaatgtgtctgtgaaaactacaagctggccgtaaactgctttgtgaataataatcgtcaatgccagtgtacttcagttggtgcacaaaatactgtcatttgctcaaagcgtgagtaaaatatcctaattacctgtaagctttattttgacttaatacttctttaattgatgtgccttgagttggaaagagttttattggcttaaatctgaatcatgttacaaagtaagtgtgggaacacataaatttcaaataatctttgaccctggaactttagagttaattttttttttcccgtaatcatgaaatcagttatttttcagtttggcattaaggtttctttttcagtggctgccaaatgtttggtgatgaaggcagaaatgaatggctcaaaacttgggagaagagcaaaacctgaaggggccctccagaacaatgatgggctttatgatcctgactgcgatgagagcgggctctttaaggccaagcagtgcaacggcacctccatgtgctggtgtgtgaacactgctggggtcagaagaacagacaaggacactgaaataacctgctctgagcgagtgagaacctagtgagtggggctgcctatactacttgttttcatgctgttcagattcatttaattaaatttatttttgattatgtaatatgatttcatggtttagaattcagaagatatgagtgtccagtgaaaagcttccttctcattccagtccccctcgctacccattggacctccacagaattgatgttattgattattctataaccttccagagatagttgatgaatttgttatatatctgttttattatttttacataaatgatagcatactaggtataatttttcttttatatctttacttaacattattcagtatttcattgttgcattagtagtaaatgtatgtaatttaacctatgtatttgcttattgattgtgttttaaaagtgagatatgcttgttttagggattgtttaatgaaaaggcacagaaacccactca

SEQ ID NO: 11866 - DNA, 1152 bp, Homo sapiens
gaaagtaaatcaattttttctagcattaaaaatagtatgcatttaataaaaatcttattcttaatgatctagcttacctccaacttgccctagtcactttggcgatcttgtctctaaatagaaccttgaaaacacttaaatgtgtgtttccttgcaatataactttttctttttttatttaaataagtcttataaatgtgggaaaaaattatcttgtgttcctttaatttcatttttatttaatactattttcagaatgaacaaaagattgaaaaattatttagaatttttttctgtgctttttcctgtttcagataaaggagatgggtgagatgcatagggaactcaatgcataactatataatttgaagattatagaagaagggaaatagcaaatggacacaaattacaaatgtgtgtgcgtgggacgaagacatctttgaaggtcatgagtttgttagtttaacatcatatatttgtaatagtgaaacctgtactcaaaatataagcagcttgaaactggctttaccaatcttgaaatttgaccacaagtgtcttatatatgcagatctaatgtaaaatccagaacttggactccatcgttaaaattatttatgtgtaacattcaaatgtgtgcattaaatatgcttccacagtaaaatctgaaaaactgatttgtgattgaaagctgcctttctatttacttgagtcttgtacatacatacttttttatgagctatgaaataaaacattttaaactgaatttcttaactttgacatttcaaatttcttcttctttttcttttcttttttttttttttttgagatggagtcccactctgttgccaggctggagtgcagtggcacaatctcggctcactgcaacttctgcctcctaggttcaagcgattcttctgcctcagcctcccgagtagctgactacaggcgcccaccaccattcctggctaatttttgtatttttagtagagacaaagtttcaccatattggccacgctagtctcgaactcctgacctcacgatccacccacctctacctcccatagtgctggggttacaggcgtgagccaccgcgcccggcctctttttttctttttgttttgttttttctttttttttttgagacaggatctt

SEQ ID NO: 11867 - DNA, 1106 bp, Homo sapiens
tgaattaatgctgaaatgagttaaggctttgggggactgttgggaatgcatgattggttttgaaatgtgaggacatgagatttgggaggggtcatggcagaatgatatggtttggctatgtccccacctaaatcccatcttgaattcccatgtattgtgggagggacctggtgggagatagttgaatcatggggatggatctttcccatgctgttgtgatagtgaataagcctcatgagatctgatggttttaaaaacggaagtctacctgcacaagctctttctttgcctgctgccatccatgtaagacatgacttgttcctccttgccttctgccatgattgtgagacctccccagccatgtggaactataagtccagtaagcctctttttcttcccagtctcgggtatgtctttatcagcagcatgaagtccagctaatacagtgcttgaacatgtaatatctcaaatctgtaatgtactttttttttttttaaggagcaaagaatctgcagagtgttgtgcttagtaaaatgaattttgaatcttttgtaaaagatcttcttctggttcgtcagtatagagttgaagtttataagaatagagctggaaataaggcatccaaggagaatgattggtatttggcatataaggtaattatcttcctttttaatttacttatttttttaagagtagaaaaataaaaatgtgaagaatttaattgtgttttagtattttaagtagattgtgatagtagaatggtttgagacactttaatagcaattagcatgtggtttttaaaaagttgcagtttggctggtcgcagtggctcatgcttgtaatcccagtattttgggaggctgaggcaggtaggttgcctgagcccaggagttcaagaccagcctgcccaacgtggtaaagccccatctctactgaagataaaaaaatttaaaaaaattagctggggctattggcacacacctgtggtcccagctaatcaagaggatgaggttagaggatcacttgagcccaggaggttgaggttacagtttaactttcagaggccaaggcaggaggattgcttgagtccaggagtttgagaccac

SEQ ID NO: 11868 - DNA, 1136 bp, Homo sapiens
tatggaatggccaggaatatagactggccagggccaccggaatctgtgctaacgggaaagggctaacagagcctgacagtgagccaggggtctgcacaatggagaactctccactggtactgaccaggaacctgtgttgccctttgacctaggcaaaatagacagctgcctgtgtggtagatagtgaaaatcagaaaagactccagtgccccctcaatgtagttctcctttgtgcctgatatcccctcatcagcagttctcacctttgagttttaatggattcaaatggatatgtttctggagagggggagggtatcacacgtgaagacccttctcttcagcactgtatttctcccatgatagaagggcccttagcccccacccctgctgcccccaaggcctagagcgtggtaggggcagggtgcctcagtgggacagatgtgtagaagtccaaccttcttgacttccttgctttgctgtgagcatcacagcagtgcgcgaaggagggggcaggcaggggaaaggggtaggcttgtgtgaatggctgctgtgaattttaattcaattcagtctggctggcttactgaatcaatgttgggaaaacatagcgctctcctgggaggagaggtgtttggtataaatagaaggtattatcattaagaggcaattaggggacgtcatgtcgctcaatacagcgcaaggcagcagccagagccccagccgtgggctgcagagctacaaggaactgctttcatttacttgtccctggagaaaaagactttcctccattccagggctctctctggtcccttagccccttctctgctggataaattgagccaccttattctcaggggttgctcgatggggtcgtaaccacaccagtgaactaaccatagaaaggggttaccattctccactcaaactctgagcaagagcattgccttccctcacataccaccttactctttctaaacagctttattgaggtacaacttacatagcatacaatttacccatttaaagtatatgatttgtccaggggcggtgactcgcgcctgtaatttcagcactttgggaggctgaggcaggcagatcacctgaggtcagaagtttaagaccagcctggccaacat

SEQ ID NO: 11869 - DNA, 1136 bp, Homo sapiens
agtcacttgaacccaaaaggaggagattcctcctggacaaaataaaactttctgtccatatatagaagatcgtaagtggcactggctcagcacaaggcttcaggttcctcaatttggaacattgaacagatcaggttctgagtcctctgcaggatcttgaagacagaattgactattctcagttgacccctgggcttccctcgggacaggctttatagcctcacccgcttaatgcatccctgaagcctctcaggcacacagcatctcacagcagtgctattgagggtggactgtctgtgggtatgggaattccatatgggtgggtatgatggatccctcctgcaactggccactaacacagaatatagagagctggcttatggaattaacgaagacctcatagaaaagtgaaaattgggatgaaatgccaacatagcgctgggtgctgagatacgatcagtgaactcaaatttgtggctggtttgagctgggcactctccctcttcagctgcccagagctcccacctaccagaacccactctcaggaaaggcctgctgtcagccagtaacttccatctttgatatcagtggaagttacttgacccttctcctgtgggtgtctgcactcccaatgcagaatggaaggcattggtcccaagttgaggaccatcagccctcaactagcatgttagggataatcttttggggcaggaggattgccctggtgtccttaaaattcttccctttctctgtctgagtcaggctggacttggagaaccctgagatctgggctgtgaaacgtctcagggattactttccactttcggatgaaataaacaaatatagagaagtgtcatctcctccaccactataaaaatggggagccacccagccccccagggctcatctgacagctgtaaacaccaccagctgaaacccaggtggtgtgctcagctttctgttgaaagaggcactttagaatgagaccttctcaaggtcaaaggccttgagtccagactgggaaagagcccaatgtgcggtgtgatttcaggggctgggaaggaagcctcctctccccaccaccaaacttgaaaaaaaaaatagttctaatctgatccttgggctgtgtttaaaat

SEQ ID NO: 11870 - DNA, 1105 bp, Homo sapiens
acgaagggtcatatcagattctgagagtgacattggtggctctgatgtggaatttaagccagacactaaggaggaaggaagcagtgatgaaataagcagtggagtgggggatagtgagagtgaaggcctgaacagccctgtcaaagttgctcgaaagcggaagagaatggtgactggaaatggctctcttaaaaggaaaagctctaggaaggaaacgccctcagccaccaaacaagcaactagcatttcatcagaaaccaagaatactttgagagctttctctgcccctcaaaattctgaatcccaagcccacgttagtggaggtggtgatgacagtagtcgccctactgtttggtatcatgaaactttagaatggcttaaggaggaaaagagaagagatgagcacaggaggaggcctgatcaccccgattttgatgcatctacactctatgtgcctgaggatttcctcaattcttgtactcctgggatgaggaagtggtggcagattaagtctcagaactttgatcttgtcatctgttacaaggtggggaaattttatgagctgtaccacatggatgctcttattggagtcagtgaactggggctggtattcatgaaaggcaactgggcccattctggctttcctgaaattgcatttggccgttattcagattccctggtgcagaagggctataaagtagcacgagtggaacagactgagactccagaaatgatggaggcacgatgtagaaagatggcacatatatccaagtatgatagagtggtgaggagggagatctgtaggatcattaccaagggtacacagacttacagtgtgctggaaggtgatccctctgagaactacagtaagtatcttcttagcctcaaagaaaaagaggaagattcttctggccatactcgtgcatatggtgtgtgctttgttgatacttcactgggaaagtttttcataggtcagttttcagatgatcgccattgttcgagatttaggactctagtggcacactatcccccagtacaagttttatttgaaaaaggaaatctctcaaaggaaactaaaacaattctaaagagttcattgtcctgt

SEQ ID NO: 11871 - DNA, 1168 bp, Homo sapiens
ggctactcagtaaaattcataatgttgggtctcccctgaagagtcagaaccacccagacagcagggctataatgtatgaagaaactacatacagcaagaagaagattattgattttctttctgctctggaaggattcaaagtaatgtgtaaaattatagggatcatggaagaagttgctgatggttttaagtctaaaatccttaagcaggtcatctctctgcagacaaaaaatcctgaaggtcgttttcctgatttgactgtagaattgaaccgatgggatacagcctttgaccatgaaaaggctcgaaagactggacttattactcccaaagcaggctttgactctgattatgaccaagctcttgctgacataagagaaaatgaacagagcctcctggaatacctagagaaacagcgcaacagaattggctgtaggaccatagtctattgggggattggtaggaaccgttaccagctggaaattcctgagaatttcaccactcgcaatttgccagaagaatacgagttgaaatctaccaagaagggctgtaaacgatactggaccaaaactattgaaaagaagttggctaatctcataaatgctgaagaacggagggatgtatcattgaaggactgcatgcggcgactgttctataactttgataaaaattacaaggactggcagtctgctgtagagtgtatcgcagtgttgggtaagactttgaacaagcttgttctcaggctttgataagtagtgctgtttgccagctgtatattatccctaaaaataagtaataaggtatatatggtacatattttgacatgcatatacatatttgcatcctgactaggctgcccacagcaatttaagttacttgaaactcgcttttatcttagtagccctttggcctttcttcagtttttttttttttttttttttttttgagacatggtcttgctctgttgcccaggctagaatatggtgacacaaccatggctactgcagcctcgacctcccaggcttaagtgatctttccacctcagcctcccaagtagctgagattacagatatgcaccaccatgcatggctaatatttaaatgtttgtagagagatggggtctcactgtgttgccaggactggtcttgaactcctgggctcaagtgat

SEQ ID NO: 11872 - DNA, 1098 bp, Homo sapiens
aagaactgcatagtctctctctcttttttttttttttgagatggagtttccctcttgttgcccaagctggagtgcaatggcacgatcttggctcactgcaacctctgcttccaggttcaagtgattctcctgcctcagcctctcgagtagctgggattacaggcgcatgccatcacgcccagctaattttttgtatttttagtagaagcggggtttcaccatgttaggctggtctcttaactcctgacctcaggtgatctgcttgcctcggcctcccaaagtgctgggattacaggcgtgagccaccgtgcccggccaataattgcatagtctcttaatgagatttaatcttttataccaatatgtgtagctcatgatagctatataacctagaagatgaatttatgtaatatgatttgcaaaatgagtattcatttgtgatttttttttttttaaggtgaaagtacattttttgttgaattaagtgaaactgccagcatactcatgcatgcaacagcacattctctggtgcttgtggatgaattaggtaagacattaaacttctcatttgaagactatctatcttaaaaacatttgtacaaataactatttttatagaagattatctgaagtacatttaaacaatatgaatgtttttagagcacgcactcaccattgtggcacagaccgatagttggagataaaaggtgatattgtgaaaggtttttgattacccattaattattaggccttacactgtttagttgtaataaaacatttgttatactacggggatgagaacactaataggaggactcaggaagtttatgaccttgagcgatactgtattttctttaaaagaaacctcactccccatgggctgctaagcagactcgtgtagctaaacaaggcctatttatagaatgcttttagacgtggatgtactaaccgatgttgcttttctgtcctagcatttttgttttaattccttttttgttttaattcctttgagttacttccttatgcatattttactttaacaggaagaggtactgcaacatttgatgggacggcaatagcaaatgcagttgttaaaga

SEQ ID NO: 11873 - DNA, 1100 bp, Homo sapiens
ggtcatagtaatatataaacagaatggaatgttttgcattaatgacatgtttgagaaaagtaatttaagcttttgctttttagatgtcatacttgtaacaccacagatcgaaatgccatatgtgtgaactgcattaagaagtgccatcagggacatgatgtagagtttattagacatgataggtatgtagcacacttgcttgatatattacccaattactttccccctcacttttctaatatttgggtttcattttgctttaggtttttctgtgactgtggtgctggaacactgtctaatccttgtacattagctggtgagcctacacatgatacagatacactatatgactctgctccacctatagaatctaatacattgcagcacaactgaattccttccctaaagaaaaagtcctgccattgtaacatcataacttaaaacacttttttggaagaagatttaaaatatttgcccatgctacaggaagagactgtattaaaaatggatacacaaggtcagttgacactatgaagctcaagctaccaaaaagaaagtggcaatatattgactcaggatctcaaagctgggtgttttagcattactgtgtaaagacttgaagggacagaagtgaagaaaataagctgcaattttgtacagataccaacttctgaaaagctggtgtttttacaactagcattgaatgcagtccaatttgcagtagtaatcttcaatagacaagcagctttgttgctgcctttatggacatgggtaccaattgcttttgtaatatggtaaaaatgtgagctagcacttctgcgttccttttgattttttttttttaacatgtattcagattgagaaatatgattttaatgctttaatctcatgtagtttgtttttaatttcaagcaaaatcttactgtacttgaatgtgccctgttttgttagcacacctagacttgctgtaactgtactcatgtcccagtatgtacgttctttctatgaaagagaaaacactaatcttaaattatatccagcaatgtttctggtatcctttaagaaaagttaagactattatttccttcccttccctgtgc

SEQ ID NO: 11874 - DNA, 1157 bp, Homo sapiens
agtttaagaatctaaagtattacattgataattgtttcctttgttgcagaactgtaagagtaaatgggtccagtaattggaatgactccagataagagagctgaaaccccaggagctgaaaagattgcaggattaagccagatttacaaaatgggaagcttgcctgaagctgttgatgctgccaggccgaaggccactctagtggacagtgagtcagcagatgatgaactcacaaacttgaactggcttcatgaaagcactaatcttctaacaaacttcagcctcggaagtgagggtcttccaattgttagtccattgtatgacatagagggagatgatgtgccatcctttggaccagcttgctaccagaacccagaaaaaaaatcagcgacttcaaagcccccatactcctttagtcttctcatttatatggccattgagcactctccaaataaatgtttgcctgtcaaagaaatttatagctggattctggaccattttccatattttgctactgcaccaacaggctggaagaattctgttcgacataatctgtccctgaataaatgttttcagaaagtggaaagaagccatggcaaggtcagtgtttatgaacattgctatatttggtgaggtggggggactaattaacatggagcccttaaaatatctggaaatcggggagacaataagtagtcaagtcaaattacttcagctgaactgaattatattcatttgttttcacttgagatgttttaaaatttcttaaatattgatataaatttagcagaattatgttttgtccactataggtacctagattagtctttttattattttagttctttgtttctagtttctgtagtgttcctataactatcagcatttgattctttattcaatatgataatctctgccttataatcaaagtatagaccatttaaattaatgaaattgatatggttgggtttaaatctatcaccttgctatttatttgattttcttttccacttttcctgccttttgtgggatgaggtgttcttcacttttggttttggtgttttggtgcttttttttttttttttttttttttgtgagacagtctcgatctgtcacccagcctggagtacagtggcgcgatctctgctcactgcaac

SEQ ID NO: 11875 - DNA, 1202 bp, Homo sapiens
attaacattctgtgtagggaggggaggcttattcaattcttctgacctcagaactggcagaaggtcagatgtgactacagaactctaggtgaaaaatcaggtagggttcaaattaagtagaactgcccttgccggaatagtgatcttcaaaaaacccttgcttttaggggagggaagcggggaaggaaaggaatgagggaggaaatattcctttctagcattcattttgcttagatcactccattgtgagtttgaccattttggagtcaaatgagcagacttccaaggagttgaccagtttgtgactagtctggtcacctttccagttacaggatcatattaactgtgtaaatgaattcatgggtagatgatttgtgcagatctgaatttaagaacatttcctttttctgtgggaatcacaagagtttatccactaaaaaaagatatgtaaaaaagatactttccagcacataaataaaggctggaattttacaacctgatgtatatattagacagttctaggatgttagttcccttcattccagagctatgcttgtgatacagccccttttcttataaagtcagttagaaggacttccttaacaatgactattataatgtcttacttaaaatacagttttgtattctgtcaatgcaaatataagacaggttgagccttaatcatgtaacaaaatattttgtagattacatattgatttttcaaaaattaaaaatgtatttcaaactattcttactgtgctgtgaatttatatcttcttctgcaagacctggggctatttttttttcttaaggtatgaaatcaatttcaataaccttaaacaattgaccctctgtcaggcatatgtcaggctccactcttaaggagtcagtgaccatgacctctttgcatatcctggaaaaatgacatcatcaaagtatagttgataatgttataaaggatgattttaaaaatagggtataatcatgactcacaaagatatgaggctgggtgtggtggctcacgcctgtaatcccagctctttgggaggctgaagcgggtggatcatgaggtcagaagatcaagaccatactggctaacacggtgaaaccccgtctctactaaaaatacaaaaaaaaaaaaaaaaaaaaaaaaaaaattagttgggcgtggtggcgggcgcctatagtcccagctactgggg

SEQ ID NO: 11876 - DNA, 1223 bp, Homo sapiens
tggacctggactggctagaagacactctgtggcaaaagaacagctgaaggccctagagaaaaccaggtacagagacaaggaaaatggggagccaaagaccaagcagctcagagaagaggaggaggaaagcaagaagctcagggaattcaggctgcagaaccatgtcccagaggatgaggacctgaaaaggaggagggtttccaggccaaaccagttgcagtggaggagaagatgaaggagaagctgtaggcagccaaggcacagcctgtcattgaggagacggacctggccaaccttgtactctagaagcctgattgggacctaagagagatgcgggcaagaacctggagaaactaaacaaaaagacttggagggccattgccgagctgatccgtgggaggctaaaaggcccaaatgacagcctagtctctacaggggaagccaccactgaacaagaggcctgtgacaactgaagtgtgccctgtctctgtcttgctcccattaggaatgtcctgtaggtggatggtcttgggcagagatgggggctgggttgctgtcacctccagtttggcttctgagcagtgactccctgctccctaatgtctgaaatttccagtgaagtcaccttcttgtctcctgcgtggtctctgctgttcttggggaggggcagtgaggagagccagcaacaactctctgaatgtgcctttgtctgtacatatgtatttgaactttttttaatctctagaaataaacacaagtaaactcccccatctggcagaaatctgtgaaatatttcctaggtcaagcagtgctgtgggtttgggctccaagacagggtggcttcagaggtggtgcttactacgaataatccctgtttagggcttgccatgttgaagctggaggggtggggaagacacagggctgaccttctgggtccaagttctggtccagtccatggtcagtggtggtcatctcaaaacccttgggtgatagagacagggtatgagagttcttttaagacttcccccaggtctaggcttttcagtagtctgaaggacagctgaagaggctcccatcctggttctgtgtggagtcgtacacagtataagaaaaagaaggaacactgggccttgccaagccccaatttgaggccacttaagatttgaggcccctggcactgcttttcctcactctgcctagccccaggcagcccctccctctat

SEQ ID NO: 11877 - DNA, 1187 bp, Homo sapiens
aaatttttactaattggaaaagaaaaactagttggtactttaagaaggaaaatagtgcattttcttgatgccagtttatacttagtagaatgatgttttaaataatttattaaaccctaaaatatctaacataaaatttgaattttgggggttaaggtggtgctagtaaggtaataaaattaaaagagcaccttttctgtttacatataggaacattaattttgtttcaaatgtatttaaagacctttttattaagcaataataagtgtaacattctggagtaaatatatagcatgtaatagtttaatgttgttggtagaaggtacaccctagacagaaatatttctttaaatgaatcagttggtaattctgaaaaaaattgtgctatagaaatgttgcctacatttatgcacatatacaaacactaaattctcctgaatttgtgtatttatagaatcttggacttgttaataccacttactaaccgggcctgtgacactgggctaaacaaagtaagccctgtttactcagcagtgtttgggggacatgaagattgcctagaaatattactccggaatggctacagcccagacgcccaggcgtgccttgtttttggattcagttctcctgtgtgcatggctttccaaaaggagtatgtatatttgctatgtttttattttttattcttttttgctgtatggagatgtgttttgaagtgactttctttcacgatgaaacttagtatctctgttagtgctaaattgctatcttggaacacaaataggaaaaaaactatgatgtttcagtcaagctgaagcagaaatgaggtgataatatcacattgttttccttccttctttggatctggattatatttttagtgtagcaatcttagggaatacgtacaatttaagtagacgcagaaatttgctgatatttttggtcttcaaaacaattcaagaattaaaaatggggctttatcaagtaaggcagtgactgcttcaggtcatttaccgtttcaaatttataagatataagcctaaaaattaaactttagttttatagatattattgtgtttttaatgtatttggtggatagcattaaaaaaaattttttttttttgagacagggtctcactctgtggcccgggctggagtgcagtggcaccatcttgactcattgcaac

SEQ ID NO: 11878 - DNA, 1187 bp, Homo sapiens; identical to SEQ ID NO: 11877

SEQ ID NO: 11879 - DNA, 1187 bp, Homo sapiens
tgatagtttgcatttttctttttaaatgtttacttattgggccccagaatgcttgttggaggagggattggaatgaaatgtatccttcattgaataggatttttgttttagcttaaaaatgaattctaagatatgaatcacttgttttcttgctgacgtagaggcaagacctttttatttttgatagagacagggtctcactatgttgcccaggctggtctcaaacacgtggcctcaagcaatcctctggccacagcttcctaaattgctgggattccaggcatgagctaccctgtcagtttagcgaagacaatttaaatgattaccaagaagttagcaaagtaaatatgtttatataacaacatccaacattcagtgaagagggaaaagcttaccgtgctacgaaacccttttatggtagttcctttgaaatttgtgttgatttttttaagtattagggttatctgttaaatgttttattttgtacccttaggtgcaaatgtcaattgtcaagccttggacaaagctacacccttgttcattgctgctcaagagggacacacaaaatgtgtggagcttttgctctccagtggggcagatcctgatctttactgtaatgaggacagttggcagttacctattcatgcagctgcacaaatgggccatacaaagtaagtgttaaaaacagaaaataaacatggtctcttaatcaaaagctaataaagaataaatctgggctagacccttcacctctaggcaaagtctttgatattctcttccctaccaatctgctgggtgaacagatctacccctaatctgtccttcatgctgtcttttgctcctactattcctgcactttcatattgtgaggcagaattgctacagactgggtaggctcagggactttctcggggtgttgactcttcccattgatttctctagttatggctgtatccgccgcctcctcctccctagttttatcccaggcatctttaagcatcaatctgatgaggccatccatgttacctctctgaccccagaaagcttttgagtttgtgatgcctgttggagtgtgtgctaagtagtcctccctgtcttaaaccctttgactgaacttttcttgatctaacctcaaattggagagagagtaaatgggggttccaggaatcttagaagctagtaacttg

SEQ ID NO: 11880 - DNA, 1187 bp, Homo sapiens; identical to SEQ ID NO: 11879

SEQ ID NO: 11881 - DNA, 3103 bp, Homo sapiens
ctggagtacagtggtgcgatcttggctcactgcagcctctgcttccctggtcaaatgattctcatgcctcagcttctgggtatctgtgacttcacatgccatcacacccagctaatttttgtatttttagcagagacagggtttcgccacgttggccaagctgttcttgaactcctgacctcaggtcatccacccgccctggtctctcagtgtgctgggattataggcatgaaccaccatgcctggccaccagctgatttttaaaaattatttttggagagacaggttctcactttattgccctggctggtctcaaattcctggcctcaagtgatcctcctaccttggcctcccaaagtgctgggattacaggtatgagccactgtgcccagctgacaaattcttaaatacagaattatttttagtttagcctcaaaatcaagtatttgatgtgtttacatgtagattcattttaaatgcagaaattcacatattgaaaacaacacaattgaaaactaattttatctcactgtaacaagtgcattagagacatatatatatttgcacaaatgttgctattctctttgcagagttggtcaaacgccatgctggggtgctaggacttggtgcatgtgttctttctagtccttacgatgttcccacctggatgccccagctcctcatgaatctcagtgcacatctaaatgatcctcagcctattgaggtacagttcttccttattagtttgtacgtgtattatcagtgatgttttctaagaaaccataataataatttcctatacactctgaactaactgctttcataaagctgctgcctctgccaaggcttagtctgctcaccagtaattattaaaaaattacagagaccttgctgccatggatatttgagatcttttggtagtgaggaaattattgtagcttctatccctcccagtccaatggaagtaaagtactgtcaatattgttgtgataaattttatgtttctatttttctagcactgcaaagtattttactggaagctaatattaaataggaaattatgatggcatttttagtaactcaaaagaccattcactttgtccttctcattggctttttggttttgtagaacttggtattgtgtgagatctgaagtctagagggacggtaatttaactaaaagtatcctacatatgatcctggttgtccagagaggttaaaacgtatgtgggttgtctactttacagatgactgtaaaaaaaaccttatccaatttccgaaggactcaccatgacaactggcaggaacataaacagcaattcactgatgaccaactgcttgttctcaccgatcttcttgtgtcaccatgctattatgcatagaaaggtaagtcagcaaagttctgaatttacattggtttggtgactgagaactagatatttattgttttttttctttttgctgacattcttagatgtcagtgtttagataaagttggatggcggggattgtttgtttttaaacatggcttttgctacggccattggaaatgagaattttgctgtgcctccttgctttaggtttaaagcagagaaaatgtgtgactgcttttggacctttgtagatgagtggtgtcagcctgggaatagttagataaaggaaaatacatcttattcttggttgcctcctgggtggggctgggacattttgtgtggccctgaggactctgggttctaaaagttgtgagaacttgatctggattcttacacccattctgttaaagagggagtacccagaagcctttctactggaataggaagaataaaaatttcatttattaggcttttagagttggatgtcttgttacctaattgaaattttttcctccctgatacagatgactagtcctcacttcaggctcttttcatcaaaaattccacaccctcaggtaccatctgtggtggctctctgcaagttttaaaactgcctctgctgagctctcatcattttggtggtttctgtgttagatctcgttagtctgcattccacagcttctcagttgccatttgatttcccaacttgtccggaagtgtttccagaatactgatcactttttttttttgaggcatctgacaaagtcacaaagtctcagactagaaataattacccagtatgatcatggcatccaagaccagagtctcagaactcattaagaaacagtttacttggaatggagaatacccatctgtaatacaggtcctgtcatttcattcatctcaaattattttgaattcttcccaaatggctgctggatttaggtggtaataggggctgtgggccataaatctgaagccttgagaaccttgggtctggagagccatgaagagggaaggaaaagagggcaagtcctgaacctaaccaatgacctgatggattgctcgaccaagacacagaagtgaagtctgtgtctgtgcacttcccacagactggagtttttggtgctgaatagagccagttgctaaaaaattgggggtttggtgaagaaatctgattgttgtgtgtattcaatgtgtgattttaaaaataaacagcaacaacaataaaaaccctgactggctgttttttccctgtattctttacaactattttttgaccctctgaaaattattatacttcacctaaatggaagactgctgtgtttgtggaaattttgtaattttttaatttattttattctctctccctttttattttgcctgcagaatcgttgagagactaataaggcttaatatttaattgatttgtttaatatgttatataaatgtaaaagagtgtataaactgtagagatagcattggcaagacattgtacagatgcaaccttttacacaacatcattgtgtaatttgtaaagattcacgtgtagttctttattatagtgattttgggctttgtacccactgaatgccattttttgtgtttttaaattattttctttatcttgttacaaaaactgagatgtggggttttttttttttcagttcacttatcattagaatgtctgaacttttatgtaacatttttgtgtgcatctctcaatgcta

SEQ ID NO: 11882 - DNA, 1168 bp, Homo sapiens
ccaaactcacccaggtttacaaaaatgtcagagaaagaataggaaggtaggtactgttttctctgtggtgtacctctcgagttctttgtttgtttttttttaaattgtaataggtaataatacatgctggttatgttgtcagtgggtttcatggtgtctttctcaaattgtttgctattgtgtcgtgggaaacaagatgaaacactctgaatgtaaactaggacagcagtgtgctcagaagccagagatgagcagtcacaacacctaagtgttaataccccttaattataaggcttcttttacacacaggcataatctaagacccactccaggaattgtcttgggacagtttactttgattgggtcataacttttgaacctcatttttatttataatgtggcacctcttcctattattaagtattttattttgcagtgtgctgacctacatattcatgatagatgtatctttgccaaataccacaccaaccatatcgcctcatgtccctgagtttactgctcgaattctggagaaattgaaacctctcatggatgtggatgaagaaattcagaaccatgttatggaagaaaatggaattggtgaagaagatgagcgaactcagggcattaaactcttgaaaaccagtgagtggataaaattagtagaaactcagttgaaaacatctatttgattatcctgtagagttttttgcaccactttttttattgtggtaaaatagacataatgaaaaatttactgttttaaccatttttaagtgtacagttcagtggcattaagtacattcacatccttgcgcaaccatcatcaccatttatctctagaatcctcttcatcatacgaaactgaaactttgtaccctttaacaacagctcctcattttccctcccctcatcctttataaccactgtctactttccatctctgaatttgcccattctaggtaggtcacataagttgaatcataagtcttttttgtgtctggcttatttcatgttacatagtattttcaagttgaatgaatgaatttctgaatcatgttgtgtccttaatctgttacccattcatctgtttgctggatatttgggtttccacctttggctattgtgactaatgctgctctgaacattgatgtttgtataagtacct

SEQ ID NO: 11883 - DNA, 1175 bp, Homo sapiens
gacaagcctccttctgaatactttcctatcaaggcaagcattttcagtactttaggattcaagaatatgttgattttttgttttaagggattcaaagtgttattttttcttgcatatgttagttttttacttttaagatagattattgaaactattattggaatatgtgaaacttgtgctgtctcactttgcatggaactgaaactctagttttctttcctattgatatgtgaaacaacttcgtatatattccttatctaatgtctatagttcaatataattttattgctaaactaagcctcacttaaactcatcatcactcttacagtatcactcttagagcaaactcatattataatgagtactcttcggggagacttttttcaggagtgataacgaagaggcagtaagatgttgttttcatgctacttttttgtatatcatttgctaccttaggtttggattatgtgtacattttcttttaaattttaaaaattgtgtatatgtatgtgggtttgttgttgttgtttttaatttctcaacttgctgagtagatgctgttctcttctaggactggggcaaacccggggacttgtggaatctgggaatccagtggcatgttccttcttcagaagaagtgtcttttgccttttatcttttggactcctttcttcagcctgagctcgtcaaactccagcattgtggggatggaaaacttgaaatgtctaggttggttttattttataattagagttattcagttgcagactaaagaagtcttttttggctttatctgtggcatatctcatgtattaattttcaattgtgttttgaaaatctgctatacatgtacttagaaaatcatttaatataatgttgtataacagaaaatttaacaacatttaaacattttaaacccaaaaattgtgggtttctttttctaattttttttattaccttctacttagcaatttcacttgtcttttggaaggtgtgtgtagatatgcctcctttgaaaggaatgcctgttttcctagactcagctaagattttattgggttctcaaaattttattttaagaattatttttatgagatttttttttccctctcccacaggtatttaacaagaaataagtatttgaaaccattagactttcatagtttgaaagtttc

SEQ ID NO: 11884 - DNA, 1182 bp, Homo sapiens
aaaatataatcttgtatatatttgcctttcaaaaaagccttacttatacaaatacattttcagtgctgcccagaagaatctttgaagctctttgttccccactgctgcagtgttataactcagcttacaatgagtaagtcataaggtcattattctctctttacaattttggataagtttttttcttggtttctaaaactctgttaatgacaacagattcctttagcttcacaatattttgattggcaatttggggaaaatttgtctccaaaaaagatatcatccaggttggcagtagcttaaaaatgttactttattaatattcttatacaaccaccattcagaggttaccttcaaaaatatcagttattttgtgagatatagaggggcagaagtcttggttggtgtgtttattttcttgaaaattctgtttctacctccttttggaacaagctcagcttcatgaagaagaaataaaaagtcttcctaaaagaggttttcctcagctattggaaatattaaatagaagtattttaaaatgctatatttagttgaatgcataggtttttccccctaatagtattttgctgtttttagatgatgatgtattaaatgatgaagagctagacaaggaattactatggaatcttcaacttttgtctgaggtattgtaaatctttggaataagaaacatgactgtgaaaacactgacttgcttttaggatttagctctttctgacaaaatgactttaaaacatatgaaaagtcagagttttggaaatttgatgaggcttcagaagatcagaatatgtcatactcttattgtcaaaggagtggtgtagttgatcactgcatgttcagccatctacttagttttaccagttaattctaatatgggtaactcattaattgaaaaagttgatcagatttgggaatttttttggtctacactttaaatttggccatcaatcaaacttcagttttcttttcttttcttttcttttcttttttcttctttttgtctcactatcgcccacgctggagtgcagtggtgcaatctcggctcactgcaaactccgcctcccagcttcacgccattctcctgcctcagcctcccaagtagctgggactacaggcatccgccaccacgcccggctaattttttgtatttttagtagagac

SEQ ID NO: 11885 - DNA, 1236 bp, Homo sapiens
ttcctagaaaggttaaggagaaaagcatgccccatcccacttctcctcccatttcccactcttgaaatagcattgttagcatctgatgtgagccagaggagtatttgaggctgtgccatatgtccttgttagaaacactgagcttataatgactaagaaactccagggggttgtctaaaccaccaaggttataaagggcacagcatcatcacagctgaactaaaatttaatatgattcttactttaccacccatggtgacctaagaaggtggtaagggggacaaactctaaatagagggctcagttgtggctcaccaagaagctaaatatgctgttttcatggtagaatagggaagaagaaactggtaaatatttccaaatgtcatgtgtttacatatgaatctattcacttctttatttttaaaattcttctgagaagtactttagaagtaatccctaaatttaaagtatttataacaaaaattttacatattctcaccagtttagagcattacccagaaggaattgtgactccatggtccaggggattagagttagtcattaggggtgggaatttcttctcagaacgaagttagagctctgtaaccatcttatgtgaccaagtagatgtttgagaaagatctggaattaacgtaatgaaggtgagtagcactgagaatgcccatagagtctgtagcttagatgggggtgggtgtcaccatgatcttagtgttgcactttttggaaactaggtttaggtgaggaatgaagtcacaatcccctaagaagggaataatgaataaactagttatatcagcttattactttagagtagaaaacagacctcatgcaggaatcattctgcatatgtggtgaagccttcttggtgagcagacaaacaaaaaagaaaattcactttttctaaaaaaatagcacatcagacctttgtagcctggagaactcattcttctctactttagaggtgtttctttttctaataactgggaagggctgtctctaaccggagctcctgtaccacccctaaagatatcaataatttctcattctccaacttttagttttcccatttttattggtcctcaaaactttgtctttgcggcactccctgcctcatcatacttgtgacaagttgaattcctaagactcaggctcgtattacaaaggatgcaatttagatgagcaactccctggtgagatgagtggctctctggcaaa

SEQ ID NO: 11886 - DNA, 1252 bp, Homo sapiens
tcttctgatttgatggttgtgttccctgttttcattttgagccaagcttaagggttgccagcaggtggcaaacctaattttacattccaagtaatcagaaaatcctcacaggtgttttgtcatgcacctgcaaaaaaaaaaaattgtatggatggcagcagtagcgctgaaattctccatgaaaattggattctctcttccctgaacttaaacaaatgctcatttgtaaactatatagctccacaactattctctaaagaggaatcagttatcatccccttaagtaaactttttttctgtggccgttaggtaaataccgtccttggacttaatgagtacatgtgtttgttaatgttctgctctgagcgggagagcattgcatgaatgggcacatgtgactaggcagtaactcggggttcatctctactctgttgggtgatgtgtctctacctctgctctcctgtttctagcctaaacccaccaagggacgaatgcgcatccactgcttagagaatgtggacaaggcccttcagttcctgaaggagcagagagtccatcttgagaacatggggtcccatgacatcgtggatggaaaccaccggctgacccttggcctcatctggaccatcatcctgcgcttccaggtaagggtctctgcccagggttgctcagaacttaggccgacctctcaggtatgagcattgttatagagctggcctccctgtatcagagggatcgggaagaccaggttgaaagcatgtctcagagtcatgtgtgtcatatccagccctcagaattgaatgctgcctcgtaggcacgtggaagctactacatcctcctgcaattgtactagccctggtaatcttagctttcctgtcagacacatctcagcggcccaggggcttctaggctgcatcccagcccgccactttgctggcacctgctctaaacatctggtctctgctgcttggctctcaggagcaaaggtataaggacgtggccaatgctaggttattagcttagactgcctcaacttcactcaactatgacatgtgttacagaacattttttggcaaagctgttgagggttatggcatgtgtgtgggctccattttcaccttctcattctctttggatgtgaggaagcagtttgcaggaggaaagtacaaaactcttgtgtttctttgaattgatgatgctttatgggttttgttatacttgaggaggaaggctctaagtatagaagtatttt

SEQ ID NO: 11887 - DNA, 1125 bp, Homo sapiens
gagggcatctaagctcaaggcagagaccagtggggtgggggactcaggagtcagatttggctttaagaccaccagggattaatgtgtgctcaagatttcatgtctgttctttttccttttttggagggggggtggcgcgggaaataggttttttggttttgtttttgttttgtttttgaggcagagtttcactcttgtcattcaggctggagtgcagtggcgcaatctcggctcactgcaacctctgcttcccaggttcaagcgattttcctgccttagcctaccaagtagctggcattacaggcacgtgccaccacgcccggctaatttttgtatttttagtagagacagggtttcacaatgttggccaggctagtctcgaactcctgacctcaagtgatctgcccgcctcggcctcccaaagtgctgggattacaagcatgagctactgtgcccgggtggattttttattttccttcttttcattccgtttctctgtaggacaactttgggtttgaccttcctgcagttgaggccgccacaaaaaagcacgaggccattgagacagacattgccgcatacgaggagcgtgtgcaggctgtggtagccgtggccagggagctcgaggccgagaattaccacgacatcaagcgcatcacagcgaggaaggacaatgtcatccggctctgggaatacctactggaactgctcagggcccggagacagcggctcgagatgaacctggggctgcagaagatattccaggaaatgctctacattatggactggatggatgaaatgaaggtaaaacctgaccgaaaggaaggacgacagagctgatccaaccagggctctcttttctgtgactcattcactaaacccctacgtacagctgtgtgccttgtctaactgcccacatgtacagctagagaggagccacatcacccatgggaagattgctagctcaggaattaaatgagacgtgaagtgtgaaaaagttgtagagaccagttcagtagccagagctctgtttctgtgacttagatatattccagtgtagggaatcaatcacattgtggttttctttatttttaagttttcagggttaaactaacttaccgtttc

SEQ ID NO: 11888 - DNA, 2025 bp, Homo sapiens
aattgatacatcctttccttaaatacgcaaatgctgcctttgctttgagtggcttggtgtttggcagtgagactttgtcatacctcagtctctctggccatgcaccgacaccctggtgtggctgttccagcagctcctggctttcacagctggttgcatatacctctctttggaggatgtttagaatgatttggttatgcttcgtgtatttctagaaacaattatatgcagctgcctttttcatatgattcaagtgctttcttgcaggaggatgatcactttgtctgcggtttggccaaaaaaaaataatgtttatcattgccctcactcctgttctagtcaagttgttagaaggtgctccattgccttatcgcatggccctgcatttacatttagcagtgagctggtaatcataagaatatggggtgtagcttactgcctgccagtgagcctgcacccatgctgagctccctcacacagccacgttccttccttgatgttaaacaggttacaagccctgtgacccccaggtgatccgagaccgcgtggcccacatggagttctgttatcaagagctttgccagctggcggctgagcgcagggcccgtctggaagagtcccgccgcctctggaagttcttctgggagatggcagaagaggaaggctggatacgggagaaggagaagatcctgtcctcggacgattacgggaaagacctgaccagcgtcatgcgcctgctcagcaagcaccgggcgttcgaggacgagatgagcggccgcagtggccactttgagcaggccatcaaggaaggcgaagacatgatcgcggaggagcacttcgggtcggagaagatccgtgagaggatcatttacatccgggagcagtgggccaacctagagcagctctcggccattcggaagaagcgcctggaggaggcctccctgctgcaccagttccaggcagatgctgatgacattgatgcctggatgctggacatcctcaagattgtctccagcagcgacgtgggccacgatgagtattccacacagtctctggtcaagaaacacaaggacgtggcggaagagatcgccaattacaggcccacccttgacacgctgcacgaacaagccagcgccctcccccaggagcatgccgagtctccagacgtgaggggcaggctgtcgggcatcgaggagcggtataaggaggtggcagagctgacgcggctgcggaagcaggcactccaggacactctggccctgtacaagatgttcagcgaggctgatgcctgtgagctctggatcgacgagaaggagcagtggctcaacaacatgcagatcccagagaagctggaggatctggaggtcatccagcacaggtgagcggggcgctggtcagccactggcctgttccttgtgaccaccagtggcccaggaggtgaccaccctgtcaaattgccatttcagatttgagagcctagaaccagaaatgaacaaccaggcttcccgggttgcagtggtgaaccagattgcacgccagctgatgcacagcggccacccaagtgagaaggaaatcaaagcccagcaggacaaactcaacacaaggtgagcacgtggccagcagtgtgccagcctcccacgtgtgggactggggagggtgaggtcactcatcgagctttgctgttgggaatttcccacatggggtcatcgacattgcaacactgatgtcatggcattggcacctgccttttgacatgtccttgttttgtaagaagtgtctctcagggcaacatcattggttgcaggaggattatctgagtcagcccagcatctgcccctcgccacaccaaagttagggccttggtttgacctgtgtccagtgtagaaggtattaagatgacacctgtgctatccattttatagtaacttcaggaacaggactctagcatgtttaacacttaatttgccaatgaaagtcctgattgtcagggcagacctttgttccagtcttatctttctgttgagt

SEQ ID NO: 11889 - DNA, 1148 bp, Homo sapiens
agaagccattgtggttcatcctgattacttgaacgttgcacttggtggaccgtgcctgggagcgctcgcatgccccctggcttcagaagtcatgtcagtgtctctgtagacaaactccactgtacatcttggattaatcttctgattcattgttcattttctcaagactttttgtggaattctctgataaaggaagcttttaggatggtatctatcaggccaccagcaggaattgaaaatgttttcacaaaaatccttttccttagaaataaaagctggtgacagagatggtttccttgtaccgataaaaacaaaaccaaatccatattatacatcaaaaccttgtgagacattcacttgctcttttgccatatttagatgtgtcagtggaatcagaaacctgttttgatatgtgttctctatgagttaagtctgatttgtctttttatttcatgatgcatgtcttttttttcttttgtcaggataacgtcatatagcatcttgtttgtttttccttatctctatgtacatatctatctacttctgactgtagatgggtatatagatagatgccaagcttcttatgttctgggggtagtatgcatcattattgggtctctgccttaaaacacatcaaaattcattttagacaaaaaaacttctgctttgtctttggtcattagggagctctaatgtgtgtttgtggctccaagttacattttgtgtttcattgatctatatgtatatatgtgatgttttcatatatatatgtgtgtgtgtttaaattttgtatcatcaggactgacacccaatttgacactttttgtatctagaagaccctccaaaaaaggaaccacataagcacacaagaaaagagtgctatgatgttcttagcatttgctatcatgcctatttttatctagatttttaaatgtagcttgtcataacaaaattttaattacaattggcttgtatgagaagaaaaagtatttttattgttttgagtgatgacgcagagactcagtgaacttgaaaatagcattgcttcgtgcactttgaataccaatcaggtgttttctgtgctactagttgtcacgttgcattcatgttcacctcctgatttaagtatctcgggtgtgcccagccac

SEQ ID NO: 11890 - DNA, 1939 bp, Homo sapiens
tggccagatgcgccattcccaagccttggagccagaacccctcatgcctactcttagttgagtctcacctgtgtcccttcctctgtccaggaggaaatgaacacatggatccaggctatctcttccgccatctcctctgataaacacgaggtgtctgccagcacccagagcacgccagcatccagccgcgcgcagaccctccccaccagcgtcgtcaccatcaccagcgagtccagtcccggcaagcgggaaaaggacaaagagaaagacaaagagaagcggttcagcctttttggcaaaaagaaatgaactcctttccttcacctcctgcccttctcttaccttttcagtgaaattccagcatgcaagctcagaaccaacacattactctctgtgcctaatgttcctcaatgtggttgatttttttttttttttaatttatagagcatttcggggggggtgggggaaacacacctaaacactttatctccaagttacaaaagtttgaggtgcagagggaaggccagattttttttttaatgaaattatatagattagatctcagtatttaaactgttcctcaattttgtgaggctgtgttggaaataacccgcctctagtgctgttggtatgcaaggcagcggtgcttaatcaatatttcctgtgctcaccagaggcaaaatgtaccaatatcctgacaccattctctctccatttacttctggtggttaccctgactcttgactcttagaagtgcccgagatggggctaacctttattaaacagatcgcatattatgatcttgctgcagccacagtgcagctccacattaactctacagaccaaaccatttgtatctggcatcacttactaacacacgacatgcggcttttctgcatcaactgctatgacggttaagaatgtcagtatacaagaaggaatagaaaactgatactgttttaaataatctgtaatttcaattttttttttttgctgaaatacattatattgtacgtttgagataattctagtacaaagtataataaaactagatgtataataaaccctttaaatcattggtaagtgtacaagtggtggaactgaagcatttactggacaaagtaatgttactctaatggttacttgctcgtgcgttgccacactgtgttataatttgcttcatttccttgctatttgatacatagtgtgcatttctctgtcactgtaactattgtaatgacaaattttcatcttactgcacaatcaaaatgacattgataggaatgaactccagaggctgggcctgaacagggaggtggtcgctcaggcctggtgctcagtcgtacgacctgtacctctcaacttttgccctatctgttaaatatatgctatgtcattaaatgcttttaaatctagcacggtgactagttgttgttcttcctctgctgcgtgtgcatgcccagtagggaaactgcaaagggagaaatgacaaacaagaaacattttacaaccagtctgggctcacttttgcattttttatgcatgtctggtgcacaagctttgaaaactacagcaaacagtaataaatgtgactgttttgtagttatacattcaggctttatcttttatttatgaaaaagttaccagagcacttgtgaaacctgaactctgagataggggttggcaaatttgttctgtaaagggacagagatagtaaatattttaggctttgtaggccgtaactgtctctgttgctcaattctgctgttgcgtaatacaaaggcagccattgacggtatgtgaatgcctgggcatggctgtgttccagtaaaactatttaaggacataaatttgaatttcatataactttgacatgccatacaatattttgattttcttaatgatttcaaaatgtaaagtctattttatacagatcaga

SEQ ID NO: 11891 - DNA, 1890 bp, Homo sapiens
aaggtgtgctggattgtgagaacagtattttcatattgcaggcataatgagtaacaaatctctatcagaccttaagtgtgacttcagagttgccaaaagattgtttttctaacatttggaccattcgtttctgggtttattatgtgtttaaggctttgtttaaatctaattcatgaggccaaggtggcaaaattatagcttagaattaggcagctttaaggatttcatttattgtattagctgaataacatacaagtagttcttggaagatggtattttaagcagcagcaaacaaaactgatatttacattgactttttcattttcagaatccaagcaaaaatccctggattgaagcgcaaagctgaatgaaaacgcccaaaataattagtaggagttcatctttaaaggggatattcatttgattatacgggggagggtcagggaagaacgaaccttgacgttgcagtgcagtttcacagatcgttgttagatctttatttttagccatgcactgttgtgaggaaaaattacctgtcttgactgccatgtgttcatcatcttaagtattgtaagctgctatgtatggatttaaaccgtaatcatatctttttcctatctatctgaggcactggtggaataaaaaacctgtatattttactttgttgcagatagtcttgccgcatcttggcaagttgcagagatggtggagctagaaaaaaaaaaaaaaaagcccttttcagtttgtgcactgtgtatggtccgtgtagattgatgcagattttctgaaatgaaatgtttgtttagacgagatcataccggtaaagcaggaatgacaaagcttgcttttctggtatgttctaggtgtattgtgacttttactgttatattaattgccaatataagtaaatatagattatatatgtatagtgtttcacaaagcttagacctttaccttccagccaccccacagtgcttgatatttcagagtcagtcattggttatacatgtgtagttccaaagcacataagctagaagaagaaatatttctaggagcactaccatctgttttcaacatgaaatgccacacacatagaactccaacatcaatttcattgcacagactgactgtagttaattttgtcacagaatctatggactgaatctaatgcttccaaaaatgttgtttgtttgcaaatatcaaacattgttatgcaagaaattattaattacaaaatgaagatttataccattgtggtttaagctgtactgaactaaatctgtggaatgcattgtgaactgtaaaagcaaagtatcaataaagcttatagacttaaaatatgctttggtattttcatttcatgaaattgcagcagattaaaaatgcacacagtgggtaaactgcttcaaccagcgaatggtagcttgtgcttttagaagggtttttttcagctgatggtgcagctgtttgtttgtttactgtggaaacaaaagtcaacaaatgtgtttacataatcaaattttatttgacacataaaatgtttaagtgatgtgttttatactttgaaaataaattcatgcaccaatgttttaactcacatatatcatacagtgcaggatttatgaacatacataaaatcaaaatcataccatataaacgtttacaaataagtttttcatgacacacggacactattgctctttaaatatggttgtacatgtcatcattaatcgattcattgttcttccacatggttatttcaatgcaagatccgatcagcatgaagagtctagtacaagataggcagacatggttatcactctgcatcaccagtcacatggttacagaaaacagaattgggactgcatagggactctactgcgggcccaa

SEQ ID NO: 11892 - DNA, 1181 bp, Homo sapiens
tattgaacaatttcccctaaaggttagtctgagagagtttaggatttggaaatgaaaaagatctttgttaggaaaacgtgatgagacaacatagtgtcaactttaagaaaaaaaaaaaaacaaccatagtcataactaccatttactgagtgcatccttgtgctcagttgcattaggcacttttctcactgaattctcatgataatctccactttataaatgaggaaactaagtttagagggaagaataaataactttgcaaaattacctagccaggtaagtggcagagcatcagattcaagcccagatcagtctggcttcaaagtgtatgctttttctgtgctagtcagcagacagtgcatatcaaggaaataccccttactgctgagtttttatattgcccctaatttggaaacagttggcttttatagtagaatattttcttaatttcttacagatatataatttctgattgacatttaggggaaaatcactccaattagtgacaattatgatgtgttttgttttctagggcatatctggaatctgaagttgctatatctgaggagttggttcagaagtacagtaattctgctcttggtcatgtgaactgcacgataaaggaactcaggcgcctcttcttagttgatgatttagttgattctctgaaggtaagtttattttgcctttcatttttgatatacccagaatttagtatcaagagagttgagtgtaaaattctgttcttctatattcaagtaaatgataaatattaattaaatcacatggctgtaaacttgtgttttaaaattcagaatccaatcaaataaggatgaagaagtgctattccctttttttttctggtcatacttaatacagagagtcctgtattcctttttaaaggagaataagttataaatcatacttgtgggccgggtgtggtggctcacacctgtaatcctagcactttgggaggccgaggcgggtggattacctgaggtcaggagtttgagactagcctggccaacatggagaaaccccgtctctactaaaaatacaaaattagccaggcgtggtggtgcatgcctgtaatcccagctactcaggaagctgaggcacaggagaatcgcttgaacccgggaggcagaggtttcggtgagctgaggtcacgccattgcatt

SEQ ID NO: 11893 - DNA, 1191 bp, Homo sapiens
acctcaggtgatccacctgcctcagcctcccacagtgctgggattacaggcatgaaccaccgcacccagcccccaagattattttaagtaactccttgttttggattagaagtcttctaggctttggagacatttaatcattgtgtatggctagaatgatttggttatgcagaaataaatttgaataaaaaacatttcgtggtcaaaaataaaggtgttatactaatatacaactaagagtgggtttaaaatgtgggttataaagttagtgtttctttaacttagtgtttctttaaatttttaggtttgattttactttatgtagtagcgtttttgttttcatagatggagcaaatccaaattgataaaataacattctaatttcagatttctttttcaatttttagttgttgacctcctgtactggagagacattaagaagactggagtggtgtttggtgccagcctattcctgctgctttcattgacagtattcagcattgtgagcgtaacagcctacattgccttggccctgctctctgtgaccatcagctttaggatatacaagggtgtgatccaagctatccagaaatcagatgaaggccacccattcaggtgagatgtctggaaaacaaggcatgcattggcaatagtgtaaacaggattggtattaagacttcatctactgtctatagagttacaagcatgcatttttttgttaaagataattgcagttatttgcttgagctataccaaaaacatctgcttttgagattttctaaaagtcgttttaaaggctcatgatggaggagactgtttatgtatcattaaactaactctgctacttgttaggaatatttattagagttaagcattggttatcttacttgaatgagtgttgtatctttttaacatgggtaggtttgatgaggatattctttattgctttttatgctgtctgataacgtgctttctgatatttcgtatctttctagtatgctgatgttttctgttatgcttttctttatgtattttctttatctagtttcttctcgtttcttaaggctttactttttaattattttttggagagctttatttcagcatctccttgtctctcaactatcatcttctacccttgttttcacaagtatactatagcattatatagttgctatggagacacaacct

SEQ ID NO: 11894 - DNA, 2069 bp, Homo sapiens
tgaattacatttacatatttaccattccctttctccaaatacagtttgagtatagccagaaaggctttcctgtaaataaataccagtctatggcatttacccagtgccccttctttcctatgctgtcaccgaaactcttttcacagatattcttctcttctctaaaactagctattagtatcttagttgataacatttgaggtttactcagacttgatttgtctttgcacagcatgtaattgcctctgtagccatgcatatgttatatttacaatagcttaatattttcagtaatgattgaagtctactctattgttacttattaattgctattaacatttcattttagtaaacagtaagtctttactaacactattttggatctgtcataaaacttgcattaactctgagaacactggcattctctaactttcctttctgtccatggtcacagaaaatatggacttgaaggagcagccaggtaacactatttcggctggtcaagaggatttcccatctgtcctgcttgaaactgctgcttctcttccttctctgtctcctctctcagccgcttctttcaaagaacatgaataccttggtaatttgtcaacagtattacccactgaaggaacacttcaagaaaatgtcagtgaagcttctaaagaggtctcagagaaggcaaaaactctactcatagatagagatttaacagagttttcagaattagaatactcagaaatgggatcatcgttcagtgtctctccaaaagcagaatctgccgtaatagtagcaaatcctagggaagaaataatcgtgaaaaataaagatgaagaagagaagttagttagtaataacatccttcataatcaacaagagttacctacagctcttactaaattggttaaagaggatgaagttgtgtcttcagaaaaagcaaaagacagttttaatgaaaagagagttgcagtggaagctcctatgagggaggaatatgcagacttcaaaccatttgagcgagtatgggaagtgaaagatagtaaggaagatagtgatatgttggctgctggaggtaaaatcgagagcaacttggaaagtaaagtggataaaaaatgttttgcagatagccttgagcaaactaatcacgaaaaagatagtgagagtagtaatgatgatacttctttccccagtacgccagaaggtataaaggatcgttcaggagcatatatcacatgtgctccctttaacccagcagcaactgagagcattgcaacaaacatttttcctttgttaggagatcctacttcagaaaataagaccgatgaaaaaaaaatagaagaaaagaaggcccaaatagtaacagagaagaatactagcaccaaaacatcaaacccttttcttgtagcagcacaggattctgagacagattatgtcacaacagataatttaacaaaggtgactgaggaagtcgtggcaaacatgcctgaaggcctgactccagatttagtacaggaagcatgtgaaagtgaattgaatgaagttactggtacaaagattgcttatgaaacaaaaatggacttggttcaaacatcagaagttatgcaagagtcactctatcctgcagcacagctttgcccatcatttgaagagtcagaagctactccttcaccagttttgcctgacattgttatggaagcaccattgaattctgcagttcctagtgctggtgcttccgtgatacagcccagctcatcaccattagaagcttcttcagttaattatgaaagcataaaacatgagcctgaaaaccccccaccatatgaagaggccatgagtgtatcactaaaaaaagtatcaggaataaaggaagaaattaaagagcctgaaaatattaatgcagctcttcaagaaacagaagctccttatatatctattgcatgtgatttaattaaagaaacaaagctttctgctgaaccagctccggatttctctgattattcagaaatggcaaaagttgaacagccagtgcctgatcattctgagctagttgaagattcctcacctgattctga

SEQ ID NO: 11895 - DNA, 1101 bp, Homo sapiens
ctctcagccccgcccattgaacgcaatcccagccggtaagagagaggaagtgccgtagtccccacccactttcatctccttccctttctgttggcccggctggtcgcctatcttctcgatcctgtagccgattggctctctccctcccgcgccagtccctgccctcccctggggagggtgagtcacgccaaactgggcggagagtccgctggcctcactcctagctcatctgggcggcggcggcaagtggggacagggcgggtggcgcatcaccggcgcggaggcaggaggagcagtctcattgttccgggagccgtcaccacagtaggtccctcggctcagtcggcccagcccctctcagtcctccccaacccccacaaccgcccgcggctctgagacgcggccccggcggcggcggcagcagctgcagcatcatctccaccctccagccatggaagacctggaccagtctcctctggtctcgtcctcggacagcccaccccggccgcagcccgcgttcaagtaccagttcgtgagggagcccgaggacgaggaggaagaagaggaggaggaagaggaggacgaggacgaagacctggaggagctggaggtgctggagaggaagcccgccgccgggctgtccgcggccccagtgcccaccgcccctgccgccggcgcgcccctgatggacttcggaaatgacttcgtgccgccggcgccccggggacccctgccggccgctccccccgtcgccccggagcggcagccgtcttgggacccgagcccggtgtcgtcgaccgtgcccgcgccatccccgctgtctgctgccgcagtctcgccctccaagctccctgaggacgacgagcctccggcccggcctccccctcctcccccggccagcgtgagcccccaggcagagcccgtgtggaccccgccagccccggctcccgccgcgcccccctccaccccggccgcgcccaagcgcaggggctcctcgggctcagtgggtgagtgccgcgacctctcgcttcgcgccgcccctcgcgcccctccctcttttgtgtgcagccccagatgctttgggctggtccctcctctccg

SEQ ID NO: 11896 - DNA, 1246 bp, Homo sapiens
cctttcgtgccccgcaccctttgccccccgcttaacatttgctctagtcacttccggcccgttcccacgctccggaaaccattattccgcttcatcctacctccagtcctcacctgagtccttttctccaaacaccgacttcagtgcttagagatagtaactagggaatctgggaggtggaactgcatcttgggacaagtagtccaaggtagaagaaagcagtggagaactacagttcccagaatgcacttccatttcctacctcttccccaagaggcccccctcgacctccttttaaaaattctcttagccacgttgattgtacgggaaaagcctttttaaaacatcttttacgttgcttaaacctacagtttcgaaagcattccgaaggctaaagtgagaaataagcccaggctagggagaggagaaacgaagttcacgtcctagtctggcaccgggttggattgtcgctgggacggcagtcaggcatttggtgtggtcgcctaaggggtgggtccttcggcgggagctccgggaaaccccgtgggcctgcgcggcgttcttccttttcgatccgccatctgcggtgggtgtctgcacttcggctgctctcgggttagcaccctatggtgccttctcttgtgatccctgacctaacctgtctcttccttttcctcaacctcaggtggagccgccaccaaaatgcagattttcgtgaaaacccttacggggaagaccatcaccctcgaggtacgggccgggtggtcatgaggaagccaaggtccgaataaggtcctgaggtggattttaggaccggcgctgctttccatgtcttagaccatgattccgaatttgggttctaaaacttaagctttgaaatgagtaccttttgctgagcaacgacctagaggtgattttcggtggccaaaggctggacctgtctcctctcgaggggttccagctagttagttaaaacggaggagctgcggtggggaaggagacgctctgcccgccgggtgcgagcacgtgtggccctgcggccgccgcccgctctgggctggggagatgaaggtgctttccggtagccgacttgggaggttgcccactgggtgggtaataggtctctcgagtaggtctcagccctgtcgctggttcggttcagtggtaattgtcaaactaaatgagttctgctgtagttccttaatgtgtaaccaacatgctttcactttaacactcataggttgaa

SEQ ID NO: 11897 - DNA, 1275 bp, Homo sapiens
agaaatatctaaaaccttttccgtagactttgaaacatctctctctctcataactccctggattcaagtagcacattggtaataggtatcagagcagtctagagacaattgcatgtcaaaaaatgtacattcatttttaggtggataaaagtaaacatagaaattatgttatggctaaatacagttagtgggtaacttagatttatattagctagcatctaatttgcacaactagaacacatcccagaacaattactgaaaagctgaaatttaatgggtggtgatgtagcccaatgagggcgaatgacattacagcttgacctctccagaacactaatatcctaaaatacagaacatgctgggttaagtgcattagtgcttcaagcagaaaatgctgaaaacaacgtgtaaagtactgaatctgagtaggctgaccctgagaagggacaattaaagagacaaccaagggaacacattgagactacaaaaatatgaataatctcaattatattcatcacacttttttcataccatttcaagaaacgactagacagtagtaaccacatgaatattttactttctccagtataccttgagaagcaaactttgtaggaagccactcttctcccctaaacaacttctgccaaacaataataaagccaactggaaacgaatcggagccattttcattttcctaaccggggcctgacatgctttaaattatctggctgtattctaaatcaacacctaacccctcaaggaaactgaagaatcaatatacagggtaatagctttggctcagagctccaataatgtgcttcagatctgtccatgtggaaatgctttcatccaaatttttaaattggtggttaccaaagagttcacaaaacaggtttgtatgtagcacctttcatgcaaggcatgcaaaaagcctattttaaaatcactgtgcatattatagagttgtagccacctcacaatgaagtactacagcctgtgctgtcttaatggtttatgtcaggaaatgaaaaagatactgtaccaaatctggaattacaatggggagtaataatgtatactaaatgacttttgtattttaagttactttttgtgagtggtgaatttttgtgtttttcttttcagctacacttagtcctgagatgtattttttctttaagtcttgaatgaatacaaaaggagcccattttataatataaaccttgatgtacatgttgagatatttggacaatgaaaatgccttaaaaggaatgcata

SEQ ID NO: 11898 - DNA, 1156 bp, Homo sapiens
gtaataggtcacctttcttccaaaaaggaaaaaaaaatgtaaatttttaaaaaaggagaaacatggaaaaattcccattgttaactacctgatgaaatcttagttgccaaccatggtatctgtatttttttatgttttggggagacattagatcacagtcaccaaataatttaatattcatagctgtacaaaatatgatgcctgtcctaaaaggtaatttttattttatagtgataagttaaatgaattaagacgtcagaaggagaaactagaagagaaaattatggatcaatacaaattttatgacccatctcctcctagaaggtaccattaaccaaattttatgaattcttattctgaaaaaaaacactaggttatttctaatattgtgatgacttctacttttgtgaaggatttgtatgttgaattttaaactgataacaatttttaaaattctgttaggagaggcaactggattactctaaaaatgagaaaattgataaagtctaagaaagatattaatcgggaacgccagaaatctctaacattaacacccacccgctcagactccagtgaaggatttcttcagctccctcatcaagacagtcaagatagttcttcagtaggttcaaactctttagaagatggccagaccttggggaccaagaaaagcagcagtgagtgcttaaactctttaaacatcgtattgatttagaatcctttctaaagattttttaaaacttcagtagtcctttgggggaatagtctgatgaatggcatttctttttaatttaacatcataaaattaattgtgtactgcattagtgtacagccacacaattttctgaggtaaatcatacacagatatactatcatttggccagaggggtaaaatattgcagaaagaaagttaaaataagagctggaatacctctgccacttgctatttctgttaatatgggcaagccttttacctttgcttcatacttcacaggacagttacaaggagcaagttagaaatatgagatgtcattttcataattatatataacttaatcagaataataaggcattctataatgaggtttctgctcatatactttgatggtgtcacattggaacaaagttacatttggggaagcaaaaataggtatga

SEQ ID NO: 11899 - DNA, 1099 bp, Homo sapiens
attttgaaaatgtaattttaacatctgccctctaaccagccgtgtgctctggatcaaaccatccagcctctcttagagcctcaattttggtttttctctaaaatgggaataataaaacctatctcatagaattgttgtgaagatcaaatgaaattttatgtaaaagtgctttttaaattgtaaactgctatatatatatatatatatacaaaaaatagaagatgtaaaataaatctatttacttttcgaatgctctttatagtcctataaaaggactccagtaaattgcttctccttttttttcaagttttctgtgcagtcctgactcatgtgtaaagaaaccaggacattacattttggaaggtgattttgaaaaaccttttttgatcagctttagaactacaaaacaaaattttaaagtttttcttctaacaagcattgtattatattttaaatgtaaattttgtgcttatacaggaagatatcaagtctcttactgcccatatagttgaaaacttttataaagcacttgaatcgattgaatatgttcagacattcaaaggattgaagactaaatatgagcaagaaaaagacagacaaaatcagaaactgaacaggtattgtttaagtatactgcttttatagcctacaaaactgtgtccaaaattgtttgtagttcagattttccatgtgaaatttactgaggaattttctttccatcactggatagcatagagttgaataggagggtaaggcgtcccccctaccccatatcatttatatgttgaattactactccatgttgtaacttacgaagaatatttagtttaatttacaacatcctaaaatattttggagtgttctctggctacatcttctatcattacagagattattttgatataaattatagtcagttaaaattacttcagttcatcttggttatacatatttttccttcagttcaatctgatgatgaactttaaatcattactcaatatttgtgatatatttcttacagtgtaccatctatattgcgtagtaacagatttcgcagagatgcaaaagccttggaagaggatgaagaaatgtggtttaa

SEQ ID NO: 11900 - DNA, 1277 bp, Homo sapiens
ctcaaaattgaatagataccactatactgcaaaaataatagaattgatttttgacaaggctgctaaggttgtagactactaaatggtagtgagtttctttttcctttagttacagaattgtgctgtttagtaatcactagctaatatcaattcctttctttaaatactatcagggacattataacaatgtatgatatgggaatattactgatgcccaaacatcttgccagccaaaaatggaatctctttttttagcctagctgtgtatatttgagtggaaaaggaaacaccctacaatagctttgctaggtgttaaatagtaatgtaattatatttcctataatacagcaatatagtcacctttataaaaactatatttataaaacattcttcctgatcttaccttgtgttttaaacacatagatgatttcgtattctaaagtagttagaagaattgtaatgttcccaacataaaaggtaaatgttgaggtgatgaatatcttaattatcctgatgtcatcattaaacactgtatacatgtatcaaaatatcacacataccctcccaaatatgtacaacgaataagttagtgagacacatacgctttttataaatatttttcttttgaaggattttactatggattgtggaatttgttatgcttatcaacttgacggtaccattcctgatcaagtgtgtgataattctcagtgtggacaacctttccatcaaatatgcttatatgaggtaaaaaataaaaatattgtcaagacttttttccgctaacacaacataggaagtattcctgtttgaaatacacagaatctaaaatctgttgagtcaatagtgatcctctcttttgccattaactccttttaccagtttattccagatgcttatgtgcttcatttcttcatcacagttactaatgagtggagaaatgttctgaagtatccaagggagaaaatctatccagaatatattcatggactagcttattgacacataacaaattaaattgatggtacattggaatctttctataaattccttgttaccacaatgtaagcttcataggtttacccgaggtggaggtggttgaaagtggcagtaatacagtgaaaatgaaattagtactatgtagtatctattacttttcaggctgcatttaagaatagaatatatccaatactactacttttcatgttgagaagaatgccttttgtgatctgagtctcacagcactcaggcaatgccactttacttactgtatgtga

SEQ ID NO: 11901 - DNA, 1302 bp, Homo sapiens
ttttactcaacaccgattgctttggcacttccaaatcaccaaacttgcacctccataggttgactataaataagctcttcacatcactatgaaagtggagcaaaaatatttatatgtaatacattttcagttataataatatgttttcccccaatatatctcgtttttctttttttttttttttttgagatggagattcactctgtcgcccaggctggagtgcagtggcgcagtctcggctcactgccatctccgcctcccaggttcacgccattctcctgcctcagcctcccaagtagctgggactacaggcgcccaccacaatgcctggctaattttttgtattttttagtagaggcgaggtttcaccgtatagccaggatgatctcgatctcctgaccttgtgatccgcccgcctcggcctcccaaagtgctgggattacaggcgtgagccaccgcgcccggcccctaatacatctagtttttctaaaatacctcagtgatattaacacacagaagcaaaaatggtctaatgttatgcttttttaatagtatcctgcagaatcaccagattattttgtggattttcctgttccattttgtgcctcctggacacctcaggtaaattctcctcaggtaaattcttaaatttgttttaagtaattaaaaagtacagttgtcccagagtatccatggggggattatttcttgggccctctgtaaataccaaaatccatgcatacccaaatctcttatataaatgggactttgtttatagcctgtgcacactcttctgtatactttaagttatctctagattataatacctaatacaatgcatttgccatgtaagtagttgttatactgtaaatagttatgttatttatttatttttgaatattttctgtctgcagttggttgaatctgcacatgtggaatccgtgggtagggccaactgtaactgtttttacttaggtagtcattataggttatgaagtaatctttgttttttcagttttccttaagcatttatttataaacacaccttctataatgcttcttttatatttccttacagttaatgtccattttctttctccctctctacatgcacacacaaacacacccactcacacccacacccatgcataaatacacacacacacacgcacacacacacacacaccatccagcctgtagatatttatgcttcattttcagtaaacatgcagaagcacttttgacagacattttcctttaaatttaaattccaaagaactctgtagaaagcagtgaatggta

SEQ ID NO: 11902 - DNA, 1236 bp, Homo sapiens
cattcacttgaggttgaggcaagtgtcattcagaaaacttccattcctgtttactgtaatacctgtctctagtctattctaattttatgaaagatttactttcaaccaagattgtactcactgtaaaggagagtctggtggatatttcttttctcatcacagataaaaattatctttaaagtacacctacctacaaattctgtacaatagtaccaatttgaaatacatagcttgctaacttgaatatcttatacatttgtggtaagaagtggtgaagacatttaaattataataatcctggagatgtgaagggttatccaggatggaggaactttgcgtaggtataaccattgcagggaggcctacttgacagaggaaataacttgcttgcgggttagggagtgataaactattgtaaactaaagactcttacattcatttaaatagaaaatcaatacctacaaacatgttgccagatatttgttatttattaccttccttagtaaaggtataagactaatctgtaattagcacatttacattctaaatggaaagctctcaaagaacttacaaacattaaatgagcaactactgtaaggttaaacactgtgctgccccacatggctgctcttgtggttttaaaagtgcctagatgacaaatcacattctaaaatagtatatttctctctgcacattcttctagcacagaaagaacacactaacatcttaccaaaagtttaaatttgactaattctgaattaatgtaaacacatcattaactcttattaccatgatgattatttttattcagggttatgcagaattatttgcacttgtcccttaactaaaggagacatttacttttctttcatttcttaacagaatggagaaatgcatctatcctttctgttggttttcaaatggtgttgacaaaaatatctttgatcttacttaagaacagaatgtgttggccagttaaatagcaatgataactaagagcaaactctccccagtgtttcgtatagctcagtgtgtctaagggaattgtgtggctattttactgctgtttctcgacaggtttttcatagttctttttatagctaatatattgttctggagctccattctttctaaatactggggaaaaatgagaaatccagggctacggccatgcctgtggcagttaagtattgatgatgaaattggtgaggcattaaggaagtgtgagttggtaag

SEQ ID NO: 11903 - DNA, 1259 bp, Homo sapiens
aatggttataaataatgaatgcctttgttgggagtactttcatttactcattccaacaaactcttagaccaattttccttgagatcaattaaattcaatccctcctgtatgccagactttaaaaaaatgcccaatactaagtagaataaaaaatgtcttttgcttcagagtagtatgattaggactataacagagttgggttgaaaggtctatagtacaccagagtcaagactacgtttgtccttgggaaattggaaaggctactggagaatatgaaacttcagtgaatcttggggtatcactggatatttagaagctgggttgaggggccaggggatccttggcagaaagaaaagcatagtgacatgagagtgcatcatgagatcaggaagtcatgataggttgtaggcaattaagctgaagaggtttatgaggcccttatttgtgtggatagtggacaggtgctgggaatgatggatggcaggaagatctgatactagagcagttaaaattatctaggcaagtgagatggggaaatgaagtcaaacagcagcagcagggatggagggaaagtgacaagtttatgagtctaaactggagagagagaggatgagggaagaagaatgtagaatttgaagattgtttggttcttctggtcttccaattatgttcaagtatatgtgagatgcaatggtcaaagtaataggtacataataaataaaccatttctgttttcagcatctgtagatcaaactttagcttgccttagtttatcattcgtgtgtttagactatgatcaaataaatatattcattttcacactctatttttagtggtactaatatattttttgtgacgcaaaatagtcacattcctagtgatgggaaaactaatgcataaatggatttggcataaatcttgaggaatccctgagagatctggttggataatgagtcctatttttgattttcaatcaaatattctttccactagaattatctgctttcttgctcaaaaagagtcaactaactatctgaaaactaatgataatttgcaagttacaagaaagccattttctacctttgttatacttgtaataaatcctaggtccaatgaatatgtttttaaatatgtttcaaataggtattactaaagtaaaccataagagagacaaagtagaattatttccctcaagtttttgggaaagtaatattctgttcagagaatcaaatggcattatccaaatgaaagtattattt

SEQ ID NO: 11904 - DNA, 1106 bp, Homo sapiens
cttcatttggcatgttcttccttgcttagaaattctggtggtcccttgaacccagagacagcaaatgttcagagctcctatgagagtggaagattatgtgtagactgaatttgaagagccatataccacagaaaaatgttcatcctttactgtacaaattatcttaaaatatcccatactcatctccagagcttgagtgtgttccttagccttgtttgcaggttctgctgatataacttcatttcctattctctctagatcacaaacactttataaaacaaaagaattgctataaatgatgtctaggatgtgttcttttgactgccaggcagatcatataactgtatccaccacccatctttattactctttctatagttccttttcctataatggtaaagaatgctcaaacattagggttagatagacctggatttgcatccaatctatactatttaatggaagtttgtctgtgggaaacttgttactaaattcctccaagccccatatctctcaactgtaaaacaagtataatcacattgacttagtaaagcttggcctgtaatagattctcaatgaatggcaacttccttcacctgttagcttctttctctgtctctatatatgccatatgtcaaggcctggctttaatttcatctccaccttgaagtcttctctggtgaagtctactttatttttttttcaccacttctcaatttgcttttgcacttattttcctgtgcttacaagtcatcctttattataactgatatatgagctgacacctaaaatcaaatcttgtttagccattcttttgttgatttcgattgtccagctagtatgcatattgagggtaagaaggccttttctcctgcatttcctatagagctgggcacacaatagttagtcaatacatagttcttttaattgattgtcaacttgtttatccttgctataaaccagcatgagaagaggggcgcaagtcaatttaacaactacttaattattttcaattagatgctgcattgcggagaaatagggaacccccccaaatgaggaaaaagttgtgatgcagaaaaaaaatgagtgcaaaataactactgcca

SEQ ID NO: 11905 - DNA, 1186 bp, Homo sapiens
gatttattgcctattctagagtaaacacttggggtatgcttactgaacaaatatttttgtgaagtgaaatgtcatatattaagtaaaatgatcatatttatgtgctatcctttccaatacggcttaaatatattttcaaggaatgtttatggtatgacagtacgttaaagagctgggcatttagtgacttaacatctgttttctcatgttctatggataaaatttgggtagagttttacttgttttgaaaggaaaataagcccagtcaaatgatatgaccaattgaaattagggcagaaaatatgtcaagaaactgagaggtaagtttttctgtactggtattctctggaaagtttcatctaaactgcagttgttcgtcagctggattttatttatctagtgccaattacattataattaatgtaaattgaattctcatttagtagatcagtttataatgcagtctatttggatcatgtatttaatttcccccttttttcagattatgaactattatggaaaaggaaaagtgagaattacattagtaacaaagaatgacccatataaacctcatcctcatgatttagttggaaaagactgcagagacggctactatgaagcagaatttggacaagaacgcagacctttgttgtaagtacacagttacagacatcttcagaaataagataagacataggatgttctgtttcttctccatgacaatctgttactttttagcagaataattttctcattctacttctatttactgtattttacacttacatttttactatttgcattagaactaccctttcattctttattagtagacacatcttatgatagttagcaggaagacatttttattgttattaaaagtaaacgtaaacttcttgtatactgtgatttcctttcttggggtggacagtttttgaaataattattcactctgtcttttttttttttttttttttttgagatggagttttacccttgttgcctaggctaaagtgcaatggcgcaatctcggctcactgcaacctccacctcctgggttcaagcgattcttctgcctcagcctcccgagtagctgggattacaggcatgcaccaccacgcctggctaatttttttgtatttttagtagagatggggtttctccatgttggtcaggctggtctgga

SEQ ID NO: 11906 - DNA, 1210 bp, Homo sapiens
aataataccttattaaagtagataggatattgtctccattttataaatatggaaaccaaagactagaagttaaatgacttatccaaaattgttagctacttctatattgaggactagaactgaagtttcttggtttctagggtctttctaataagccctattactgagcacctgtttgtgtgaaggggcagctatggatgccatttaaactcatgtaactgataattaacttttggaatgtagttaccaaatcaaagagcttaccaaaaaatagcccaagactatttaatacaatcttatatagttaccatttgttattaagttaaacctcagttggtattatgaagaggaaaaacattaagctaaacctaaaaaaaatgaatgggtcatttaagtttcagaaaggagcctcattacaatttcagatttgagtataatttccatcaccctaattcaactatttgagctttttttaagaatacatgtgacttgactagtattagattactaaccatttcccatctctatattaaacataaatcacagataccaagattcactttagatatgaggaaaatggttttaatggacacaaaggagtcagccacgttggaaccaacatagtttcataccacgttgaaaccatgtgtttgatatgcaaataacagcaaataattttttcactcttgtcaatgccaatgcattgaaaggcccagaaaatgagaaaaggataacaaacttttgataaaaaggtaagaatttctgtgtggatgttcctcagtttctgggaaaattttgctacaaaagagatttaaataatttaggaggcagtcttttgcatggtatttttggcttacctttgaatctagtggacctgtaatatgtaagaatgaagaatgtgcttagcaaactgaaatgagaagatttctatttcttaaatttctattcctgagattatataaaatttcacgcaaagagtaagcattagctttaaatacttcttccaaatgttcctagaattttgagacaaagattgttaaaaattaatgtatgtctttgttttaggcagaactggaaatattaagtagtgagagtactatagtttcccttttgcctacataaaagcattttaaaattagttttatgatttctttgtaagctttatttaaattcaaagtctttttcataacacttaagagaaagagccctt

SEQ ID NO: 11907 - DNA, 1169 bp, Homo sapiens
tggctagccttgatggccaaacaacaggacttatacctgcgaattatgtcaaaattcttggcaaaagaaaaggtaggaaaacggtggaatcaagtaaagtttccaagcagcaacaatcttttaccaacccaacactaactaaaggagccacggttgctgattctttggatgaacaggaagctgcctttgaatctgtttttgttgaaactaataaggttccagttgcacctgattccattgggaaagatggagaaaagcaagatctttgatatctttcatgtttgcctgcagttgaacaatactttagagtactttttaaaattatttctcacaaagaaatgaatgtacaatccaatgaaaacatttgttattggctatttcaggtgttttgctgctagaaattattaaagttacacactagtatgttggtctggtgacctggttacattttattatacacattattggaccataaggacatttgtttcacctagattttaagattatggagactgctgtcatttttatcttatttaaatctctaggtttattggaagagtaagattgatgaactatagcatgcacagtttggtacagtagagatcattaatacttttaaaagttctgcattaattgacttggaatccttagaaatggagtggtgacatgtcagtatgagaacaggcaaaaggtaaatttttttttttttttacaaccttaagtaatctcaataataaaattttctgatctgtattatatccagtgttgggtttatattttcacccacaaacaactgacactgctatcttttactgtatttttaaaaatttaatttgaaaaggtcacccagaagcattctgaaggaaatggttctagaattatagagtatgtagccctaatagttttccctcctagcaaaaagtctgaaatttatctttcttacaaactgttccatttcttctaaggatcccttaattatttatctctttaagccaggcatggtggctcacgcctgtaatcccagcactttgggaggctgaggcgggcagatcacctgaggttgggagttcaagaccaccctgaccaacatggagaaaccccatctttacgaaaaatacaaaattagctaggtgtggtggcacatgcctgtaatcccagctactcgggag

SEQ ID NO: 11908 - DNA, 1099 bp, Homo sapiens
gagcagctggaactacacgtacatgctactgtgctgagcctacagccactctttattatagtcaacaagagcttcaactgacacagtagtggggtaaaagatgttttctgcaattacattggaaataataactggttttagaaatcctctgagtgtagcgagttattttaatctcagcagcggcagagtattgatgtaaaaatttgcttcagaaagagaaaactatgctgttggcatttgaacatttgatccctgtttgtacacaccacattagtattttttgaaatccttattctaacattagcaatttatgattcatttttgtactgtttcttccatatatctttagaaatactaaaggaaaatgccaccctgataagtaccatctttagccttggaaaccatgcatttacagtattaccattcaataaataaaaacccattctcagctagaaacactaacccccacctttttttttttgtatgtgtttgtttctgtatttaaggaagacatagtatagcttccacaaggaattgttcttcagaaagtgaaaattgtactactcataatggtggagaaatgactgaagaatctgaagggtaggcggctggttgtttgctagataagattaaatattaatatcaacttcataaaatatatgattggtggttaccataaggtaggaatttcatattgcataattgctgaaactactggaatcagcttagttcatgtgttgaactgaccgaaacatgacttattcatgttattatttataaattggattacagttttctatttaaagatttttatttttatatttataaatattagaagtaatatctcttaacacaaaactttaaaaagtgaattttaatacccaaggaaaaaaactgtatgccattaattctccgactttactaaagaaattggatgtgtattttaggactatttgaacataataactcattatagaaaattttagaattaaaatgtctttcagtgtattgcaagttttgatagttttgtatagttttgtattgttttgcctatttttacaataaactgaatattgttaagtgttcactttgatgagtt

SEQ ID NO: 11909 - DNA, 2241 bp, Homo sapiens
attaaaccttgatgttgccaagccaacataatctaaaggagcaccaacttcctattgttttagaagcaattctgacctccttttctgtttaaaaaatctaggtctaaaagtcgttttggtcaagggcgtcctgcataaagtaccttaaaatataagtaaaaagagagaaggcactcttctggacatctgaaattgctcacttcttgaagatcttcagaacaatgacttccaactgttttatgttattattattttaatccacataaatcataattctaaaagaaatgcatagttaggttttatgaaaatctaattgtaaatatgaaactttttaaatctgattttcttctaatatcattctaggctatgtagaaagcaattatttacaaatttgcatagttgagactcccagtgttttcctttatttatttgaaaaagaaaggcctaaactgtcaggtagccaagtttttttaagaccttaaaagttaggggaacacaactggtagtgttaccatgcatggcactgattgtagtatgtctttggagctgtaaatcttgagatagcattgagaactgcaggttgtgtgacgaaattcccaatgatgctaattttaagtctgcatgaatattaaggagtgacaggtctcaagactgcattaaatgaagtttcagggtaaggtatttcagtactgtgttgggcagaagggttaatttttttcagcattatatcgtggaaagtacaatgttaatccaacttttttttctttcagtttttaatgcttatctattgatcatctgagctggaattactgattattactctgtcctctgtgaaactagtggcattctgaatttggtaaaataaccattgatagttttaggatagtaaatcatttctgttatatgagacacccactgtacagttctcagggctctaaaacccaaccatatttctgtaaccattcaaataactccttaaaacagttatacttgctagttcggtctaaaattttccaaatacattagataggtgaaaatttgcatatattcaagaaaaatcaaaataaaattctattttataaatcatgtttaaatttttctagccaggcagaaagagtgctcagggaaaatttgttccaaactataaccatataataaattatgtgtttgtaaattatatgtaggtctctgaaaaactttaagatgcactgtttctatttttttaagtcttaatttgccttataactgacatttcttcaaattattcagagaacagactttaataatgtgtgacaaaagagcaatttccattgaaatattgaagtgttacactcagtttacacgtacagaaatcattctttttagtgagtcttttagttgataaatgaagctagatgttatttgataactggctttgccaaggtttttgaactgctgtttagaaattttgttcccatttatatttgtttcaattgtttgatactgtggaaatagacttttattttcgaaagaaaatgtcttgtagtacatattatatgtaagtactctgttaaataccagagttttttttgtagtttactgtgttttctgattaaaggatttggatttgtacatgtaaacagtgctgtaatggtcacgactagataaggaaaaaatatatatgctcttttgatttttaactgatggtaaaaaggcaaactgcttctcccctgggaggcctataccactgaattaatttttacaaaccagagtttatcagaatttgattctcttcagaatgcttttggccaggtgtagtggctcacgccagtaatcccagcactttgggaggccgaggcgggcagatcacctgaggtcaggagtttgagaccagcctggccaacgtggtgaaaccctatctctactaaaaatacaaaaagattagccaggcatggtggcatacacctgtagtcccagctactcgggaggctgaggcacaagaattgtttgaacccgggtggcagaggttgcagtgagctgagatcatgtttctgcgctcctagcctgggtgacagagcaagactccatctcaatttaaaacaaaaaaagaatgtgtttttaattttgttaatgtttgtctgttatacatagcactggtaccgcaaacattttacttaaactcttaatagcatttctttcgccagatactttaatatttcaccttacattaatcctggattcacatttctttaattgaaataa

SEQ ID NO: 11910 - DNA, 1403 bp, Homo sapiens
tcgttttcagaagacatgtcaaatatcaggtcacagcatgcagaagaacagtccaacaatggtagatatgacgattgtaaagaatttaaagacctccactgttccaaggattctaccctagctgaggaagaatctgagttcccttctacttctatctctgcagttctgtctgacttagctgacttgagaagctgtgatggccaagctttgccctcccaggaccctgaggttgctttatctctcagttgtggccattccagaggactctttagtcatatgcagcaacatgacattttagataccctgtgtaggaccattgaatctacaatccatgtcgtcacaaggatatctggcaaaggaaaccaagctgcttcttgacattaggtgtagcatgtctacttttaagtccctcacccccaacccccatgctgtttgtataagttttgcttatttgtttttgtgcttcagtttgtccagtgctctctgcttgaatggcaagatagatttataggcttaattcttggtcaggcagaactccagatgaaaaaaacttgcatcttcagtatacttcctaaagggcaatcagataatggatatgttttatgtaattaagagttcactttagtggctttcatttaatatggctgtctgggaagaacagggttgcctagccctgtacaatgtaatttaaacttacagcatttttactgtgtatgatatggtgtcctctgtgccagttttgtaccttatagaggcagattgcctccgatcgctgtggttcttattatcaaaattaagtttacttgtatacggaacaaccacaagaaatttgattctgtaaagaatcctctttagctgtggcctggcagtatataaatggtgctttatttaacagaatacctgtggaggaaataaagcacacttgatgtaaaaataattgttttatttttattgacatgactgattgattgattgctattctgtgcacttaattaaactgattgtgatgacttttcatttgtttacatacgttgcttcagtcttctcaggtgaaagtagtgagaaaaccgtgaaagaggggggaaacatttatccattatatgctgtttcactggaagtgttaccagcagtccacagaactaatgtgtccccacagacttctcaatcctctccacaccgaagtgcaaaaccacagcagggagatgtgcagggagatgtggagcaaaacacagccaatttgccctcacctcaacatgcttttgaatgcaatataccactgttttacgacctaagatctacacaccttaaaaaccctaaagtaaaataaaggaatagtgtcaacatgccatttattttttgtcatcttgaactaaaagtacagctgcaagcaagcttgctatagg

SEQ ID NO: 11911 - DNA, 1145 bp, Homo sapiens
gaaaaaaactaagggcttaattaagctaatacagttaaaggaattaaaagatttaacaagccaatataaaggaaatgaattcctaccttttgcagctctttttacctctttcaggcctactcttttgagtatggctgacagtcactttaccattgtctttggacagagaccctggaaagttggttaaagcagttgcctattctccctaatcttttgtgacctactgctttgtaattttgaagacttaacaatcttagagcaagtacttttttaaaaaaatgtgattaaactatttcttcagactagaatatacacacaaaatagcagagctctgaaggtgaggaatgtttaaaagagcttaatgagagtttaacttcaggatagaaagcaaatacgtttgctttgcacacatgtgcacacacagtctgagtctgaaaacatctatcgtagaggacgagtactaccattttgtggctcagtaagcaaaaatgaaattaagttttcaattttttcaaatcatttgtagtctttcaacactttgcacatgatgtatcacgaagctacagcttgccatgtgactggagatttagtagaacttctgtcaatatttctttcggttttgaagtctacacgcccttatcttcagagaaaaggtttgctcattcctacttcttatgttttgttcgtgctactagtaaagagagagaaggttttaaaatcatgtgccccagagaaattgtttttatcctagtttatgcacagaagatgaggctgaagctagctaaccatcaggaaatgtttgtcatgaactcctgatgtaaagctggaaggctcttttatgtttttgtacctgcctgaaaaatacgcaagcaggtatcaagatttcagagattggaaaacatttccaaacacagtaacaagctgggcactttgtaaagattctccagctggaaacttctttggcttagattagatcatttgcagtttcatgcgagatgactataaaacctacctgtcttatgtccctataagatactgtgaactctgaacttcttcatatacattcctagaaagtgggacatattatcaatgaaatatgttctttaagaaatctagcaggtttaacattagtagtaatcatctca

SEQ ID NO: 11912 - DNA, 1557 bp, Homo sapiens
ggtaccttttggtaggtcttctgactgcaaatgctgggttccctctgttaaatcatactacttcctgagaagaaataaaagataaagtgggaaaattctgcatcttaggcaagctaaagaaaagtggtttaaaaattattgccacttcaaaaataacaatggcagaatagaaggtatctatttttatcacctcttgggatctttttgtggggccaaggggaaagcagaaagatactaaaagagatgttcatgtccctttttattcattttaattattaaagggaacagtggctttgtgattaatgactgctgttcagtctattttatatcttacaaggatctgacagttttgttttacattttatagctgcagcttatcttctggtgtcccttataccaagcaattcattccgtcagatgttccggtcaacaaggtctttgcacatcccaacccgtgaccttccactcagtccagacacaacagtagtcctacatcaggtctacaacgtgctccttggtttgctctcaagagccaaactttatgttgatgctgctgttcatggcactacaaagctagtgccctattttagctttatgacttactgtttaatttccaaaactgagaagctgatgttttccacatatttcatggatttgtggaaccttttccagcctaaactttctgagccagcaatagctacaaatcacaataaacaggctttgctttcattttggtacaatgtctgtgctgactgtccagagaatatccgccttattgttcagaacccagtggtaaccaagaacattgccttcaattacatccttgctgaccatgatgatcaggatgtggtgctttttaaccgtgggatgctgccagcgtactatggcattctgaggctctgctgtgagcagtctcctgcattcacacgacaactggcttctcaccagaacatccagtgggcctttaagaatcttacaccacatgccagccaataccctggagtgagtaaaattgatactcttttatctgtatcctcaaatagattggaaatacctgtttttcccctggtgggaagtggtggcagaatatagaatagtctcaccattctttcttaagaacttaatgtgtatttgttttcttaaatacatatataaaatgctgtgttgttataaaattgataactgtgtagataacttttcttagggtgaagttaaagttgcatatccagtaaaacttacctgttttttaatttgtggttttgtaaatgtattcttcatgtgtgcctaatgaaaaaagccagcttcatggtacagttttaaggaattgagtactttgctatttaaaaatcagatacttagcaaaatctacatgctgtggtaaactgtgagctagacaattttatatctaaaactagtagtattccgcagtattttttctcaagctgcatccaaacaaatgaaatgcttaagagatcaatcgagatacatatatatgcagtctaaattgggtcccttttactctgcacacttacttgtaggttttatattaagtttcct

SEQ ID NO: 11913 - DNA, 1104 bp, Homo sapiens
tcaataaaacaacaaaaacgggcagccacagaatttgacctgctggccatagtttgccaacccccactctagattcctaggattcccctttctcatgaagaaactctccacagcagtacagcgagcttcttgtattctcacttagtaccaggttgggcatgtaatcagaaaagtaaagatgagaaaccttagagaaataaaaatacttttaaataaatttccaaatttagcaagacctagaagttatggagttctcatatttgtcttatggtacttggttattttaaattcattttgtaaaccagtgacatatttttctgaacacttcctgttgataaaagtaaaagtagctttaaaaatgggaaaaaaatagggtgaaacctttttaatctctaattgtcaaaaaagtactttagctttgtgtctaatagcatatacaaaaagtaagtaaaagtaattgctcattcagttggccttatattctgttcttgtcatgttatttgtaggtgattgaatacaatccttctcagtgtctagattggttggcagtgcagacaccccgaaataaactggcacacagctgggtcttacagaatatggaaaactgggtcgagcggtttcttttggctcacaattatcctagagtgaggacttgtaagtcaaatatttagaatttcataaaccatttatttattgttcaaagttatgtttcattttgtttttaggcaactacgacatgcccattgttgtatactacgaaattcttggagatgttatttcctttttttttttttttttttttttttttttttaggataggaaaccatgttatttcttgggtaacatcatcactactatcatttttgtttccttgcttgataagagtgataaggcatgatcagcagtaatgaagggaataaaaaggtttgaaaatcctgtcttaaaagtaacttttgagaaggttaaggataaaatggtaataaagacataagctgagagaaaatattggctgaaattatgagttatataaacactttaagttgtacacaagccagtaaaaaagatcttagacaggtagacacatatcaaaaatatttcacaaaa

SEQ ID NO: 11914 - DNA, 1150 bp, Homo sapiens
ttttttttttgtttgtttgtttgtttgtttgtttttgagacagagtctcactctgtctcccaggctggagtgcagtggtgctatctcagctcactgtaacccccacctcccaggttcaggcgattttcctgcctcagcctcccgagtagcagggattacaagcgcgtgccaccacgcctggctaatttttgtatttttagtagaaacggagtttcaccatgtcggccaggctgttctcgaactcctgacctcaaatgatccacccgcctcagccttccaaaatgctgggattacgtgagccaccatgcccggcagagaattgttattctttacagttctggcagtttaatctaagattgtcctgaatgtggtttagagtgttttacattaggtttaggtctttgtgcagttgtttttcatgttacaagctcctgccaccatctacactgttacataaaacaagtcatttgttctcaaaatgatattaaaactactaccgtattaaaattgaattttattccaacttagcctcaagttgaagtgttatcagaggaagaaggggaagaagaagaggaggaagaagatatcctctctctggcagaagaaaaatacaggccagctgcccttgaaaagatgatagctttagttgctcttttggttgaacagtctcgatcagaaaggtgaaatgtttcgaatttaaaatgtttaaagcatgtttggttttattatttttacataattgtttaccactagtttttccactagctttttattatatatgtttaattatgtaattgttattcactagcttttattatataaatccttttaaataatactactattcatcaactcttgtggcataagaatttcagttttttctaccaaacttttacttcatctatgagtcgtgttagaaatagtcattgaaaaaatatacagtaaaatatctagcaaaatagagcgtgcattcgttctttaacctagcaacttcatttctaggaatctgtgtccaaaatacagaaagatgtatatgcaaatctgtttattgaaaccatgcttctgatagcaaaagactagaatcagctgaatgtccatcaaaagggaactagttgaaaaaacagcatccattcaaaagaatatagctgaa

SEQ ID NO: 11915 - DNA, 2134 bp, Homo sapiens
ttattgtggttttggtatgcatttttctcaaaatggttacacatttttttcatgtgattgtgggtcacttgtgtatctttaaagaatcctcacatttccttctcctagctgctgaccccatgatgagcagcggcccttccccattccactcttcttaaggaattggatactagattttcttttctctgtatctccactagctaaaaggattttttgaagctttgtttttgatcatctgtattactgaaatgtacagtttgttgagttttttctctttatcataaaactgaatttttttaatgctacctttgcctcatttccttagtccattgttgagactccagaagagctccagaataccaagataatcttgtgcaaactataaatgggtggcagagaattttgaatcatgttaatttttcaaatctttgttacctgatgagttggctcttgtttgatctttttctttcttcacagatgtttcagcgtttgtgtatccatgtgattcagaggctgagacctgtgcatgctcatctctatttgcagccaggaatggaagatgggtaagaagtactttttgaataagtttgtgtgtctgtgttgtgtgtgtgtggtgtttttgttttttttttttgttttttttttttttttttaagagatagggtttcttcatgttgcccaggctggtctcaaactcgtaagttcaaatgatccgcccgcctcggcctcccaaattgctaggattacaggcatgaaccaccatgcttagccctaatttttaagtttcttaacaacctgcctacaaaatattttttaaaatccacactgaaatatttgttctgtttaaaaaataatctgtaataatacattcaagaaggtaaaactgtttttgttttatttaaattttgcatctgcaaaatcctctacaaattactttatggcttagtctttttgtttgcattgatttagccagtcacaataactacttaagttattgcggttcatattcattatctcaaagataaaagaaattcagagtttaaaaagtactttttctctcgaacagtatttccagacctcatacattctctaagatctatttaattgtctcttaggtcagatgatatggatacctcagtagaagatattggtggtcgttcatgtgtcactcgctttgtgagaaccctgttattaattatggaacatggtgtaaaacctcacagtaaacatcttacagagtattttgccttcctttacgaatttgcaaaaatgggtgaagaagaggtgaggctatatcttgtctatttttttgattatctaccttttttcagtatttgcaacttaattgcttttattttatatttttaaattttgtttgtttgtttgtttagagccaatttttgctttcattgcaagctatatctacaatggtacatttttacatgggaacaaaaggacctgaaaatgtaagtacagttctatcgtacattaggtattagaggctctggttttcatagtttgcatcgtgcgaagtcctgagatgttagaaccctttaaagtcccttctggaacctggtgttagataatatgaagggtctaagattggttgatgtttttaatgtaattttaatggatatagcaagaaagaaacaactaggtaatgaagttcattcattggtaaggtctggaacaaagcaaataaacttaggcaaagtggtcacctactttagggtcttatcaatagtgaattgtttttgtgaacattttgctggtcacatttttaagttctttgctattaagtttatgagagtctttccaaaatttaagtaggtggtctatgaataatattaaagtattacatcagttttgtgttgttcataacaaatgcattaggttgtatgatctacttgcactctttttcagtccttttcttaaccataagagataagtaccctttatatctccatttaacagatgagacaattgaaacttagagaagttaatttgttttagatcacagtgacttgttgtgctttgatcctcggtcagactactgagctaaaactcttaaacactgttttgtaatgcttcacagaatatacactagtagatcataaaatcttttgagtctgca

SEQ ID NO: 11916 - DNA, 1213 bp, Homo sapiens
ctgccagtacattggttcgttttccttttttttaaaaggaaaccatgtttaaaccacttttcttaacatgagaataaaagaagtatgctaattcctttttaggtcttaggtttgtctgctcctagtaaagattaaatagaatggagcattttatattacctatttcaaaagattagtcagattaaagaaatattttatatttatactttatattgaagttgtccataattatgtattaacacatggttgtttttctagtggtttgtttaatatgtcctttatggtagtaggctaaggatggtgaatgactagcagatagttgttttgtacctatttaacatataaactatttgtgcctatttctgtaaataaagtttattataaaagtgattctaagtaactcgtcacattgggaaaattatttttattttattaaaatgacttaaaatattgtaattgataaagtttattttaaaaagtgtttctaagtaactgttgtgaagtttggaaaattatttccattctgtgtaaatcatttcaggttttaaagaagtcagtgatcattcaaaagactcagagagctatgaatatgacttgataggagtgactgttcacacaggaacggcagatggtggacactattatagctttatcagagatatagtaaatccccatgcttataaaaacaataaatggtgagttttaaatatttcaaaacttctttaacaatttatggtagttttctgatatgttttcagtgtttagttttctaaaaacttgccacaaaagttggaaatgaggcagacaaaatttttaaatgaagataactttcaacagacagtgtaaatcagttcttaaacatacggatcttttaactcttgagaatttgaatcctttccttggagaaatgaacacagttttgcagacaactttaggagatttatagacaacatttcaactcttatcttctctattcattcaagagctgttcattgaatatcttctacagtgtagccttatatgtgccattagaagttacctgcatgctctgcttgtttcacctcctattgggaggaccacacacacttctttttatccttttatcaagttaatggttggaagtcattaaaccagtccccagtacctgttttttggtcttcagatattgttaggtagggtctggcctataggtactatatgtgtgctaggcact

SEQ ID NO: 11917 - DNA, 1101 bp, Homo sapiens
tttcaacagtataagtaaactgttgattttgccactgttattgttgctattatttattagtagagtgaagtaaggggaaagttaatgcagaagcgccagtcagacttgtcaagggaataatgaggccttaacaaaaactttacatcacttaatggaatagaaaataacaacattgtacgtgaagagtctaagaatgagcttattaggtatcaaaaaggagagaagagtaaaagttgatcgccgccttcgttttctcttaagagaaatgaacacggaggactttcagatgatggtatatcatgctgctatacgtttttgagtagcttaattgtagcctgtcatcctgtgtatatgttaactatatttggaatgtaattaatatctcagtttagataacatgtttccttttactccccaggaatttttgagagatatcttcaatctcctgtttttgttgccaagtctaaaggaccgacaacagccaaagtgcaaatcacattcttcaagagctgccgcttacgatttgttagtagagatggtaaaggggtctgttgagaactacaggctaatacacaactgggttatggcacaacacatgcagtgtaagcattcttcttttcctttaatctttatagattttgaattcagaaataagattttgagggcactgtttaacaaaagaatctgctcttcacacactttaacattataaatgattattggtagggtgttattaaagttaaaaagtaaacattgatgtgaaggacctttttatatgcattttaaatacttcggctttttctgtaaaagtaatttggggccaagtaaaatcaagttttaaaagtcttgaatttttagagaataaattagttttcatctgtatttttttttatttaaaaaattctatataatgttctatatatattaatgaggtaactaatggaggtagaggctgttaatgtaagcaaaatacattgtgtttcatagtttgtttgggggggatcttttcctccctctttcttcagcagcccatgcaccttataaatgggattactggcctcatgaagatgtccgtgctgaatgtagatttgttggccttac

SEQ ID NO: 11918 - DNA, 1585 bp, Homo sapiens
tatgacttttttttttattatactttaagttttagggtacatgtgcacaacgtgaaggtttgttacatatgtatacatgtgccatgttggtgtgctgtacccattaaatcgtcattgacttattttattatcaacattccattgattgtttttttgtagaatgatcagtgatgtttaagactcatttggttaattgacataatgtataagtaaagagtaggtgtattacgtttataacttattgaatttgggagaactaaattattgttacctataaggaaatgattttaataattttatgtttggtaaaacataaaaaatttatatttgaatttttattttctttttgtattaagacaacgctcctcgacttagatgccttggcaagacatttggctgactgtattcgaaggtaaaatttgatgtgaaattgacatttatattgtcgaggaaagataaaagacataattatgtgaactatcttgcttgtgtgtattttttttcttttttgtagtagggagatccttgatcatcaggatggtaatgtagaagatgatgggcttacaggactcctaaggcttgcaacaagtgttgttaaacacaaaccaccctttaaattttcaagggaaggacaggtaagtgttaagataatcaaatgtttctatgaaatgtgattgaaattttttgttgttacattgtgtattagtccgtttttacactgctcataaaggcatacccgagactgggcagtttacaaaagaaaagggtttaattcgactcagagttccatgtggctggggaggcctcacaatcgtgccggaaggcaagtccgggcaagtccgagcaagtcgcatcttatgtggatggcggcaggcaaaaaaagaatgagaaccaagcgaaagcggtttctccttataaaaccatcagatctcaagagacttattcacttatcacaagaacagtatgggggaaaccgccgccatgattcagtcatctcccaccaggtccctcccacaacaatgggaattataggcaatataattcaagatgagatttgggtggagacacggccaaactgtatcacattgtatgtggatatgttaatttttttaaacatacagacataaaaattgctagaaattaccgacaagaaaagcaaattttgaataaattgaattctggaaatataaaacgggcttgtttttagaatacaaaatcagatgttaattcctgtgactgactgaatatagaaaggtaacctaaggctgggcacggtggctcgtgcctatagtcctagcactttgagtggctgaggtaggtggattgcttgaaaccaggagttcgagaccagccaaggcaacatggtgaaacctcatccctacagaaaatacaaaaatttgctgggtgtggtggcacacacctgtagtctcagctactcaggaggctgaggtgggaggattgcttgagctcaggaggtcgaggcttcagtgagccatgatcacaccactgcactgtagcctaggtgacagaaggagaacgtgtctcaaaaaaaaaaaaaaaaaggtaacctatattttatcagtgt

SEQ ID NO: 11919 - DNA, 1169 bp, Homo sapiens
tatttatatattatggtataccttgagatactttatttgatcatgtgtaatttacatatatatatgtatgggattagaacattatatttattaattatttttatgaggcataatcttgttctgccacccagtctggagagcagtggcatatcagctcactgcagactctgcctccctggttcaagcaattcttgtgcctgtctccagagtagctgggactacaggcgcaagtcaccacacccggttaatttttgtattttttgtggtgacagggttttgccatgttggccaggctggtctcagatacctggccacaggttatcctcctgcctgggcctccaaaagtgctgggattacaggcttgcccggcagaacattgtatttaaaatcacctaaaattatttctgctaacatattaactttgtaatactaactctcactgtttgtggaactttctttttcatctagactgcagttcgtcatgaatcatgcagtggtctctataagttatccctgtcagggctggatggaggagactcaatcaatcgttcttttctgctattggctgcctcaacattattgaaatttcttcctgatgctcaagcactcaaacctattagggtaagattttactgtgtttagaagcagtttctatttttgaaatttcctttgcctcagtttaccgttgtaatatatccttaaaattttgatcatttgactactgtatgtgattttttaccaagaggatagtagttatatactacttaaggtgacagcattgtgacacattgtgtccatgttactactaggaagagactgatttcagctctgtggtctctcatggatactctattttagaaatagcatttattctcactcggttctgggccttgtgttaataagttgactaataaaaaatcataaatggagctctcttctctagtaagtcacagttttctttttatctttatgatattcagaattttaaattttatttcctaccctagttcatatactagtctttaaaaggcttctaatacataataaatttagagcccactttttactaaccccagaaattcagtgtgttgttggatttacattattttcctccctgttcatatcttttttaatgtcagtaatttgagactaatattttcctaaaagtt

SEQ ID NO: 11920 - DNA, 1208 bp, Homo sapiens
aatatagtctcttttgcaaaaattagctgagtgtggtggcacatgcttgtagtcccagctattgggaggctgaggtgggagggttgcttgagcctggaaggtcaaggctgcagtgagccatgatcatgccactgcactccagcctgggcaacagagtgagaccctgtctcctgtcttttaaaacacacacacactcacactctctctcactctcactctcactctcactcacacacccactgctttccttttttgggggggaagtgataaccttaaaggatatatgttaataaattgaattatttttaattcattgctgaatttaattggtggtggtggtgtttttactttacagagttttaaaagctcagtctgatcacaggtctagacatgaaggtaagggttccacaaagttaacttttaataaataaaaacttgaataatatattgatatattttacctttaatattgaacattgtgttttcattttagcacaaaccttttatagtgaactgttttctaatttttctttagtttcacattattcaatgtggctcttggtgagttgggctcattgctgttctttagtgaaatctagccttgctgatagcgatcatttacaagattggctaaagaaattgactctccttattcctgaggtaagataaagattgaaggttagtactgttattttttgtatgttttcatgttattagcattgataataaaagagctaatggaaacaaatatgcgtgagtccataaatatatcacattatctgcttaatcctttaaggtctagagtgttttgaactatgtacaatgtttaagaacttctgactattatatattatgtagcatttatatttttctgaaatgtttatagaatgattattttgctttggattaataaaaaaaagtttttccaggtagtaggaagggcttgagaatttattttggtaatttatgttttagaaaagttctgtggccttttttttttctttctttgagacagaatctccctgttccctgtatcacccaggctagagtgtagtggtgcaatcaaggctccctgcagcctcaacctcctgggaacaagcgatcctctggcttcagcctcccaagtagctgggaccataggtgcacatcaccatgcccagctagttttttaacttttttgtagagacggggtctcgctgtgttgtcca

SEQ ID NO: 11921 - DNA, 1103 bp, Homo sapiens
cacaatctcagctcactgcagccactgcctcccagactcaggtgttcctcccttctcagcctccaaagtagatgggactgtagacatgcaccacacacccagctaatttttgtatttttagtggaaacagagttttaccacattggccagctagtgtcggatttctgggctcaagcaatccacccacctgagcctccctaattgctgggattacagcaattacagtgagccaccatacccagcctacagttgctgctcttaagtgtgattataaaattctggttttccgattcttggcatttttacagtattttcaaagaattcttacgacattctttattgtgttatagataaatatcaaaataatttggaattttgggttaaaattttgtaatacacatctctttagtaactaaatcttgagtgctttttgagggttttccttttgctgtatttaaatatcttttaaaatgtttttgttttaaaggtatttcttgttcttgtccaaggaaccagtttgattcagcgacttatgtctgttgcttatacgtatgataatctggctcctaggtatgcattttaagatatattttatgtgtgtatgtatagcaggaatataatgttttaaaactttattttgaaaaattctaaacttaatagaaaaatttgggggatattatgatgaaatctctcataccttccatccaaatttacgtattattaacctgttgctaaaatgtgtcttgtatttatgagtcacgtattttctgtgtgtttacatgttttcctgaatcttctgagactgaattgcagatatcatgactgttcaccagtactttgttgtgtatctcctaagaccaaggagattttcttaatagctagagtaaaatttttaaatttatagaatttaacattgatatgttatctaacatatagttcatattaaaataatcctattggtattctttatagcagtatttttcttgcttcaggatcaactaaatgtattgcatttagttgtcagttcttctgtttcttttcatcagagataactttctcagcctttctctcatgatacattttcaagtaatgcaggccagtta

SEQ ID NO: 11922 - DNA, 1179 bp, Homo sapiens
gaattactagcaattgctttggtccgtaagtattaagagtttgtgccactcgttgggagacacagcatataatactttgtttctcagttaattttattgataagtaatatccttgtcatcttaattttttaaaaaattataaattatgagcagtatgttttttcaaaaatctcatagctattacatatatttttatattgccttcattaaagaaatgaaagtgtcatttccatttcattaaatacatcttgtataccctctttatttctagatactttttcttcatttttataagattgaattggtactgaccataatatttgagcagcagaatttttatagtacatgattaagtactagctataattatttttattttctggtcttttaatttcaaaattgtattgtggccattctaaattaatgaaaatagggaattgactatttcttctcatttacagtggcagctagactgtcttgcttgcttgctgaagttaatatgccagtttgcagtagatccatccgatttggatttagcttatcatgatgtctttgcctggtctggtatagcggaaagccataggaaaagaacctggcctggcaaatcaaggaaggctgctggtgatcatgctaagggtcttcatataccacgattaacagaggtaaagtgcagaaattaatgtttaatgatgaattccatttatttttataaactgaagaaatatgctaatgcttaagaaatgtattctagattactgtgacttaacctgacagctgaactgacggcattgttttaaagcagtagtgattatgaagcagtattgcttttcatttcatcatccagaatgcagaaatgagtcgtgccattttaatatctgtgagactgaatttattatttgaactcagtaatttatatactttggggatgcatttatgaaaacagaagccatagttggtatttcaacataggaaatttaaaatagagaatcagttttacacgtatgtgttacaaggctttaaaaacaaaagggagtggtgaggtaagccagataaggagccatttatcacccctagatcttgtggaacattagggaagtggttgggttatcaggaacttagaagcttgcaggagggatcctgttaaaccggggtttaggcctctgagaaagcagttacgct

SEQ ID NO: 11923 - DNA, 1450 bp, Homo sapiens
cagctacttaggaggctaaggcatgagaatccttggaaacctgggaggcagaggttgcagtgagccaagattgcgccactgcactccagcctgggcaagtgagtgagactctgttctcaaaaaaaaaaaaaaattgggtgagaacttgagttagcatatgttgttaattttctgtgaatacaagaaagcagtggttttctcagtttaggttggatggattcattgaagcattgtgctcgttattgtgttggttttattcctttatagtatgtttttcaggactagaattttcgtactatgtagtcacaacttgtgagttaaacatgtatatattgttatctgctgtataaatattttttagaactagtacaggtgtatttcatcaattgaggaaatttttaaatcatttatttttattatttaatagctgaataataggagttgcctatgatttttacttttgatacttcagtcttaatgagttacatagtttgacaaacaaaatttagagataccatatttttctttcttagctgtgtggtatggaccaattttggggcattgctttaagagcacaatctggtgatgtcagtcgagcagctatccagtatattaactcctattatattaatggtaagtgatttgaaacattgtctgataggtaatttctatgtgagggtgttttgtgaaactaaaatttttctttgatatagctaaacaagaatataaggctaatatatgtgtctaaacatttggctttcaggtaaaacaggtttggagaaggagcaagaatttattagtaagtgcatggagagtcttatgatagcttctagcagtcttgaacaggaatcacactcaagtctcatggttatagaaagaggactccttatgctgaagacacatctggaagcgtttaggagaaggtaatttttaaaatatcacactgttagaatgaatttcatttttattcctgacatatccagaaatattcttaaagtgaatctaaagtttttgttggggtcaagtagaaagcataatttaccaaagtgaaggatcagtaacataagtaatttttattaagaatatataccattttgccttggaataggcaatacgggttcctgataaatattgcacacctttaataatagagtttgagcagatatgcatgaataagaattgttagacagaattccatctctaagataaagtattgactttgattaaaaaggcagaacaccactactaaaaaaagtttctctaaaactcttaccaagaacatcaaataatctcatagttgaatcaagttgagtcatatgtttcatttgctgttttttttttcttcctggactaggagacagtattttaattttgaatttccatttaccatggaaacatgaccaaaaaattctgttaatgaatatctgtataattaatttagacataacct

SEQ ID NO: 11924 - DNA, 1108 bp, Homo sapiens
ctggagtgcagtggccgatcttgtatcactgcaaccttcacctcccaggttcaagcaattctcctgtctcagcctcctgagtaactgagattacaggcacacgccaccatgcccagctaattttttgtattttaatagaggcagcgtttcaccatgttggccaggctggtctggatctcccaagctcaggcagtccacccacctcggcctcccaaagtgctaggattacagatgggagccacttcacctggctgctgtgattcttttttttttttttaatcataaatatgctgtaggaacataactcttatttatatcaattaacatatggtaaagttagtttcattatgcatcatttcaattaaaattgcaatttccaagaacctatctgtgttaagtgaggacttactgtacatacacatgcctaagagaagtttaatttttttgtatgtagttaataaagtataaaatttataatttttatctagggttaagtttagagcaagttgacatcttatggcattgtttagtagaagattctgaatgttatgatgatgcactccattggtttttaaatcaagttcgaagtaaagatcaacatgctatgggtatggaaacctacaaacatcttttcctggagaaggtaattacatttctctcagtttgttattatttttccatgttccctttttcatctcttgaaatacgaattctgtaatgcctttttttttttgacagtttttttaagtagccaaatgtaatgaattttagcagtcctaatataatttttggtcagattgtgctctaattttgttgtttacactgtttacctctaaattaatagtttatatttataaaaatgttctattagctacaataattcaacaattacaataacttttgaaggcagcactaattttcttagtgtttgtttttttgaaataatcagtaatattgtagtccaattttcaggggtggtgcccacacccacaagtgtgagagctgttttctgtgactcttcatgatttaaataactgtcattgcagtcagtcttttgggcaaagataagccattctccagatgtgtagattgtgggaaggcatattaa

SEQ ID NO: 11925 - DNA, 1160 bp, Homo sapiens
ggtatatatacataattcatgtttgggcttgtcctctcctttacgtaatatttttgacatcctttgagtttttaattccattttgtattgttcaaaggagtataacaagactggcagcctttttaaaaagtacagtttattaatgttggttaccttttttcttactggtttaaatatttatttaaatctatttgtttcaaaatacaggaatccatgcagggaagttctgacgaaactgccaacagtggtgaagatggaagcagtggtcctggtagcagtagtgggcatagtgatggatctagcaatgaggttaattctagccacgcaagccagtcagctgggagccctggcagtgaggtacagtcagaagacattgcagatattgaagccctcaaagaggaagatgaagacgatgatcatggtcataatcctcccaaaagcagttgtggtacagatcttcggaatagaaagttagagagtcaagcaggcatttgcctgggggactcccaaggcatgtcagaaagaaatgggacaagcagcggaacaggaaaggacctggtttttaacactgaatcattgccatcagtagataatcgaatgcgaatgctggatgcttgttcacactctgaagacccagaacatgatatttcaggggaaatgaatgctactcatatagcacaagggtctcaggagtcttgtatcacacgaactggggacttccttggggagactattgggaatgaattatttaattgtcgacaatttattggtccacagcatcaccaccaccaccaccaccatcaccaccaccacgatgggtaagcctacttcaaaataaatattcagttcatatttcctttagggaagtattatatcctatattcaatttgcaatttattctgtattagtgctattcattagtagtatagtgcaaactataaatgtaagctacaaatagataatttcaagttttctattgggcacatttaaaaacacaaaatgaagcaggttgttggccatgcacagtggctcacacctataatcccagcactttgggaggccgaggcaggtggatcacttgaggtcaggagtttgagaccagcctgaacaacatggtgaaaccccatctctactaaaaatagaaaaattagccgggcatg

SEQ ID NO: 11926 - DNA, 1187 bp, Homo sapiens
gaaacctttcctgagtgcttcaatacatactgtggaaattaaaaagtgggaaggcaaagacctcgagtaggataatacatcactaaatcagtgttacacttgtgtacttggtgttaatcgttaccttttcagttattcgttgcttgtttataaactcagggaatttgaatttataaattcagcatcatatttcattctagttatgctttgtagtattctataaaactgattgtatctaattctttataattcctataggaacaaatttaggttttcaattgactctaccttttagacatgagaaaagatgacaattttttttaatgtactattttcattgcttgactttaggtccattgcaaaagaacttgcagactggcttattagcaacaatgtggtggagcatatatttggaccaaatttacatattgaggtttgtggatgattacataacttctctgttctattgatagagaagaatatttttaaaaattgatattaagtttttcttttccagattatcaaacagtgccaagtgattttgaattttttggcagcagaagggcgactgagtactcaacatattgactgtatttgggctgcagcacaggtaatattaacagctcacatttattgagtgctttgcttatcatatgttctaagtgcttctctgtgaggtaaattctattatcctgttttatagctaaggagaccaagacatggacaagctgggactgaaatctggcttccgagtccatgtcttactatgttactggtagaatggaaggaaatcagagtcagtcagttggagcttcttcatgaaaccatcctggtttaataaagagacattttcctgttattctcatttatacagtctacccttctatcctgaattattgtattggtatgtttcttgtctgatgtactgtttttttttttttttttttaaataggcatatatccacatgattcaaaattccaaaagtaaatataaaaaatatattacatgtttttcctttctgccccatctctcaagcatgcagttattatcttctcaggtatatcagatttttttgtataaatagcgaactgtatacatttttcttcctctttctttttcacaaatgtagcataccaaccagatgtggctttgacttttttttttttctttcttaatttattctgga

SEQ ID NO: 11927 - DNA, 1269 bp, Homo sapiens
gattggtcttgtggggtgagcgggaatctcatatatgtcttgtagttggcttcatgtcagttggagcatcaggcacttctctttcatccagcaggctaaccttggttccttgttttgttggtgattagagttcccagcaagagaaggcaagctcaaaggcttttctagcttccacttatgtcatgtctattaatatctcattggccaaagcaagttacatggcaaggcccagatttaaggtgtagaaatagattacaccttttgatgagaggaatagcaaagtcacattgcaaattcttgtacatataatgatgggaggaatttgtggccattttgtaatccattacaggccttgaggaagactaatgttgaaaggttggacagcagagaaggaatctgccaaagagattaggcagggcctgagaggaaaaccagaggtttgtgggttttggacacaaaaaatgttaatgcttacaatgtacattttaagttactgagtggtctttaaaaatgctttatgaatttttgtgtattttctatttctgaatcatttcaggtatttatgcaagctctcggatcaggagttacgacagagtgcagctcgtaacatggctgacttaatgtggagcacagtcaaagaaccattggatacaacattatgctttgataaagaaagcctagatcttgcatttaagtactttatgtcacctactttgactatgaggttggctggattgagtcagataacagtaagctgtatttgttttatttttggtcatcgtttatttgttttctggtctatcataatactacccactatttatggagcacttcatactaggcattgtgctaagtattttatgtggattactttatatggtcttcacaaataatttctgtgtttctcttattttaaataagtctgaagcttagatttatatggatttatactgtgggtccatttgatttccgggtccaactctttcatcattttgtttctgtctttttaaactatttaggtttttatgtttatagatgttttgagaaagaggaataattggagggctttataagcagttaattaattttccaggcagaaaccatagattattgggccgtaggccaaattttactaaatgtttgttttgaatagtcttaaatactgtttttaaataggacaaagtaacatgaaaatctgtattcttggcttctcttggtgagggggttggaagaaggcctggtattcttgggtctgtattcttgcataac

SEQ ID NO: 11928 - DNA, 1443 bp, Homo sapiens
ggaagagagagaaatagccctacggcaggctgatgaagagaaacataaacgtcaaatgtctgtccctggcatctttaatccacatgagattccagaagaaatgtgtgattaaaatccaaattcatgctgttttttttctctgcaactcgttagcagaggaaaacagcatgtgggtatttgtcgaccaaaatgatgccaatttgtaaattaaaatgtcacctagtggccctttttcttatgtgtttttttgtataagaaattttctgtgaaatatccttccattgtttaagcttttgttttggtcatctttatttagtttgcatgaagttgaaaattaaggcatttttaaaaattttacttcatgcccatttttgtggctgggctggggggaggaggcaaattcgatttgaacatatacttgtaattctaatgcaaaattatacaatttttcctgtaaacaataccaatttttaattagggagcattttccttctagtctatttcagcctagaagaaaagataatgagtaaaacaaattgcgttgtttaaaggattatagtgctgcattgtctgaagttagcacctcttggactgaatcgtttgtctagactacatgtattacaaagtctctttggcaagattgcagcaagatcatgtgcatatcatcccattgtaaagcgacttcaaaaatatgggaacacagttagttatttttacacagttctttttgtttttgtgtgtgtgtgctgtcgcttgtcgacaacagctttttgttttcctcaatgaggagtgttgctcatttgtgagccttcattaactcgaagtgaaatggttaaaaatatttatcctgttagaataggctgcatctttttaacaactcattaaaaaacaaaacaactctggcttttgagatgacttatactaatttacattgtttaccaagctgtagtgctttaagaacactacttaaaaagcaaaataaacttggtttacatttatttttcctttattgactcatttattcctatattaatgatagtgggtatttgtgtttaagcatcaagtaacattttaaatgaagttggaccccttgatttacaaacaagatttctaaggttattgttcctagtaaatgcagcagttgtgtaaaatgaacatgttcctaagataccttttgttctcaagaaacaaattcctcctgtggcattttgactcattttacctttatttgggattagagggcacttcttgtctaactctacttagcatctaaatgtaacaaagaataaacattagccttggaatgagaacacagatgtaacctggtacaaatactaattgtattcttaaaaaatgtaagtaaactaagtagccatgagccttctcaaaagggtgagtggagccaggcttggtagctcacacctgtaatccctgccctttggg

SEQ ID NO: 11929 - DNA, 1099 bp, Homo sapiens
cctagagatataagaataggtatactggacctaggagttctgtatgtggtttaatattagcaaaagggtgttgggatattagggcttaaaaataatagtgttggctgagtgcaatagctcagacctttaatcccagcactttgggaggctaaggtgggaggattgcttgagccaggagtttgagaccagcctggacaacataacaagataccgtctctacaaaaatgttaaaaataagcttagtgcgatggcacatacctgtggttccagctactcgggaggggctgaggaggactgattgggcctaggaggtggaggctgcagtgagctttggtcataccactgcactccagcctggacagagtgataccttgtctcaaaaaaataataataaaatattaagtgtctttagttgttttataaaatgcgaactgatcgtcccttttaaaatttgcagatgcttcctttaaataccaatattcgacttgcgtactcaaatggaaaagatgatgaacagaacttcattcaaaatctcagtttgtttctctgcacctttcttaaggaacatgatcaacttatagaaaaaagattaaatctcagggaaactcttatggaggtaagatatgtggagcttttgctcctaaaattctgctctgcctactaataactcttaaaagtgcctttttctaaaatgtatgtaccttttgagatttcttattacttaatatttgatcagtacattatatatattctcaattctgaattacagttataagcccagttttctgattttatgttctccataaagctaggactaaaaatttataatcaaaattaaattactaattattatatcatttctaaggttaaaatttcaaagaccttattttaaaatttcagttttaattcaaataacatgcatttgttcatttaaagatatacaattcatcgtgtaatcccagcactttgggaggcggaggtgggtggatcacttgaggcaggagttcgagaccagcctggcctacatcgtgaatctctgtctctattaaaaatacaaaaaaattagctgtgcgtggtgtcacatgactgtaatcccagc

SEQ ID NO: 11930 - DNA, 1207 bp, Homo sapiens
aaaaatgttactgtttcaaataagtaaaatatttgcacctttaaagattaggagttggctgggcatggtggctcactcctataatctcagcactttgggaggccaaggcaggcagatcacctgaggtcaggagttcaagaccagcctggccaacatggtgaaaccccatctctactaaaaatacaaaaattagctggctgtggtggcacctgcctataatcccagctactcaggaggctgaggcgggagaatcgcttgaacccaggaggcagaggttgcagggtgctgagatcgcaccactgcagtccagcctgggtgatagagccaagactctgtctcaaaaaaaaaaaaaaaaaattgggagtcatatttatataattttatttctatttctgtaaggtctaatttttgagtatttctgaacatcaataatagaatctctgtccaattagaatttgtgccttgctcagtagttttcattttaatgaatgattcaaaagaatacattagcttaagttttgttttttttaataatattttagcaaagaatggctcaagaagtactgacacatttaaaggagcatcctgatgcttggacaagagtcgacacaattttggaattttctcagaatatgaatacgaaagtaagcaagtggtggttttaaaatctgttatttcttttcttccagtcataaactttgaggaaggtatctcatttttagtattagcatttgttatctcaaattattttatattgttaatttgtttcaaaatttagtcttaagcatataattaattcttgcaaatagtcctaagaattatgaatgaagttttgtaatgggactagtatgcaaggtggcttttttggttgtctgattttgtttttttctttttagtatatgtatacaggtctaagtagcataaattctgaatgttattcagagattaaacataacattaaggaattattttgggcaagtaatcaatataatacaggccaggcacctctgacaccaagttgtgtggacagcttaaaaccctactccatggcattgggcttctaatgggacagcactcagtttttatttacaatggaaaatgttataattctggtccttttttaagtttgaacagaagggttgatcaaaatgtgttttgtctgttttaggcttgatgattcacgcttctctttaaactgccttaaagt

SEQ ID NO: 11931 - DNA, 1606 bp, Homo sapiens
ccatctcaaaaaaataaaaataaataaataaatggggaaaaaataatgacctagttatttcgtgtgttttatagtgtcattggggacagagtacattttaatactggaattgtactaaaatttccaatagaattggaaatcttaattttgaccttacgaacttagtaaactaaagcatttttcttcagaaataatgattggccatttaagaaacagtaattaaaaccttaaaggcatttgaagagcaaaatttttttaatctagcattgacataatcactgattttgtattttagagatgctcttagtgatcttgcattacactttctgaataaaatgaagatcatggtgattaaggatattgaaagagaagacattgaattcatttgtaaggtaaaacattaacatctgtatttgtggaaaatgtctgataattagataaatgtcttaatttgtggatttgactgttttttccagacaattggaaccaagccagttgctcatattgaccaatttactgctgacatgctgggttctgctgagttagctgaggaggtcaatttaaatggttctggcaaactgctcaaggtaacagtattacacttaaatttttatttgcttaggtttgggtatggggttttaggttgttttttttctttttttgagacggagtctcactctgtcgcccaggttggagtgcagtggcatgatcttggctcactacaagctccgcctcccgggttcatgccattctcctgcctcagcctcccgggaagctgggactacaggcgcctgccaccacgccctgctaattttttgtatttttagtagagacggggtttcactgtgttagtcaggatggtctcgatctcctcacctcgttagccacccgcctcatcctcccaaagtgttgggtttacaggcgtgagccgccgtgcccggcctgggtgtggggtttttttgacccttcaaatacttaatttggaatttgtttactgaagattacaggctgtgccagccctggaaaaacagttacaattgttgttcgtggttctaacaaactggtgattgaagaagctgagcgctccattcatgatgccctatgtgttattcgttgtttagtgaagaagaggtaatgtcagtgttacattattaagtaacattttgaacattaaaactattatattctattttttaaagatataaatagcaaattattaaaaataattttcttttggataaaataagctaaaaatatatttgtgaatttcagggctcttattgcaggaggtggtgctccagaaatagagttggccctacgattaactgaatattcacgaacactgagtggtatggaatcctactgcgttcgtgcttttgcagatgctatggaggtcattccatctacactagctgaaaatgccggcctgaatcccatttctacagtaacagaactaagaaaccggcatgcccagggagaaaaaactgcaggcattaatgtccgaaaggtaatcatttaatctctaatgtagaaaatattgattaatttaaaatattaaaagctttgtagtcatctgttgaatggaaagctctgtaatgaaaagcat

SEQ ID NO: 11932 - DNA, 1205 bp, Homo sapiens
tcttcatacccacaccccactgcaaaaattataagagtctttcttaagtatctttgtcattgaaaaattaggacttttttctactgtgaaggtaacttttttttttttttaataattctaggtggtttctcagtattcaagtctgctttctccaatgagtgtaaatgcagtgatgaaagtgattgacccagccacagccaccagtgtagatcttagagatattaaaatagttaagaagcttgggtaagcatctctaattacaacttgaataaaaatttgaaaatgagcatcagattgccaaaaataaataaaaacacctagatgaaagtcacaaagctctcttttctctttttggttttgttttcgtgagaatttgtattagtatgggcatctggagattttgtttatgttaccttatgatagtaaggcagcagtggatcaaagagatccaggagtggggcaataataaatgtgaggctgaatcatattttattggactgatgacttttaatctgttcatctattaaacgtacagatgtccactccctcttaactacccctctttgttttcttttatccttagtgggacaattgatgactgtgagttggtggaagggctggttctcacccaaaaagtgtcaaattctggcataaccagagttgaaaaggccaagattgggcttattcagttttgcttatctgctcccaaaacagacgtaagtagaatccaaatgaaattggttctctgtgtttaactttttaataactcaggcatttctttattaaaaatagaaaatactactagtgatttaaagcagatctcaaaagacttactagaattgagacaaaaatagtaattgttggtgccacaagtgacaagtctgtatcctcagttgggatattgaaattgagagctagccatttgcaacgatgcctgtagtcccagctccttgggaaattgaagcagaaaaattgcttgaacctaggagtttgaggttgcagggtgctattccatgacctgtgaatagtccctgcactccactccagcctgggcaacatagtgggaccccatcttttcactgttgctgttaatttacaaattcacacagattagagagggaccctatcttttgaaaacaactagggtaaccattttatattttttggttataaaaaatttacttgcaaaatgtaagataccagtg

SEQ ID NO: 11933 - DNA, 1063 bp, Homo sapiens
aataatacagggatgtaggcttttaagccaggaattaaacttgaaaacaatggtgccttccacggacacccttaccaggtgactcaaggttggcagaacacatcacatatatcccctcaggtatgaaaatggtaaatgtatcctggagtggcccagcatctcagaaagcaattataataaaatattcctaggatgtgttttccctgaggatgagtgatgactttgactcttcatcttctaactccaaagcactgctgtctcaaatagtcaaaatgacaagggaaggaatgttttcgttggagagtctcaacgctgtttccagcacatttttccatttgcctgactgctcttggccctgaatggagtcggaggtggagttctttctactgaaatcataaaagtctctttattggcatgtgtgcattcagatatgctcttggtattgctcatgttgttagctgcagctgggtttgctgtgagtgaattgtttttgtctttagttaggatcacatgttgactcatgactgcctgtatcctgcgattggagtaggcattttagtaaggggcttaattattcttgtatttttgttttgtctttttcactcttcaatccatatgcttatttgggcttgcttgcaaaaggaagaaatatttggttcattccattttatgcaataaaggcaagagcttactgggggcttgggagctgtttttataacatagggggctgttttcatgacctagcagactgaagttttcaaaataaattgggcaagccttaggcgttactaaaatgttgtgagataaggagtgcacttgtgccccaatttgaactctgttaaaaaaatttttaaaaatcaaaaataaaacaaaaaccttgcatcaaagtgttaatatgtaagcctgtacatttgagctccacagtctttacacatattaaatcaacaatcagtcagctgggcatggtggctcaggcctgtaatctcagcactttgggaggtcaaggtgggtggatcacttgaggttagaagttcaagactagcctagccaacacagtgaaacc

SEQ ID NO: 11934 - DNA, 1153 bp, Homo sapiens
tttaaaaaatctcctaactagatttcatatactcctcccattaaagctacttacttaaatgaagatcttgaaaaaacaaatacatatattgaattttattgctgagactgcctaaagacttaagacatgaaaaatcttatcagtaaactgttataaaaacaacaacaaaagccctatatgtaaatgtaaaccaagcaccttttaatttctctatgaaggttagataatgctggtggccttgcaagtaggcctccaaaaggggctggccatgctgtggcaccgggtccacttcccgctcttagttctacctctaacaaggagacagagaatctagaactactgccaggattgttacagaaggacacattacaattttccttaactgttatttgtttttcatgtttaatattgtttataaaaaaagttacttcactgtaaaaaaaaaaaagttgtacataaacttgatcactgtaagataatcaaattgcatttcagttgcaagtacactcttttgttttccctgtcacttagggaacggttatcatcattgcaaatcatggtgacagaattgatatcccacctggagcagtattagagaacaagattgtgtctggaaaccttcgcatcttggaccactgaaatgaaaaatactgtggacacttaaataatgggctagtttcttacaatgaaatgttctctaggattctaaaataggcaggtactttactatgttactgtaccctgcagtgttgatttttaaaatagagttttctgcagtatgcttttagtctaagaaaagcacagatggagcaatactttccttctttgaagagaatcccaaaagttagttcatcttaaagtgcaatattgtttaatcttaaaactgggcaactttggaagaacttttaacagaagcctcaatgatgatcactttgaattgcttgtgatttcaaaaataaagcagtgaagcaatacttgtgtacactggtactttataatgctaactataaactggtttattgttgttagacagttactatattagttggaagatttgccctttaagtacacactggctagttacctagccagtgtgtacttaatgagtccagtttttggcatttctaagaatcttaatcataccattatttcc

SEQ ID NO: 11935 - DNA, 1762 bp, Homo sapiens
acttagaaacctagcctgcttttcccttgagtttactattttagtcagcactcccatactctagtgctaaccaatcaaaaacattttagtttagcctgttattttctctgtatattaattcatgctgtttcaagataaatctgattttcttgggctgaatttatcatgaaactgactctaacagccattggtttattcattttccaaatatttattattgaagtacagcattaaatggcctacttattcatagcaggaatcctgctaagtaaagtatttggacacttgggcactaagaaatctgaattttagataataggactctgactcggtgagcactgttactttaattatctgaatagaaagtttgagatttaaaaaataattttctctccattatttaggttggtcacagcagatgtagctttttacactggaaatcttcaagccttaaaaggccttaaagatttggacctaaatatggccgaaatttgggagcagaagaggtgatgtcatcctggaaaactgggtagttcatctgaccatgggatgtgtttgttatgaagaaaatctggatgcctgtgattcgagaattgaacctgaaacccaaagtgaactggggtgggggaagggaaaaaggaaagtatcaagtgttgggaaactggattcagtgggatctacaaggaatgtcatttttgtgcatcctacagtgaggagtaactgatcaggtgtctataacatttttcattctctctggaaacagactcaggtttctttggaccaaatccaaaagaacacatagctgtaacacagctgtagttgactagaatgctctgtatactttatattaaaaaatgctttgcatttcttccagtgcaatgaaattcatatggtgtcccaccttatttaatgatggtacaatttaaaatcttagtcaacttctgtagaaagttttctctatgaaagtaaagctgtttgaaaaattattatttttttacagatctttctataaaaaataaacatcttttgattgcttggatttaggaattcaatttttgtttcagtgaccaatgtcaagttgcaggctttgtgtgttgcatatttaatatttctactaccaccgtatgtcaactgggtaaagccttccagagctctctaaatacctgaaagacttaagcctttttttaagtaattaatacttaaaaaaaaagatcctggcatctatttatgcaactaaatacttttcagaaatggtatataaaaggctacagtttaatatctgtatttttataaaagtatgatgaagggtttggggtgtttttatttgtagcagaggtaagaatatgtattcatataatctgcctacttttgagttctcatattaacatttagataacatatgaagtatggcccccttggatccttgtttttaagttactttcgatgtgtatacgaacaaagaccagggagaaacagaacttttaaaactataggctgctgtgttggggccagaaataaggtgacaagtaaagacttttataatacctaccttcaaaattagaatcagcagcactgtacaaataaagtgcctgtgcttcacctcacaccaagaatcttgcctaaccctgtcagagtgcctaatatcctgtggtgattatgtataatgaaacagtcttattttgtgctctttggtttcttaaaaggaaagcttgttttctttcctttatcattacagaggtatgtctttggttcttaaactatc

SEQ ID NO: 11936 - DNA, 1099 bp, Homo sapiens
ttttttttccatctcactaagaaaatctggactaggttttcttcatcaattcattagttatgatggaggacctactatgttggtaatcagaaacactggataggctttttgtcagtgtttctgaattggctaatgaatgcaatacctgtcttactgaagcgactcccttacttaataagaatgccatacagagagtattatgcctgttgtacagaatttaaggagccactcattctcagtgttgtgcaagctgatcctgcaattgcacagagtaagagcctctttaaattttgcattctagacacctctcttgtcttgtgttagtcaagaacctgctgtactagtaggtaaaatgcatactttaacatagttaccaaggtcattatattctcagagatcctttgtgccattaagtaatttgatttttatatgccaaatccttttgatttttcttgttttgatttcctattgggccatttttcttttcttgtagaaccgtattgctgttaataagaattatccttgaatattgccagtgtgtggataacatcccatctgttactactgacatgcttactcgtctgtcagatttattgaaggtatgtatgacttcactccattatggaaaaatttttcgaggaattaatacattagggtgtgactaatcttaactcaaagacatttcaaggtcaaattaactttaagacattagttttataacatttgattgtggttgaatcacaacatgttattggaaacaggctgcctgcttccttcttactccacagttagtgatcctcattcacccatagagttgttaatgacattggagacaggagatgatttgttcgttaggtgctgaacatgactgaggccacttaggtcaaaaaacctggactggcttcaaatgtgcatggaaggaattcactgaactttacaaaattcatctcactaaggttagagatttttcttgcatcattctttcagaaccattgatataaaatgaaaatgtgatgattttattcagccatttcatattgagatattttaaactaccagtacggaggaaatgctttattatttttttcaaacctctaat

SEQ ID NO: 11937 - DNA, 1755 bp, Homo sapiens
taacatttaataaagtcagtgttaccactgatgtggtctactagggagatgttgagatatgaagtaatctaaaataaataggagttattaaagcattattttcagataaatgattaaatgacattttgaaatatatgttaataactaatttgaaattaatgttgttttacatatatagtaagtctatatatgtatacctaaatatatgtagttaaacaagtttataataaaactccaacattgtgaaaattttatagtatgacctaaattcatttgaactactatattagttataaagggatcagaatcaaatttggacctcttaagcatttcatgctcaatttctgggtctgaagtattgggaaatattattaaaataaaaaatatatagattataataatcgttaaactaacttggtttcataactcaatttggtgttacactaactctcatgatttttgtattaaaatttaggatggttttcttgagaagctaaattccatggaattcataacactttctagattaatggaaacattcattttagacaccgaacagatctgtggaagaaaaagcacgtcattacttggagcacttcagagccaagctattaagtttgtaaataggtttcatgaagagagaaaaaccaagctcaggtatcatcaccatgtccattctgttgtttgattttttcatttttctttgtgaaacacagttatgtttaaaagaggaaacctaattggccagtgaaaatgcctgataaaggtttttttaattaaaggcagattgtggaattaaaatcacatttcttggcttttcaaagtggagttagaatgtttacttctattaaagtacttatcaggaagatcctcagtaagttgacttttgttcccactcaaagttaagtaaattgtttcatcattctttttgattaggctgagatataaaaagggaactattttctaagtattggtcctgcttattaaagtgttcagcactttttaagtcttatgttctcactcagctcttcttccttttcttttaaaccaaggaagatggtattgaaatgttaaagtttaccttcttttctccttactgtggactagcctcctcttagacaatgagcgctggaagcaagcagatgttcctgcagaatttcaggatcttgttgattctctgtcagatgggaagattgctttacctgaaaaaaaatcaggaggtatgtgtattcattcacacattctctttcaattttatattgtttatttattttgtattaatgcttaatatttctttagttgacaatgcctatttcaaagctagaaccaatatttccagcttagtaaatacttgacaggaaaactatggtaatttataataattatttcaaatatttattgcgtgttataaccatatgccagacactggaccatgttctttacatgcattactccagttcattctcacaacgatctgtgatacaggtactattgtttctttgtgtaacagtgaggaggcttgaggcttagaagggttaaggaatttttatacaaatgatgagttgggatttgaaaccagctttatataatttcatagctatgttcttagctactataccgtattgtttacatacatgaattgagtaagcgctagttagcttctactttgtgtcctatattgagacagaattgagacagagataacagctgtatttctgctttaaagaggctaagtctaatgaacaaaaccaaaaa

SEQ ID NO: 11938 - DNA, 1091 bp, Homo sapiens
aactcaagcaaaggaatttctgaaagtatcagtcttctgaattctgagttttgaaaatatattttgaggagaaaaagacatagtctaatttgatgccttccttttagtgtttttgaatcacctatcctcagtgctgaaattgttttgtataactgagggtactgttggttcaaactatgttagtttacagtttgttgcaaacattgtaaaatacagcgacatgtatattaacttttttctatttatctttattatagaaaataccttagaatgttcttgatagagtagcatggtaacgatggtgtcacacccttggtgtgaatggtagcttagtgagcaacctagctcaaggatttgcaaagttaggaagaaggacgagagagcctctctccccaccccaatctaaatatggaatttggtaaattagaatactttgtaatttgtaagaccaaattcatactaattacccgcgtgaaaggtgtttgtttttaacaacattgaagataatcaggaaagattttttcttaatgtttctctcgagcgtagtactataacaaaaacttaatgctaagaaacattttatatgctcctttggatatgcaatttaatctagattatctatttttctcccatgataactaatctgtttttagtatcagcagcatttggcaagtttattttttggatataaactgtggttcatctgttcactgtttctagaaaaaaatcattgccataagaaaaagtataaattagcaagaaaggagagtgacttgatttgcttttggaaaaagaaatgcttaattaattattctgtatttggccttattcgggcattaggaaatctagagatctaaagggttgaatgacaatagtgcccccgtttttagcagaccagccttaactctgggtttgaatcctaaggagattgccacagtgagacttaaggaaatgtttggttggcagatgagcaccaatgactgcagcgtggagtgacgcactgcatggtctgtttattctctaattccaatatgtcttttgcttccagaagcaagaaaagtttcttctctcccctccttcccacccttttt

SEQ ID NO: 11939 - DNA, 2023 bp, Homo sapiens
ttaaaaatggtaatgataaggacatcactgctgaactttctgctcctgtgaaaggacagtctgatgttttactttctaccaccagcaaagaaataatttcatctgaaatgttagctacttccattgatggcatggaaagaccaggaaatttaaataaagtagtggagcagagacagaatgttggaacacttgaaagtttctctccaggagattttagaactaatatgaatgttgttcatcaaaacaagcagttagagagctgcaatggtgaaaagcctccttgtctggagattctaacaaatgggtttgcagtgttggaaactgtaaatcctcagggaacagatgatctggacaatgtagctgattcaaagggacggaagcctcttagcactcatagcactgagtataatttagactctgtacctagtcctgctgaggaatttgcagattttgccacattttccaaaaaggaaaggatacaattagaagaaatagaatgtgcagttttaaatgatagagaagcactaaccattcgggaaaacaataaaattaatagagtcaatgaactgaattctgtaaaagaagtggctttgggtagaagcttggataacaaaggagacactgatggagaggatcaggtttgtgtttcagaaataagcatagtgactaacagaggtttcagtgttgaaaaacaaggccttccaacactgcaacaggatgaatttttacagtcaggtgttcagtcaaaggcttggagtttggtagactcagctgataattcagaagccattaggagagaacaatgtaaaactgaagaaaaacttgacttacttacttctaaatgtgctcacctatgcatggattctgttaaaacttctgatgatgaagttggttctcccaaagaagaaagtagaaagtttactaatttccaaagcccaaacattgaccccacagaagaaaatgatttggatgattctttaagtgtaaaaaatggtgatagtagtaatgactttgtgacttgcaatgatatcaatgaagatgattttggtgattttggtgactttggctctgccagtggctcaactccaccttttgttactggtactcaagattcaatgagtgatgccacttttgaagagtcttcagagcactttccacattttagtgaaccaggtgatgactttggagaatttggggatataaatgctgtttcttgccaagaggagacaatattaacaaagtcagacctaaaacagacttctgataatttatcagaagaatgtcaattggcaagaaaatctagtggaacaggcactgaacctgttgcaaaacttaaaaatgggcaagaaggtgagattggacattttgattctgtgccaaatattcaggatgactgcaatggttttcaagactctgatgattttgcagacttcagttcagctggtcctagccaagttgtagattggaatgcttttgaggatgaacaaaaagatagttgttcttgggctgcttttggagaccagcaggctactgaatctcatcatcgaaaggaagcctggcagtcacataggacagatgaaaatattgatactccaggaacccccaaaacgcacagtgtaccttcagcaacttccaaaggagcagttgctagtggccatttacaggaatcagccacttcagttcaggtatttactaattttctctattttgtatgatgtattaattgttgtggaggcttctaatttcagcttttcaaaaaatattttttcaactgagtacttgttaaaggagtctcgttatgatgtataatgcctgtctgatttgtgggttggttacatttttcacaaccctttgggaaactacaaatagtcctatagtaaagcgcagtaagatttttctttatctcaatgagtttcgttaatatttacagatactcatcaacttggattttttggtgactataaataccatatatgttaaaaaaaaaaaaaaaaacccacacttattacctaattgacggttc

SEQ ID NO: 11940 - DNA, 1244 bp, Homo sapiens
caagaaaaagcagacggataactgatgtgaattggacagtttctattgcttttccttttttccatcccttccctaccatcaaaagcatacctgctctaattaaaaaaaaaaaaaaaaaaaattcaagttcagctgatttgttggtaagccgcactagaaaggtatacatagtaatgtatatttatttacatactgaagtcctaaatttatattagaaaaatgtaaataatcgggggtaaacatttttgaagatttattctttttgtgttgctggggtgtatacatttatgtctttgtgaaatacactggtggtgtccttcttacaaaacttttgaaataaaaaaaaaactcaaatcttcactgtctgtgaaatccccttcagtcttttcagattgcattgactgtcctcttgatttttcatattacatgtcaaattacttttgctatcataaataagctccaaagtcccccatttaatttttttttaattttgtgtatgatgggtttcagatctggcttttgttaacattttggggcttttttaatcttttcaatctggcgtattgctgtttgaccttttgcaaggtacttaattgctcttttgttatagggtatggatcattgtcagaacttgattggaggggtttaaagagattgtgtctgtttaaaatcagtatgattcagagaaggaccaaattatatgaatgtcttacaatggaatttacttgttactgatttttttgttctattgtaccactattttttgaggattttgcacagtgtaaaatgacataatcatagattgctatggtttaggctgtatatacagtgaaaactatgggttttaaatgtttggggaaattcctatggaaaaaagagagacatgtagaagaacctctaacaaggttaatgtgcatgcccaaggtcttttgaaatttcagtgtgtaaatttccttttagcttatacaaaaataaaataatttaaaagaaatttagcctggtgtctttgtactttggtatgtgaggaaaaatgtaatgagtttgaatgagaagttttgttgaatattaacatatttcaatccagagaaaatctttggtagggcttctactttgttgaagccaggaagaattagaatctggcctataagaattggatcagcacttttagtagctgagctgtttgtttttatatagaacatgagatcagtaaagaaattcccatgattcattataatgtgtcttca

SEQ ID NO: 11941 - DNA, 1246 bp, Homo sapiens
ttaccccaaaactcagacaggactttctatgcatgttttccctcctccccccaattcccccccccatcaccttatctcccaggacacacttgagaagtagctttttattcctagtggtgtacatttaattttaaaaaggttgcaatgtatcatgcttgttgccgaaactgtttatggccttcttgtttcagttttttcttttcttccaatggtactttagctgttgagtgcaggttacaacctatattgttatgcagatggcttctttaggaataacttttatatttatttaaaaatttttaaattatgggatgttttgttgttgttgttgtctttgttgttggtcatttgtcaatattcagtcaccaattctgctcacttcttgccatggataaaattgggtctttctggctaattaaaaaagacaactttataaaatggcactttaagcaagccatagttagttttatttttgtaatgcacatggcaaagcaaagacgtttgtgatgaaggaactgctcatctaagcaaaagatttgagtatgatatgataaaggctttctacattctaatttactttttccccccacttgaatgtgttttaaaggctaattatcagctcagtagagcagtgagaaactgatcaaattgcacttgttctcctacaagcaacctccacgcagacacctcgtactgctacaggtgtgtcatttcctttaataggaccagggaccatgtaactgaggtgagggttgtagtagatgcttccagtgtcagtatgcctgttaattttaagagcttccctttcttgcagagaacaagtctgcccagattccatgctttctataactggaggacctggcaaacctgccgcatgctgcacacatctacctacgtacacatatacaatagtattgatgattctgaacaataacagggtaaaacagttggtttgccattgttaaaaactgatttacagtaacttacaacaactgtacttttgttggattagcaaatcatgtgtttaaacaaatcccatatgttgggcaacagttcaaataagcacggagaagtgttgcccaaacttggttctctgactcttatgtatttgtaaggctgggcttcaaaatcaaaacaaaaaccccaaaaacagcaggcaaatgctttttaactctgacaccgttgccataaatccctgatactcaaagtctaacaagaaagacatggaaaattagcagcccatttt

SEQ ID NO: 11942 - DNA, 1462 bp, Homo sapiens
gtgatgtcccaccctgttcacccagccgccagtcatggacacagggcactgcccttgccaacttttaccctcccaagcaatgctttggcccagtcgctggcctgaggcttacctctcggcactggcattgggctccccagccggaactggttaccaaggacaaggacactctgacattcggcttgatccatgtccaggtgcaactgtgtgtacaccagggatctgtttggaaacaaccccttgagctgccaggctcaagaaatcatggactcacagggtcctgtgtggttacatcttggaaaaaatgcagatgtatttcactctccccggtcagctctgcatcaggtgttttctgagcaaaccaagggggtttatagtcatctgtcgcattgcctcgagttgcagtaattgaaaaaatgctcaaattcttagccatggctggcctttgctgagctgggactcaggtgtttaaagagtttgtgctatagctaggtgtggatagcttctgatccctgggttctgggagactgcaggtgccgcacattgtcaagttagaaatactccaggtgggtgttagcactgtggtggtctctggtccacagccttaggtaaacaacttagattctgaggtcaaagaaaaaaggagagggaatgcagccttgtgggggagaagcggggcagagggttctctaatctaatcaggacaggacaggtttcacatacaattgtcccagttcgcatcccagccctggggcacttttctgcttccttccagaggcctgggcctctgataacactttggctttttctccattcacgctgatttggcaaaaggccagagatgggcctccttccctggggaggtgtgatgtagttatcacattcaggacccttgttgatttatcatctattatttgaattcaactggacactctgtaaaatgctgcactgcagcaaaaacaaaaccaccaccaccccagagaaaaccatgtactaattggagtggggtacccccattcacaggttcccaggtcccctggctttggctgatttcaaaatatagagccctttcttgccagtacatccaagtttaaaattatcagcgaaatggtccatgtttttccaattacctgctgacacggttctaagctaagtgaaggggaagatctgagagcgtgctgtttgtggctgttgatgcatattcgtgatgtaacaggtcctggggcctcactttaccccatttgtaaaatggggctaatgtcacctgcctcttacctacctcagagggatttggtgaagcaaactgttaatcttcgaaaacgaccatttcacttcttggatatcaagtgctaacccagtatgttcttcttttttatgtaagggacagctttctccacagagtcctttctgctggtgaggacagcatttctgagcagggctttgttctctatgtgcattagga

SEQ ID NO: 11943 - DNA, 1247 bp, Homo sapiens
cttcaagttttcatgaactagcaaccccaccttccaccatggttctgggcgcctgattttgctgtgactcccagacccagccactgtttctgccaccctgtaacaggccattaaagctccccagtgttcagcctccttcactcccttgttttccctgttgctatgtgtcacctgggccctacagacaggggcacacgcttatggatgtgtgtaccattgagatgagaatgggtagatggaacggagaccatcaagccacacccccttcttaaaactggggacatgagcctgagcagaaagggtgaagaagagccatgggacacagagttgacccagccagggggaaagcccagctctctttaaaccagctaagccattccagtctcctgtgaagccaaaagggaccaggaaccgtgcaaaggaaactggaaacttttccccgctgggtagagcatgttgctgatactcttctgttttcaagggaaacaatcacattgtttgattccaaatggtaaatgaacactcactattcttcaggcttcagtaaatctttttttcttccttcatatatatatacacaacacacacacacatatgtatatctatacacacatgtgtgttgtgtatatgcatgtgtgtgtgtgcgtgtgtgtatagttttagctccaagccaagcaagtttgtgtttggatagaggggaacttaactattaactacaagttgtatgtctgtggtatcttgattttcccatttctaaagatgaatttcacaaagccataaagcgtgaaattagagctggacttaagactcattggccgaccatcctgtgtcctggcctggccctgcagtaagaagcgtgtctgggtctggagaagggtgcttccgagagtgtgcaggtggcccttccccttggaggcgagaagagagaatgtgctgtctatcttcctggttttcagtccacagagtcggtagaccaggggttacgtgactggggaaaatctcacatctccttgtctgaaaacatttcccctgctgttctctttctaacatgttgtggtaaatctgttcagatactgctcatctgactgttttgtacatgtgacaattgccttaaaacctagcacagtcctcagaaatgaataccgtgtttccactggaatctgcagttcctttattcccttcttgtgtgttgaagcggcacttgctgatggaggagctgttgctcttctaggagatgggctttgggt

SEQ ID NO: 11944 - DNA, 1223 bp, Homo sapiens
tcctttgggagtttgttcaggatttcctcaccatcttgcatcctttccttgctactgtgcagggtgaggaattggaggggcctgagtatgatgatttctgttttgcgggttcagctagagagctgggcctcaggaccggccggggggactgtccacggttatctcctgttcctcaagagtgactggtgactttttaaggaccagggattataggccaagaggctgctgcccagaggtccaggccaggggaattctggcaaggagagccctgccgtgtttctgacttggtgattaaaggctttaggggtaccctgaagagacttgggaaaggagtgtccagggctttgggctcctgggggctctgaacctaaatcctcttcagacccaagggacatgtcagaaccttggagccctgtagtaggcagcactgtccctggttaaggagaattccttgggcttctctgactgccaggcagcttctcctagtgggagtcacatggggcagggaatcctaccaggttctgtgactgcaggcaaatcaccagatctttcaggccctcagtatcattgggaggtgaccggaatgatctgttctgcccagctcttacattcttttctgttctgcttgccaaggcctttcctgggaatggctttgatcttctcggtgtcattgtagccttggctgctgcagggtccccttgtggggctgcaccctgtgaggaggctctgagcgggactgggagagaacagaggctgggccccacctgcctgggagcaaggggcagtgggaggctctggcacctgtgagtcagagattcggtgaggcaggaagcgaatcataaacagacacagaaatggcctttcacggggatgagtccggtgcttattattagaattcctgttgttcgttaagctcttaccatgtgctttgcacacatgggtgtatttaatccttaccttctgaggagctggtgctatgaggggaggaaagtgaggctcgaagtcatacatctggaaggtggcaaagttaggggctggcctcaggtttgtctggctccaaaacccatgtccttcaacactgtgctgtcctgcttccctcgggggtgagttcttcatcaagcagataaaaaattcagtgaagaagctgagatgaaccagtcattctgctagtgttcagttaccactggcgtgtgaactgagcaggatggggtctggggcgacct

SEQ ID NO: 11945 - DNA, 1481 bp, Homo sapiens
acaactatttgctcaggacatgatgctgataccgaagatgatccatccctagcagatttgccccaggcactggacctcagccagcagcctcacagctcaggtctctcttgcctgtcacagtggaagtccgtgctgagcccaggttccgcagctcagccttccagctgcagcatctctgcttcctccacaggcagcagtctccagggtcaccaggagagggcggagcctcgtggtggttctctggccaaggtctcctcctccctggagccggtcgtcccccaggaaccttcctctgtggtggggctaggacctcggccccagtggtcaccacagcctgtgttctctgggggtgatgcttctgggctaggcaggagacgcctctccttccaggctgagtactgggcctgtgtgctgccagattccctgcctccatcacccgaccgccactcccctctctggaacccaaataaagagtatgaagatctgcttgactatacttacccactgaggcccgggcctcagctcccaaagcaccttgatagccgtgtgccagctgaccctgtcctgcaggactccggggtagacctggatagcttctctgtctctccagcaagcaccctcaaatcacctactaatgtctcccccaactgcccaccagcagaggccactgccctgccattttctgggcccagagagccaagccttaagcagtggccctccagagtaccccagaaacagggtggcatgggcttggcatcttggagccaacttgcatctacccccagagccccaggcagtagggatgctcgttgggagcgcagagagccagccctgaggggtgcgaaggaccggctgactataggcaagcaccttgatatgggctctccccagctaaggacacgggacagagggtggccctcgcccaggccagagagggagaagaggaccagccagagtgcccggcgccctacctgcacagagtctaggtggaaatcagaagaggaagtggaaagtgatgacgagtatcttgccctccccgctcggctgacacaggtttctagcctggtttcgtatctaggatccatttctaccttggttaccctgcccactggggatatcaaagggcagagccccttggaagtgtcagacagtgatgggccagcttccttcccttcaagctccagccaaagccagcttccccctggagctgccctccaaggatctggggatcctgagggccagaatccctgtttcctgcgctccttcgtccgtgcccacgactccgcaggggaaggcagtctggggagcagccaggccctcggggtctcctctggactgctgaaaacacgcccctccttgccagctaggttggaccggtggccattctcagacccagatgttgaagggcagcttcccaggaaaggaggagaacagggaaaagaatcactggtgcaatgtgtgaaggtaatgacactcaacgt

SEQ ID NO: 11946 - DNA, 1152 bp, Homo sapiens
tggttattttgtcttgtgaggtaggtaggacacgttatcatggacccctctttactgataaaagattgagatgccatgaggtaaagttgttcttcgctatagcttcaggttagtcatgattttagtcatttattttacgttcacttttccagagaaacatggacgtatctggctccaagatgctgattctagttagtaatggtgctgatccaagaattggtttccatggcaggcacgcctcttctgggctgctccattcctacctgcaaggctgggttttctcagcctgtcatttttgatgtcacaccaggctgtggttttcattgctttggcagagggaggtacagagtcgtggagtcgggacaggtgagcaaggaggagagaggaaactgaaggtgcacagtctgtctccaagtcctcctgatatttttagccttttgataacataaatagctgttcgatcagtaacaccatgtgtccttttatttgtctctgcagacattttgctgtcagctggaagagctgatctgctggctgtataatgttgcagatgttactgaccacgggactgcagccaggtccaatcttacaagtctcaagtcttctctgcagctttaccgggtaatatgcggtcctggctctggcttgttccctcacaagagtgtggctaaattactcgattacaaagtaaaatctcaaataaccaatgtctggtatgttatagctcagttgactattatacctgaaatctaattagagcttcacattcttaaagcggaacgctttgtaaaatgcatgaattatttcccaggccaaatggagcttgaagatacaatatatttatctcaaatcaaaaatactttaggttttgggctggcaggtgcagtgggacaagtcttttatcccagctactctggaagctgagacaggaagattgcttgagcccaggagttcgagtacagcctgagcaacatagcaagacccccccccctcaaaaaaaagttttttcttaattaaaaacaaaaatactttagggtgatttgcaatataattttccaaatgtctcagggattataaatacagacttgcactattatgacgcctctagttatgtatggctattgaagtaaaattaaagactcagattttttt

SEQ ID NO: 11947 - DNA, 2320 bp, Homo sapiens
ttttcatactgaatttgaaggtgttgaattatgtatgggttctgcagtaacagtaaggccacagccttttaaaaatatgtgcactagaatactgtgacagtgacaatttgtgtagcatctgtttggatccaatgaacttagttcctcacgctccattatggatggtagaaatgcactaagaattagtgaaaaagatttttcagtgttaattgtgcctcattattctcttaggaatttgctgattcccttggaattccgtttttggaaaccagtgctaagaatgcaacgaatgtagaacagtctttcatgacgatggcagctgagattaaaaagcgaatgggtcccggagcaacagctggtggtgctgagaagtccaatgttaaaattcagagcactccagtcaagcagtcaggtggaggttgctgctaaaatttgcctccatccttttctcacagcaatgaatttgcaatctgaacccaagtgaaaaaacaaaattgcctgaattgtactgtatgtagctgcactacaacagattcttaccgtctccacaaaggtcagagattgtaaatggtcaatactgactttttttttattcccttgactcaagacagctaacttcattttcagaactgttttaaacctttgtgtgctggtttataaaataatgtgtgtaatccttgttgctttcctgataccagactgtttcccgtggttggttagaatatattttgttttgatgtttatattggcatgtttagatgtcaggtttagtcttctgaagatgaagttcagccattttgtatcaaacagcacaagcagtgtctgtcactttccatgcataaagtttagtgagatgttatatgtaagatctgatttgctagttcttccttgtagagttataaatggaaagattacactatctgattaatagtttcttcatactctgcatataatttgtggctgcagaatattgtaatttgttgcacactatgtaacaaaacaactgaagatatgtttaataaatattgtacttattggaagtaatatcaaactgtatggtgataagtattgttttgattcttatggttaaagggaaatagagccttgcattatattcaacacagccatttgtgtgtgcacaatgcaaactaaggtattctagacctatcttagagcagcatccagtatttgctttctagataatatgcccaataacatgacctagaggggcttctgtgctgtgtagggatttaaccaacttcagtggttcagggagctcaaactatatgtaaaacaagtttagaatgtatgctatctagcccgttatctctgatccttctctaaaaccatttgaaatagcttcattgatcaacatttcataaatgcatctgtggtagaggtagaaagcagcacctttcctaattggcaaatgatcagactaatgtgtgctaatgtttttcttccatgctttcagtcagattcaactattttatcctccacagttgcttaacttggtgttggaggagggtttaagcattaagataggaagcaggaaatttgattgctctaaatttagaaattatatccctaaaaattaaaacatgaatactgggtggtaatgataattgaggcaaatgtatttattttggtgacattttgcatatatgaagattttctgaaataggaccttcaagatcctagggggttttgtttggtttttaattgtgaggaataaaaaatcttctgcccacactggcattttaaggtgactgaggtcaaacgttgtttccttaggttgaaatagcagccaaaacattcttcacgcaggggcttgggatatggctgctggcaacacattttgttgtgggctccttaatttaatgataaaatttaagctaaacacaagccaaaaatgaataggtttttttaatttttatttttcactaaacaggcaattgaaatacatggtacaaaaataagtggtaagataattgtaaaatgaaatggacagaatattcaattttccatctatgaaaatttcacaataaaaatcatagtttactttgtattataggcgtgcttggtggatctattcatcctcacataaggcaactgacaaattcctgaagttaccaatagttattttggtgaagatctttaatgcttcagaagttttgtttttgccttaatacagtataaagggggaaagagttcagaaactattttctaaagtagctaaatgacacaaaacaaatgtcaagatactgtgatgccatgccgtgcacttcatttttacacagtaaaagttgtttaaattgtc

SEQ ID NO: 11948 - DNA, 1118 bp, Homo sapiens
ccccgcacccccggcagtccctccggtttgaccactccccccggtcccttgcctcccccgacccccagcctccgtcggccgccggcaccaccctccgcccctctccgccccctcccccgtggggcgctgactcgcccggctgccacgtctcactgatgacatcactagggcagctcggccttagccaatccgccagggggagtccgagcgaagtcctagccagcgagtcagaggggaggggagcagggaggggccgagggtggggaggtgagggagtggggaatggggcgggcgacaacccttcaggtacgcatgccccagaggcgcggcgcttggcgggaagctgagtcctggccttgcgtcgcactgtctgtcctcagctcgcgtagccgcgctcgcgactccctttcccggcatgccaggcggtgcggccgccctctgggccgtgtaaaggcccctcggtctaaggcttccctatttcctggttcgccggcggccattttgggtggaagcgatagctgagtggcggcggctgctgattgtgttctaggggacggagtaggggaagacgtttgctctcccggaacagcctatctcattcctttctttcgattacccgtggcgcggagagtcagggcggcggctgcggcagcaagggcggcggtggcggcggcggcagctgcagtgacatgtccagcatgaatcccgaatagtgagttcaggagagcaccggtcggctgggtccgtgggccagcttgggggatcttaaaggggtcgaggagggttggggcagaagtcggggcatcggctggggtgaggcgagggtgatgggtcaggagaggctggcggccgggagtcgggccccattgtctgacgcggaggggcggccgcgcgggggaggggtcgggccggaggggtgagccgcccgggcctggaccgggtcaggttagagggcctgactgcggggcgggtgctgaggaagcctgccgaggggcctggggcggtgtgaaggggtatcttctctcggaggcagtgacttttgaaggaggacttgtctctaaggggaggggatggggtgggagagcccttctagagggcactgtcagaccctgcgcccg

SEQ ID NO: 11949 - DNA, 1194 bp, Homo sapiens
aattgtacagagctttaagaacgtgttctgctgggtgtggtggctcacgcctgtaaccccagcagtttgagaggccaaggcagacagatcacttgaggccaggagttcgagaccagcttgggcaacatggcgaaactctgtctctacaaaaaaattacaaaaattagccaggcatggtggtgcatgcctgtagtcccagctgctcaggaggctaaggtgggaggtatgacttgaacccaggaaatgaagattgcagtgagcctagattgagccactgtactcctccagcctgggtgacagagccagaccctgtctcaaaaaaaaaaaggaaaaaaaagtcctgtttttcagtcctcagtctcagggtctgtttcttctcatctccttggacagcacataatagtagactaaaagtcttaaaagagaacactcgctttaatacttatgcattagaaacaaactgcaaaataactaaataataaattctggcttctagttggttacgtttctgttttggcttccctactgtatttggaactcgctggctttggttttcctgatttgactttttatttaaatccccctggcttttatgcaggtttattgactggtgtagtggtagactctggagatggtgtgactcacatttgcccagtatatgaaggcttttctctccctcatcttaccaggagactggatattgctgggagggatataactagatatcttatcaaggtaagtgaaaggaaaatatcatggaaattaaattttgtaatttgtttaccaccttaacacagaattgaatctatcgttttaggattccagcaaatctgtaccactagagaaattatccaattacctcccttatttatataaaaattcatataagatttatacacatgaagaaaaaagaagatacattaaaaacaaggaaaaaagtgtacacacatgatctctgtatactaatgagagtacattatatcattacataattatatttgttattcctgaggagtgagtagacagatatttcaaggatagaagagacccctaatttgaaactttcttggacagctcaggcagccttttctgccataaaacctttctttgagcaggtatgttttaagccatgatcttggttgggttgtctgctcttgtcctttcctacaaaatacagtgatagcaaattaatga

SEQ ID NO: 11950 - DNA, 1170 bp, Homo sapiens
tcctttattgccaatctttgaactcattcaactccaggacatggaagaggcctctctctgccctttgactggaaaggtcaagttttattctggtgtcttggggaagctttgttaaatttttgttaatgtgggtaaatctgagtttaattcaactgcttccctacatagactagagggctaaggattctgtctgctgctttgtttcttctaagtaggcatttagatcattcctataggcttcctattttcactttactgctctaatgctgctagtcgtagtctttagcacactaggtggtatgcctttattagcataaaacaaaaaaaactttaacaggagcttttacatattactgggatggggggtggttcgggatgggtgggcagctgctgaaccctttagggcatttcctctgtaatgtggcgctttcaactgtactgctgcagctttaagtaccttaaagcttctcctgtgaacttcttagggaaatgttaggttcagaactaaagtgttttgggtgggttttgttgcgggggggagggtaacaatgggtggtcttctgatttttatttttgaggttttgtcaactggagtacgtagaggaactttatttacagtactttgatttggcaggttttcttctacttgtgctctgcctggagctgtttccatatgatataaaaagcaagtgtagtattccattactatgtggcttagggatttatttgttttttaaaatcaaccatgttagctgggattagactccctacagtccttcaatggaaaagtaacatttaaaaatcctttgggtaattcgaattacagatttaaaagagcttaagatctggtgttttgttaatgcttctgtttattccagaagcattaaggtaacccattgccaagtatcattcttgcaaattattcttttatataactgaccagtgcttaataaaacaagcaggtacttacaaataattactggcagtaggttataattggtggtttaaaaataacattggaatacaggacttgttgccaattgggtaattttcattagttgttttgtttgttttgatttgaaacctggaaatacagtaaaatttgactgtttaaaatgttggccaaaaaaatcaagatttaatttttttatttgtactgaaaaactaatc

SEQ ID NO: 11951 - DNA, 1541 bp, Homo sapiens
tttgtaaacgttagcagactttcctgccagtgtcagaaaatcctatttatgaatcctgtcggtattccttggtatctgaaaaaaataccaaatagtaccatacatgagttatttctaagtttgaaaaataaaaagaaattgcatcacactaattacaaaatacaagttctggaaaaaatatttttcttcattttaaaacttttttttaactaataatagctttgaaagaagaggcttaatttgggggtggtaactaaaatcaaaagaaatgattgacttgagggtctctgtttggtaagaatacatcattagcttaaataagcagcagaaggttagttttaattatgtagcttctgttaatattaagtgttttttgtctgttttacctcaatttgaacagataagtttgcctgcatgctggacatgcctcagaaccctgaatagcccgtactagatcttgggaacatggatcttagagtcactttggaataagttcttatataaatacccccagccttttgagaacggggcttgttaaaggacgcgtatgtagggcccgtacctactggcagttgggttcagggaaatgggattgacttggccttcaggctcctttggtcataattttaaaatatgggagtagaaaacaacaaagaatggaatggactcttaaaacaatgaaagagcatttatcgtttgtcccttgaatgtagaatttgtttttgatttcataattctgctggtaaatgtgacagttaaaatggtgcattatgtatatatattataatttagaaataccattttataattttactattccagggtgacataatgcatttaaatttgggatttgggtggagtattatgtttaactggagttgtcaagtatgagtccctcaggaaaaaaaaaaaattctgttttaaaaagcaatctgattcttagctcttgaaactattgctacttaaatttccaataattaaaaatttaaaatttttaaattagaattgccaatacttctacatttgagaagggtttttttagaaatacatttagtaaagtccccaagacattagtcttacatttaaacttttttctttaaaacatggttttggtggttaacttttacacagttctgagtactgttaatatctggaaagtatcttgagatatcagtggaaagctaaacagtctaaattaacatgaaatacttcattttgattgagaaaataaaatcagattttttcaaagtcaatttgaattttgtcatttctttctaatagttatttcttgtttcattttcttgttaatgcaagatgaattgacagtttatgctagttgttaggtcaagttcatgtcagtgttctattattgacaaaacaactcattatttctggtatgattttataaatacataagaaaatagaatagcgatttatagctacatcagaggctgttttcttccaacaaactgttttgtctcccaaaagatttaaggtggctttcacagaattagaaatgctaaagagacctgtatgtaaca

SEQ ID NO: 11952 - DNA, 1271 bp, Homo sapiens
ccagggctagaatggggatttcaggtttctatgagcctccccattacccctaaagtagaacattttttaaattgtgttgccaccacttctaaaaatttagcaatattagaataggatactagtgaagtaagaaattttgcttgttgttttgcaaaccaaatagtttcctcaaacacaaatcagtgttcccacgaacaagttccagttgagaaacactaaggttatggtgaataaaaccatagggagcttcttccccccaacccctggctattttatattaatggggagaggggatttttaaatgtcataaatttgaagagtggtgggttgcattttcttcatgggtttatgttttcgtttcattttggactcaatttcacatcaccaaattcctcatttatacttggggaaaaaacaaggccatatgtaaaaacccttccaatgcctaagtgtctttctcctgcaactccaaacccagactcgccactttgggtgcacaggtggttaggtcagccaactggttctgcctgtcgccttgccacggaggaggcttctaattagctggaaaagagtatttttctaatacgttgcaaggattagccaaatcttcttattgaagaaagaagaaaagtgaagagtggttacctatacctagcatagtacaatcagaacctcgtggagaccaccggggacaggcttgcggacgccggctgttcttcccgccacgatctttctgtggtagcggccagcagaagacatggcctgctccccactccctttccccactccttctttattgcacacaggacaccagtcttcaaggaaagggacttttttccagtctgccaatcatattgggaaagtgctagctgtgctcaccttcatggggctgtttccagctcgtccacaagctcatcgattttctttagtagattaccggtgtaaatacccagtgtgcttatgagtcagttagtagacgtcttcattcattggagtaactggtttaggctttccagtttggaaaaggagcagagagctgtccatctggattgatggaagaaaagagaacctcatccatgcctggagaacatctagaaaaccttcagccagcctccagtgctgtcgagagaccaccttcccccgacccggaggcacttccttggggtctttctctagggtctcttctctacaaagcacaacactaatgttcgtttccttagacctcagttcaagtgcccctatttatttcaataagaacgcacatatcccag

SEQ ID NO: 11953 - DNA, 1141 bp, Homo sapiens
aagatgaccacagagatgatgagccagagaaaaagagtggagagggattggtattgccagaagttgggagaggagaaattttagagtaaagttaatttttcaacttttggaatttggagcctcgggggagggaagctagatgaccatcaatataaaaaccccaacataaaagcagtaatctgaaatacagccaagacccaagacctgagcatcaacttagtgccctgcagccaggaggaagaggaataaccgtgatgaagagagtgtagtgaaggggtacaaccaggacagtggggagcagcgaagatcggatggtcagcagccaagcaaagcctcctttcccattggagagactcacagatatgtgaaggcaggggttagaggggttttggtagttgccaccagtgatggttcctaattagacttctgtaaccagacatcatcatggctgttccactagtaaccagcctgtgtgtttccatccttcaggtggtattggaatgctatgtaagaaaggacttggtctacaccaaagccaatccaacgtttcatcactggaaggtcgataataggaagtttggacttactttccaaagccctgctgatgcccgagcctttgacaggggagtaaggaaagcaatcgaagaccttatagaaggtattgaacttgtcgctgcattcttagtgggactatggaaatgttccaaattatttttaattccaatagtctgccatcatttatttgtggtttatttgcgggagggtttgggaccaggtcagtagatgccaaaacttttggaatttccaaggagagtaattaaagtgacaattcagggaaaaggagatgggtttcagagtaaggagtaatcccaattgatttttagactctgctgtgaaaaaacaggcaggttctggatttccatgtgcatgtatttttgactgctttcaccttgtcctgactattgaaatggctttggtctggtctgtcttggctcagaagtagagaatggattctggcgggcccagaaggctcctggcctacccactgtcctcctgtaatcagaggcccagggtgtacagctgccactgaaaaggaaagggatctgtgacctctggagccctggttcggtttaggccttgg

SEQ ID NO: 11954 - DNA, 1286 bp, Homo sapiens
ccagcctgggcaacaagagcgaaactccgtctcaaaaaaaaaaaaaaaaaaaaacaacaactaaaaaccaaaataggtgtgtgtctttccaacctaaagatactgaattacagaaatcaattcatttatcagtacttacacctagaaactggagaatattgtgcctgtatacatctttcgatcacaagtaatttttaattacttatcttttttaaaatgtacttttatattgagtttaagtgttttgttttttccctaaaagttgagatggaccactttttaaggttgccgccaagcatagatttctttcgataaaacaaaaaaagtgctggctggtggtcatcttgcattttgaaacgtgttctgcaactaccagaccattgtcatgccctgtgcttcttcttcttgtcgttttagtgacagctatattgtgcgtgtcaaggctgtggttatgaccagagatgactccagcgggggatggttcccacaggaaggaggcgggatcagtcgcgtcggggtctgtaaggtcatgcaccccgaaggcaatggacgaagcggctttctcatccatggtgaacgacagaaagacaaactggtaatggcagacatacaactcgtgggttaaattagtaacaactgctttctttacgttaaatcatagtcctctttccttaacgtatttttttctttctttctctgacttcaaactcttgcaaaagcttcaaaagttagaaccccggagctggtgccaaattgtaaaacgtgactgtcctttccagcaaagtctcttttgaccacacgctttatccgagatgcttagaagtatatttggctgttttatttgcatctttgattaagatgtctatcattgtaaaaaggtattcaaaacaaaagtgtactcttttattattatgaatcacattgtactgagctgtgaagtcagtgttttaaaaatgtagagtttattcatggagcatgccattgaggtttggatggtggcaggtaaaacagaaaggcaagatgtcatctgacattaggctacttataaataaatgtttatctagcttttatttcatgccctaatgaataaaacatgcttggaaaaagaaagtaacaagaagtagtggtatcatactttgtgggtttttttgggttttttttttttttttttttttttgagacggagtctcgctctgtcacctaggctggagtgcagtggcatgatattggctccctgcaacctccacctcccaggttcaagcaattctcctgctgagtagctggga

SEQ ID NO: 11955 - DNA, 1152 bp, Homo sapiens
aaacaaggagagaaaagtcaaatctttttccttttcccttttctgatggctatgactgaatttttttttttcatgaacgattcttgtgttcttatttaaaagaagaatttggcatatggcagacctcctcaagctatctttagttggttgtggggtgtaagtgattaagaatgcagctgtacttgctaccagcacatgcttttaaggagattgctaagcagacaggcctggttagaagtttagaatagcctcttggaaacaaagatctaatttttcaagtgcatggtatacaagagtccctcccttcaggactgaagcactgagggctgtttgcatcagagcagggtgacttatttgtttaaaatggcaacacccttggctctggggaggcggccatgcttcacttggaggagacaggggaagctggcttcacttcactttgtatagtttggcttcactgctcctttggaataaaaaaattctttacttctctagtatgtcccaggacaaacccatctctgtcctgttgctcagttatactacagtgctggttccgtagtcttcaaagcttggaactccctcttgcctttgctccaaaaatttgttctttcactcagcaaatatttaccaagtttctgctatatgcaggaccgtgtggagaactcaaagatgaatcagacgtggggcctgtccacaaatgttgtcagtcaagtgtaggacatagggcaagcacacgggagcttttgctgttgtgtccaagaatagcatgatgcgccgtaggtatttggtgggggaaggaaattagtgggtgggtttcaagtaaacccacatggagaaggtgacatttgagttgagccttgaaggacaggtttatctgtgcagagagggaagttttaggcagagatatagcacaaaagttagaaaacaaaaccaaaacaggtggaagagaggaagagtaatcaacctttaactgcgttgccatgcccttgactgaggcctcacccacattatcccatctaatcctcctcataagaaaacttttttcctcataagaaaactaaggcctgcagcattaaaataacttgcccgagaaggctcataagtggttagagtggagatttgaacccaagacagttcaattccagatttgaa

SEQ ID NO: 11956 - DNA, 1101 bp, Homo sapiens
aggagcaccatttaacagatgaggactctgaggcctggggagttaaacccaggtcacacagttggatagtgggagagtctggttgcctggttgtttttctacagggctcctccaaatgagtgccaggaagaaagtgcgggggtgttctgcccattgcaagagggtcagcttggagaaataggtttgaattatggagtgcctgacagaaagtgggaacagtcacttagcaaagaagtccgggtcttctcaaataggagtgctctgggtgggaggagaagggctggtaagcctgaggacttgtggaggagctcagatgtagctgcttaaattagttcaaagtgagaaatgtaattactatacttgctcaaaccaaatgtctgaacattgttataaaatgaggtgtaatcacagaaaagaggattgcagtgccgtatcactcccacaaaatagcctttgtgttctcaggagccccatggtgctgattaatcttctgggggcgttgaagccccagtaagttcaggtgtgtgtattggacttaattgggggagttttgtcctgctcgtttggacagtcattcacagttatttgcatttgtaatgagtgtgtgatgagagggggaaaagactcagccttaaacatgttagctaggaatatttgggatcagaataaaataagatccaagcaagagggaaaatcgaggatgatttgcagcaatttgtccttgttaactgctatttgaatgataaaaggaaggttgaaaaggacatttcagtaactccctggataacgacttcctctatcactatcactatatatcacctcaatgactatgtcatctccatgctcttctccaccaaggtggaaagtaccataagaaggtcattaagtcctgattctgccacttgttggtcatgagacgtagggtagtgacataaacgctaagccttaattttctctcctggaaaatgggctgatgtatatacatttagatgagctaatgcttggcacataagaaaagcacacggtaaatattagcaaattgtcattattgtcataattattgtttatagtatctctacaacgtgtttataacgtgtgaca

SEQ ID NO: 11957 - DNA, 1161 bp, Homo sapiens
acggaaaggctgccgccctgggaagcttgggcgctcagccctagaagaaatcacaggaagtaattaaacagagaaggtcagagaaagaggaagtggttgtgttgtttctgatgcaaagagcattgttgttactgggaatcaagatgatgatgtttaaatctcttggaatgtgactgcttggggatttgattgtattgtggtccttttagtttattcttttagacagcaatgtagttaggaaatgaattgcttttaggtcttatcaggaatccccacgtgcctaagcagaagtcttaagcgggagttggttgtagcttggcaaattgcacttaaatgaaatgaatgtcaagactattagaggttaattttaggtgtctggagttctccctaattctcctgattaaacactttaacataatagtttccttaattggaataatgatggaatattagcatgcatattaaaccatttacccaaatttgaatagggttaaaatgcaaattatccatcacttgtcagtgcttactctttacagataattctggtgagaaatcgggaagagactggaatatgaattggaatagggctttctacttgaggcagctttgctgggaaagtcaagaataaactagaggactgaaacaagtgagaggcccctttgtttccccccaaaaggggtactaaaaatacgaaggcctgtgctgtcaataactccaacacggaggtgggtacaatgggaaatctgaaataaactatagaccctccagttgtatcttcattaggttgtcatatttttccttttttttttttttttttttttttgagacagagtcttgctctgttgcccaggctggaatgcagtggtgcagtcttggctcactgcaactgccgcctcctgggttcaagcgatcctcccacctctgcctcccaagtagctgggtctacaggcaagcgccaccacgcccagctaatttttgtatttttagtagaggaggggtttcaccatgttgtcctggctggtctcgaactcctgacctcaagtgatctgcccacctcagcctcccaaagtgctgggattacaggtgtgagccaccgcgcctggcctggctgtcacatttttctttcagaagaaggtgaataaaacttaaggtctctcccca

SEQ ID NO: 11958 - DNA, 1179 bp, Homo sapiens
acttttcagcttttctgaaattcagtgaagcaaatattttttgataatactccattttggttttgtgaatatatcaaaatttttgttaataaaatttccacagttttgatctatcaaattttggagttaaaataattataactgttaaaatcttagagctttaacatcaaaatatgttaaataacagttggatataatgtttcagaacatttttagttattttttaatcttgtttaataggttaaaaacacaaagtcaagaagaagaacttatgaaactggctaaacaatttgataaaaatatggaagagctagatgtgattcaagagcaaaacaagaggaattatgattttacccagatgatttcagaaacagagattttaagtaattataaagataatatacagatgtggtcattacataatatagttcccgaaatagataatgctacaaaaaagccaatcaaaggaaacaccaagatatctgtggcaaataatcaaaatagcagtcagaagccatttgaccaaattgctgaagcagcctttaatgctatttttgatggttctactcagaaatgtagcggacagttaagccaagaactgccagaggctttttggagcaccagtaatactacctttgtaaagacaaatgctttgaaagaggagaaaatcattactaatgaaactctggtcattgaaaaactgtcaaataaaaccccacgatcactttcttctcaagtagatacacccataatgacaaaatcatgtgtgacttcctgtactaaggagccagaaacttctaataagtacattgatgcatttactacaagtgattttgaggatgattgggaaaacttactaggtagtgaaccttttgctatgcaaaatatcgacatgcctgaactctttccttctaaaacagcccatgttactgatcaaaaggaaatttgtacctttaatagtaaaactgttaaaaatacgtcaagagcaaatacaagtccagatgccaggttaggagattcaaaagtattacaagatctttcttcaaagacatatgacagagaattaatagatgcagaatatagattttcaccaaattcaaataaatcaaacaaattatccactggaaataaaatgaaatttgagaactcttccaataaaattgttattcaagacgaaat

SEQ ID NO: 11959 - DNA, 1311 bp, Homo sapiens
gagcgtatttatcctattcatttgcatttcctagcaccatgcactttaataggcaataaatacatatatgttgaatttaaccaaggtgtacagtataataaaattcagtggtggcgaatagcttagtaaatctattgcctttgttttttatctttaaggaaagaatcagagtatatatgaacagagtcaaggaaataacagacaagaaaaaggctggcaagctggacagaggtgcagcttcaagatttgtaaaaaatgccctctgggaaccaaaatcgaaaaatgcatcaaaagttgccaataaaggaaaaagtaaaagttaactttttggttttgatgtacacatattcaaaaagtacatcttcccccccccccccccccccgcaaaataattctgtggcagggcaaggtttaaatgtgtttcttattaatatgtaaattcacagtaaatatgtaaagctaaatactttcctctccaaagatcattatctttattgattagcactgaggattttaacattgtgatatattatatatttataatttaccatctcttgatgagactcttatttctttatataggtcagtcttgcaagtaccattttataagcagctgtgaaatttaagtgaaatgttctttgtaaacatttgtactattttaaatgaataatgaccttatgaagtatgctatctgtaggctgaaattataggtacatctgttttcactatatgatattaagaaagcgtgaaatgacttaaatgttcatttttttctgtatagatactttatcatgttttcatgattttaggaattactgctttgttgatattcaaagtgtgaaactaaaactttatggttgtactttaattcttggcatgttgcctctatgtcccatttaaaataaaatacattctcattaactttagatgggaaataaggttgtatgttgatggatgaattttggcatgatgactgtactctcaataaaggctgaaaatgttgtataactgacctgtgtatttttatcttttgagtaaatttgccttccaaattaggaagataggttttagaagtcatcacaaatagagaaattcttgagtttttgttcctgatgcatggtgtccacagttcttttcatctcattttttttcagattttttttatttcatgtttttgaggctgtatcaagtacatacaagtgttttggaacaacttcttaagttacctaatgccacttaagcagatgagaagtccaaaggagattacactgtgtttgtattgtggtttatttttctggaatattagttaca

SEQ ID NO: 11960 - DNA, 1931 bp, Homo sapiens
gggagtcgcaggttctgtaagccttctgcagaatgttacgttgtccacccagcccatttcaagtttggattggagtccagataaaaggggtctctgcgtctgtagttcatttgaccaaacggtgagagtactgatcgttacaaagctcaataaaatttgacttcaagactttggacttgaggctgggcacggtggctcactcctgtaatcccagcactttgggaggccgaggcgggtggatcagaaggtcaggagatcgagaccatcctggctaacatggtgaaaccccgtctctactaaaaatataaaaaaaaatttgctgggtgtcatggcgggcatctgtagtcctagctacttgggaggctgaggcaggagaatggcgtgaacccgggaggcggaggttgcagtgagccgagattgtgccactgcactccagcctgggcaactgagcaagactgtctcaaaaaaaaaaaaaaaaaaaaagactttggacttgaaaccttccagaggaacactcacacaatttaagataggttctggagtcctctgaccctcattgaacaaagctggatttggctgatgataaaagaccccagccacaagcctctgggccagcctccagcctctctcggggcttgtttgctgacttgctgctgcacgtgggtatcagaagcaccaagtaaactatctccagggccagttcttttctctcccttccatttctaagtcaatagttgtctataattaaacatatttcagatttgttctgtgtccctgaagttccatattttatctttatgcttgtgttatgttttagtgtctataatgttgtggtgggaatcatttcatttggtttaaaagagtttgccttggaaaaactgaattaaccttcataaatacattttgagagatttcagtgtgagtaattttctggacataatattattgtataaaatatcaaaatggtgggccaggcgtggtagctcacgcctgtaattccagcactttgggaggctgaggcgggtgaatcacgaggtcaggaattcgagaccagcctggccaacatggtcaaaacccgtctctactaaaaatacaaaaaattagctgggcttagtggcgggcgcctgtaatcacagctacttgggaggctgaggcaggagaatcacttgaacccaggaggtggagattgcagtgagctgagattgcgccactgcactccagccctggcgacagagtgagactccgtctcaaaaaaaaaaaaaacaaatatatatatatatatctctctctctcaaaacggcacggttggtctagatttgggtagctattttctgcaatttaattcataaaacaaaatgctttgattttaaagagctcttttttacttaaaatacaggaactgaattggtgagacttttggtttttgactgtggtaagtgatggtgaaatgtacaagattgtaggggttttgtagtcttatttttggtcatactttaaaaatgcattttatgaataaacttctgtttttgagatctacagaagctttgattctgttaccttaacagtagtaataaagttaacattgtcacatcattttgctttataaatgcttaattagtagttttaattcactttgtttctttaatgttcaacatatctttagctaagccttttggaattattgactttaccacattttcattaagcctaccctcccccacctccattgaagagaacgcagccacctaaaacattcacaatatgtaaagtatatgtgatttcaggggatcatggagagtcacttatttggaatattaagttaagaaaattaaggtttttttttttttagtttagaaaatttttagaagtctctcttagaacacttgtatttggtaatagagtcaacaacaataaatacctgtattttatta

SEQ ID NO: 11961 - DNA, 1911 bp, Homo sapiens
tgctttcttctccatctctgaagatctgctcaagacgtccagcaatgctctctgtgtatttaaatggaagtatttttctctgtgaagccacattttccaacatgagcctcatgaagccaactaagtgttattgaactgtaattctctcaataactcagtgtagcactttaaagtctgaaggacagcaacatgaaaagagcatatcaatgtggtggagaaagggaaggggttggctttttaatttatttttcttcatcttttataacaagaaagtatctatatatacatatgtaaatatttatatatagatatatgtagctttctatatatgtagtaggttggctttaatttaatatacttgattcagaaacaaaacaatagagtacaaaagtgccaagcagaacataaaacatccttacttttatttcacacagttttatatatagatagaagactgtacaatttgagccgggtgttaggccagctattttccttttcctgtgctttctcctttgagagattgacaaagcatttgttaacgtcctattatttaccttaattacatttttgtaacaaaggagtctgtaactttatttatacttatgaatatatccagggactacttctcattgctgagcagcttttaatacacctctgcttgaggagaaagtctagttcattgctactgccaagagctagttcttgtgttcatatagtaactgcacagggcttatagctgcttcattctgctactttgtaactaggagccattgcatttattaaatgtccctcagtaacgttaagtgctagttgtgattttatacataaaggccagaagctgtctgaggcaatcatgattgattgtatgtatcacttactgaagaatacctgaagtgatcatgtaactacttataagggatatccatttgtttgattacatgggtaaataatttgtcattaaacttgtgtttgaatcatgaattcccttgtttcaaaagacttgcagctaatctaaaaaactggtgatatttaatatgcatgtatgtatctaaacacccacatatatttgtggtttaagtgtgagaaatcttgctaatctatatgccacagaagagcaaaattgtatccaaatttatgccacttaaatttctttaccacgagggatagagcatgcatactggtttttttttcttgatttgcccatataattggtaatggataacttaataaatttgtgtgatataaaagtagtgtatcatgttctactgtttgatcttatcccttcccatttctgcaaaggtactgttagctggaagaaaaacattttggttagctttgtatgacagtagtctttccctttatagtttctctataaaaactggttttaaaatcagtggaaaagggcaggttgaatcaaggtgaatcaatctgaaattgagcacacctgcctgccatcgctgttccttcaactgagtgctgcacatcatgggctctgtctgtgagagaaaaatcccggtgcttggtgtccttgcatgacatggagttttgcatgtagatcaatttaaaatgtacctcttgtttacataatttgcataattttaaaagataatgttgccaaactttggaaatgttaatgttcagactgaaaatctccactacatgtaactttcttcctctggatcagtggcatggcttataatcccagccagtggtttgaactgttccagtgtcaactgccatgtgctctgcttcaagggggaactagccttttgtgaattttttgtacataagtatttgttacaaatattttagcaaatgctttctatttctcttgcttgtgcatatcttggctggcgttacagaaaaatagtgtaaacattatttccttaccggggaatgagggttttttct

SEQ ID NO: 11962 - DNA, 1210 bp, Homo sapiens
tacactttcacactttaaaaaaagcagtcatgtactgtaagccaagactcaacaaatttataaaaatgacatatagatcatattctggtgccaaataaaaaacaattgaaatcaatagccaatcaagttaccaatcaattttgaaaatctcatgttttgaaatttcaaacacacacccaaagcatttgtgagtcaaagtaatatcataatgtaaattagaaaatacttagaactgaccaattatgaagatgccaaaaccaaaacttggaatgcagctaagtggtccttacagggaaatttgtcatcttgagggtttatgttagaaaagaataaaagtttaagacaattagccaagcatagaacacaggagattagagaagaatgacagagtaaaccctttcaaaaaagagaaggccaagaccaagaaagaacagaatagaaaacaagataaatggagaggtaacaaagaaaactattagttgggcatagaagaggtgaaaagagaaatagacatgtatagaaagaactgtgtacttgcttgtcaatctggatgggaagataagctgaagtcaatgctgtcatgggttctgggtagtactggagagaaatcattgatcaagagaaccaagaaagcacacgcaaactgagttcatcccccacctacccctttccttcctagaaagcctttgtacacaaaatggttgctataaaatattgtaaaatgtgtacattttattctcccccatttttatcaccaactaaaatttggcggattactatgaaactctcaatttgcaaagctgtttgtccctacagcagtctttgatcactatgttgtgttttttttaagtttatggttctactttttctggtctctcgcttcttgatatcatacctgtgttttctaatctagatactcccctctgcacttctaatttgacagtctaagcttctgggtacctgaatatcagaaaaccaagcttacataaattgcatatgaaataaggattcctagtctctaagaacttgagagaaggcatatggcctaagaacccaagctttagtgaatgaccaatgtgtccatttatgccacctcctgggttattgaggctattccagatagtcttttgggttgagcaccctggttcagtgaatccatttgagagaagcacaattataggaagaagtgcaaaattgaaaaaggatctga

SEQ ID NO: 11963 - DNA, 2709 bp, Homo sapiens
cttgaacccaggaggcggaggttgcagtgaggcgagatcacgccactacactccagcctggcgacagagcaagactctctcaaaaaaaaaaaaaaaaaattttttttttaaatgggctgggcatggtggcttgtgcctgtagtctcagcaacttgggaggcttaagtagtaggatcgcttgagcctgggaggttgaggctgcagtgagctgtgattgtgccactgtgcttcagcttgagtgacagagtgagaccctcctgactcaaaacaaaaaacatggtttctcctctctctcctgtcttcttactctctatcccatttgatgtagtgatttttaaatgcttttgtaagttaattcttaacacaaaagagacattgtaatgaggcacaccactaaagtgagcatgcccaattaaaaccagtgtaatataggataagaaaatctgatttttcaaaaaagatactctacataaagaatccttcatataaaaagttctttcttgtagtacatttaaagttttaattcactcatgtataactgagagttcctttgagccctttttaggcagggaggcatgtctgtcatctagcgtgtggcccagtaagtgattattacattggaatcagtttttcagtcttttaaaataaattctgtgccataagaataaaagataaagagaaaaattaatgttaactatttttagcttattataactatgtcaacaagtgtttattaatacctattatgggaaagtcactgtggttggcattgaaaattacatcatctttaaagcagtatttgtccccagatggactcatcactagcaaagactaggttcattggaaggcatagggtgagagaatgggaagatgaagtggaggcgggttgttaaagtgctgtcagtgagtgattttgtctacttgaataatggtccatgtttgggggcatattgtgtttcataagaagtgaaaggtatttgcaaagtaagctacaaatgacccataaatctgttaacaacagtccttaatatgcaaagatgaaaaacaagcattactgctacccaaagggaactggtgcttggtgatgtgcagatggggctgttggttaagagagctattacaggttttctctcttaggtttcataggaggtagttactgagatgagattgttttatctttttgaatacagatctcttgtcttgagttagttctgaggatgggagtaataaaggagttttttgtttttttgtttgtttgtttgttttggctccttagtaatactcctctgacatttatttctattattcttcaaagaaaggaaaccaactgaaatgtttgctttaacaaacattttaataagttctctgggtttttttttccccttttaaaaaaattagcatataccatagcaataaaagaactaatgttaactattgtatgctacaacttaagtgatttttctaaagaagcacaatgtcattgaaagtattattgaaaaggatcatagtcacattgaatttgtgaaggccaaagaaattgaagggagtgatattttcattttatgatattcacatatttagtaaattttgtgtacaagaataccaggcagagtgttttacccatggaaacaggtttcagattactttatttttactgttagagtctcaagtttagaaatgctaacacttaaatcagtttttttctcactatacttgaagattgttaatattttgatatcttcctagcttgatgaatttaaacatatcttcagatctgtgacagtgacagccaataggactgataatattagcttcaaaccaataatatccagggttaaaataaaaatcatagtgaaagtacgattgtaaaattatgctatattaacttttaagtctgtaataacttgacatcaaaatgttatgtaattaccataaataatggctagcgagaacatctttggaaattctcaaattacctttcttactacactgtttgcagaatgaatgtagaaatgatcctgttagctttctgaatgttctgtggttgaatgtgtttttgcttaaataaagcttttggtatttgtttaaattacacttcttgagaagtggaaattttaggatcatctttgctttgtttcagttttgtgatttttgaaatgaatgtttagtttactgagccagttggtcatttcttcctcatgtcgttaagtccagtgagtaagcctgaactgtgaataaattaccaaaaacttgcttagaatttcattttgaagcaatttgctaatatttgaagtgtatacacatttgtagttatgttagaaattgtattgtactaagaatgtaatcaatgtctactttagttgtaaacatttctgatgtcaaaactttattcattactgttgattttaagaataagaaatcactgcctaaatattaccaaaagccactgtctctacccgaacttcccagtttgggaaagaatcgttagataaaacaaaggctctgccctttctgataccaaactccacagatactttctcacatcttttaaaacattttgcaataacatattgtttataggaagtttacggggtatgcaatgattaaaacttttaagtgaattgatagttgcaaaagaaaggataatatttaaggtcagtgagtagcaagacaatctaaagtttctgtaatatctggctctctgttaat

SEQ ID NO: 11964 - DNA, 2257 bp, Homo sapiens
tgatttttgtgaagttacctcttacattttcccagtaatttgtggaggactttgaataatggaatctatattggaatctgtatcagaaagattctagctattattttctttaaagaatgctgggtgttgcatttctggaccctccacttcaatctgagaagacaatatgtttctaaaaattggtacttgtttcaccatacttcattcagaccagtgaaagagtagtgcatttaattggagtatctaaagccagtggcagtgtatgctcatacttggacagttagggaagggtttgccaagttttaagagaagatgtgatttattttgaaatttgtttctgttttgtttttaaatcaaactgtaaaacttaaaactgaaaaattttattggtaggatttatatctaagtttggttagccttagtttctcagacttgttgtctattatctgtaggtggaagaaatttaggaagcgaaatattacagtagtgcattggtgggtctcaatccttaacatatttgcacaattttatagcacaaactttaaattcaagctgctttggacaactgacaatatgattttaaatttgaagatgggatgtgtacatgttgggtatcctactactttgtgttttcatctcctaaaagtggtttttatttccttgtatctgtagtcttttattttttaaatgactgctgaatgacatattttatcttgttctttaaaatcacaacacagagctgctattaaattaatattgatatattcagtattctcttcaactttgtcacgaggaagaatttcctgtagttaattttaactttccttcattacattgttgcataaaactagtcccttagtgccagtttggaagttacttgcaattgtttggaagatttgcaggtcgctgacctcatcatttcactctaagtatatgtggtaggctaagctcagaaaaaggtatgtatgctttacactgataggcaccaaatttagtattgtatcctaagtatttttcctcttctgtattttctgtgctctacccctgaaatatatttaggaataaagaagatataaataaagtgatattggggtatgttcagcttgtaagtgtcagaaatggaagttgacaatttggattaaaatatttaaagtagaatgttattatttgatacccccaaaattgtgagtaataatttcttaatggagcttttctggccagatcttcagggctataggagagtgtgtttgtttttggtgaagtccttctttttcaaaggtttttacttttaaattgtgaagataagctatttagcacaattatttaagtaagctgttttttcctttcttttctttcttttcttgttttaacttctgggtgaggttaagattttctaatagttattgttgttgccagagaagcatagaattctgcttgtgtcttagggttagagaaagatttgttatattttgaggtaatttggaaggactttcatacatggtgactagaaacctgatctttttaagaataaaatagggtcactatttacattatatataatatatggctattatagctatattaatctactttaattgtttctaagattattttgtgtaagtcagctagcgtgtgtatagtgtcatttcttatgttttgtatattaacgttttacaaacacaatttgtgtgggtttgtagcatttcttatagtttaaagtatgattcagcattctaagttaaaactaatatgtgaagtcagtcattagtctgcataatctctgtctccctctgtgtgtgtctttctataaagcacatgtgtacacacacacacacaaatatactgaaagctagggtaagttctaaactgaatatcaaaaaccaaaatcaagaacaaagaagtgatattttccaaacaaacatggattctctgccgggtgcagtggctcagcctgtaataccagcctccactttgggagtctgaggtgggagtattgcttgagctcaagagttggagaacagcctgggcaacatggtgagacctggtctttacaaaaatttttttggccggacgcagtggctcacacctgtaatcccagcactttgggaggccgaggcaggttgatcatgaggtcaagagatcgagaccatcctggccaacatggtgaaaccccgtctttactaaaaatacaaaaattagctgggagtggtggcgtgcgcctgtagtcccaactacttgggaggctgaggcaggagaa

SEQ ID NO: 11965 - DNA, 1169 bp, Homo sapiens
gaggctgaggcaaggagaaccgcttgaacccaggaggcaagaggtttcagtgagccgagatcgtgccactgcactccagcctggcctacagagcgagactctgtctgaaaaaaaaaaaaaaaaaaaaaaaaaagaaagcaaatatattttggcatttaattggccttttgtctttgttgggcgcaccaaggttactttgtgaatttggatattgaatattatctaataaagttaaaatattagctttttctgtattttttgaaacatatattctagacagattcctagataattgtaccatcactacttcttgctaggatatttaggcctgatcatgaagtcctaagtgaggcgccctaagatattatggtaagagagatatttttaatctgaaaacagggtgactaaggagaaggtgctacactttcatatattggcattctgtgcacaattgaaaggaaggttccctttaacattacaaaggaaaaaaattaaaatacattgttacagaacaggtgttggcaagttttctggagtgggccggatagtaactattttaggctttctggaccatgtagcctctgtagcaactactcaactttgcagttgtagtgtgaaagcagctgcagaaaataagtaaaagaatgggcatgggtatgttccaaaataactgtatttaatacaatttttatttgtcaattaagaaaaataattaaaaaaaaaccaaaaacctgtattaggctgggcgtggtgactcatgcctgtaatcccagcactttgggaggctgagatgggtggattgcttgaccccaggagttccagatcagcctaggcaacatgacaaaatcccatctctataaaaaataaaaaatttagctgggtgtggtggtgcatgcctgtagtcccagctactcaggaggctgaggcaaggggatcacttgaggccaggaggtcaaggctgcagtgagctgtgattgcgccactgcactctagcctgggagacagagcaaggctgttgtcaaaaaacaaacaaataaacaaaaaccgtttatttataaaaataaaccctggggctgcaggtcagtttgctgacccctgatagagaatattttggatataggatcttgttctgtcatccaggctggagtgcagtggcgcgatcttggctc

SEQ ID NO: 11966 - DNA, 1141 bp, Homo sapiens
gcagtggctcacacctgtaatcctagcactttgggaggccgaggcgggcagatcacgaggtcaggagattgagaccatcctggctaacatagtaaaaccccgtttctactaaatatacaaaaaattagctgggcgtggtggcaggcacctgtagtcccagctactcgggaggctgaggcaggagaatggtgtgaacccgggaggcggagcttgccgtgagccgagatcgtgctgctggactccatcctgcgtgacagagtgagactctgtctcaaaaaaaaaaaagaaaaaattataaatgtgtattttgacatgtttagttttttatacttatgagaaactcccccttgaaaaagttccattgcctttaaacggtttgaaatgtttgaaagacagaatctaacttcacgttttttcacatacttgacataattatgctaattttgattttttaaatcagaatttttcattaaatatttgtttatttgcaggtatatttgcttacttaaactaccatgttcctcgaacgagacgagaaatcctggagaccctaatcaaaggccttcagagactggagtacagaggatatgattctgctggtactttaaaaaaaatactatggattttgcatgattctttaaatagatactatttttattgttattaggagactagactattaaagtctgttttgttttgagtaagtgtaaattggaagaatttttgtcttttatcatatttaaaggatttatttatgtaatctcaacagtgttaccatttatgtggagtattgcttatgatgatctcttaagaatattattgtaaaaacatcatatgggggattattgtggtaaaacaaaattcgtgaaggtcttactctaaattcttttttctttcctataactttaatttttatccattgatttcatgctttgacacataaacttgcctcagattcttttttcttatttttattatttatttttgagatagggtctcactctgtcaccccagctggagtgtagtggtgcggtcatagctcactacagtctcgaactctgggctcaggcaatcctccctccgtagcctcctcagtagctaggactatagctgtgtgccaccatgcccagctaatttttaa

SEQ ID NO: 11967 - DNA, 1102 bp, Homo sapiens
tccctagcttttaacagattttgctattgtttttataaatgtgaagttatacccttctgattcgacggtgtatataaaatggaattttggggatgggcgcggtggctcacgcctgcaatcccagcactttgggaggctgaggtgggtggatcacctgaggtcaggagtttgagaccagcctgaccaacatggtgaaaccctgtctctactaaaaatccaaaaaaattagccgggcgtagtggcgcatgcctgtaatcctagttactcggaagcccgaggcaggagaatctcttgaacccaggaggtggaggttgcagtgagctgagatagtgccattctactccagcctgggcgacaagagtgagagactgtctcaaaataaataaataaataagtaaataaataaataaataaatggaatgtttgcaaatgagatcctttttaaaagcagtaaaggaacttgcaattttaaagtatcctaaaatgaatttttcaaaagttttttgtaattatactgtctaatggctttggagataattgagggatgctgagattggctgctaggattggtcataaaaccagtactattaacatatccttacatatactggatatgaagaagttgtgagagaaaataattgcttaataagcatttcttcaattgtcccctggaaatggaggttaataggttctggtaatgagcagtagaaggcgggaaagggttttgtaacacaagtttgggaaattctgctcttggagattcacaattagcaagattaaaggttccagaaagttctaaatatatacctaactttaaccaggtagttcttaaacctttaattatgaaacctttctttacttcattcctttttagcatccggtgaaatagtgttctgtttctgtggtttgagaattttttgaccgtatatttcaggtgcctagaaagtgttagaagatacttgcaggtatttgaaatgatggctttatacttggcactctgccctttgcagagatgactaaaataagagagttgccttcaagaaattgctgcctgatcagaggaaagaaaatgaatgcacatgcaacagcttcaggtgaaaat

SEQ ID NO: 11968 - DNA, 1223 bp, Homo sapiens
tgagccaccgcgcctggccccagttaattatttatagtcttttctgcccagctgagactctgctatgggtagcctctttgagacaaggagaagtgatcaatgctttaattaatttccaaatatttaatttgcttttattttattttattttttttttgagacagagtctcgctgtgttgcccacgctggagtgcagtggcgcgatctcggctcactgcaagctctgcttcccaggttcacgccatcctcctgcctcagcctcccgagtagctgggactacaggcgcccgcctggctaattttttgtattttcagtagagatggggttgcttttatgtttttaggataccgggttatgattcaaaccttgttctttggggctgttgatagatttattcttactggcttgtcatgcctcattatagagtgtatcaggtaaagaagtaatattaaaatcaggaaaacagcaaaatctaatcattttcttaattcttaaattgtctttgttttttggttttaggttatggatgatgaatcagatgaaaaagaagcaaactcaccttaaaataatctggattttctttgggcataacagtcagacttgttgataatatatatcaagtttttattattaatatgctgaggaacttgaagattaataaaatatgctcttcagagaatgatatataaatattgcatgtttgctttacctcatatgagttatttataacctcttgaatcatcttctgtacacgtggattttatccaaggatatttttatttttgtccctcatttcccatggctctttctttgcatatgtgtgaaggagtttaaaatacatttccccccatctaatttatttacttttttccatacaggaagaaacagaatgctttttagaatattctaaaatagctttttgtgaaatatctaaaactatttttactgaagtttttagcttaagaaacagctaaacaagtctgttttaaaaatggtatctggctactagcccccaattaagtagcaaagaactgcttaagaccaaaaaaaagaaatcaaaaatgtccgggtatggtggctaacgcctataatcccagcactttgggaggccgaggtgggcagatcacgaggtcaggagtttgagaccagcctgaacaacatggtgaaaccccgtctccactaaaaatacaaaaattagccgggcgcggaggcacgcgcctgta

SEQ ID NO: 11969 - DNA, 1185 bp, Homo sapiens
agaggtgtaagggggccaggcgctgtggctcacgcctgtaatccctgcactttgggaggccggggtgggtggatcacgaggtcaggcttcgacctctcaaaatgctgggattacaggcatgaaccaccgtgcccaaccttaaatatcttgtgttatactgcaaattgccttttttactaagtataataattttgaaatatatccatttcaaaaaacatagttctagtttactcattttacgtgctggagagtatttcattataggaataagatatagttaatttgttcctttatgttcaaggcacacacctgtagtcccagctacttgggaggctgaggcaggagaatcgcttgaacccaggaggcggaggttgcagtgagccaagatcacaccactgtactccatccagcctgggcaacagagtgagactccatctcaaaaaaaaaaaagaaaaaagaggtataaggtagtgttctgtatgggtctttgccgttgcctggaaatacagcattttcctttaaatgtttataggaaaatgaagaattagactggaatttactgaaaccagatatttatgcaacaatcatggacttctttgcatctggcttacccctggttactgaggaaacaccttcaggagaagcaggtaacatgttgtattgagtaattaaaatttgtcctttttttagacttttctattttcttcacatttaccttgatttcagaagtcataggaatctagatttctatcatttaatatatttagctctgcaaatttatatatcattttgaaagcttgtgtataaattggcattactctataaaacaaaaattttcaattataaaaattttcaaacatgcagaaaatatcatgctcaccaatttgccctccactcatatctaacaaatgttaattaagttacagaatgggcttttgggaaaaacaaaacaaatgttatcttttgccacagttgctttagactcattttaaataaaatattaaacatacagtgtcagaatatagagcataaagtaaaaaaaagaaaccgctaaaaccactgtacccccatcccttttcccttcctagttccagagatgtgtgaaaacttgttttgttttatactatacatgtaagtctctgcagggaatatataagactagtttttgtttttaagttttaaatc

SEQ ID NO: 11970 - DNA, 1620 bp, Homo sapiens
tcacacttggaatcccagcactctgggaggctgtgttgggccgatcgcttgagctcatgagttcaagaccaacctgggcaacatggcaaaaccttgtctctacaaaaaatacaaaaattagccaggcatggtggtgcacacctgtagtcccagctacttgggaggcttaggtgggaggatggcttgagcacgggaggcagaggttgcactaagccaagatcgtgtcactgcactccagcccaggcaatagagccagaccctgtctcaaaaaaacaaaacaaacaaaacatgaatgaatgaaatggctcaccttccctattatgaactagaagaaaggatgaaggaaggttggcaggaccccagccttactctgtagtgacaacccagaggtacttttcccggaatgcagggtcaagtttatgtgtgaagggactctagaatagctggtaaaaatggctacatggtaaccattcttgacttagtccagtattcccataatttgtaattccataaatttattctcagctgtcccccagccatttctaatagaaggatgtgtaccccagttttgacaatgttcttgaaatcaagttagtgttacctgcattgcattataatggaactatatgtacatgttaaagggatccgtttgattcctttcggcaaggaattgcaaaaatagtttttaccaataccagttaaaataggataggttagactttgggggcagggtgagacagtgcagccttttcactctgaaatggcaaatcagctgtactctttgagtctaccagagattcctatttgagtgtgaatggggtgtgtgtgtgtgtgtgtgtgctcattcatcttcatgctttcttccatggtgttaattcaagctctcctaataaaggtatccaaagagtactgagaagtgaccataggtatttggcatgagtaaatgtagttccttttgccaaaaaaactctcaaaagttacaactggagttcttcgcgataaaaggttggggaaatcagccatggctttagccttgttcccaagtacacatcttcttatccacaaggatgaaactctgtagggctcaccctgagggctcatgtgtggcattgagagggtagcagtgaccagaacaccacaaggcccacaagatgttttgaatgagggaacatttaatgtcatttgttaggagatagaaaccaaataataaaggacaaggaccacgctcattccgtggagaagaggtgaactccctctgctgactatttggaatggactgaatgaggaggtctctccagccagaaggagtattgaggtcatcaggcctcagaaaacaatgtacacataatctcgggctgtgaacaagagaaaggagggggggaaacatgaaagtcaatcttaacaatttttgcaatacctcttatttgcagaccattggatttatgttattgcactctcggtgtgatttatcgtatgtatctgataggttttatgaattgttttgagttgtaaactcctataccctttattaaaatggacctaattaagtgatttatgctttgtgcaatttcttaaatcagatctctctaggattgaagggatccataggtatctttcact

SEQ ID NO: 11971 - DNA, 1169 bp, Homo sapiens
ctactttcttgttttcgtttgttgtgtttttgctttacacatttgatagggaacatagaagttgtgacctttcatttcagtggaaagcattgagccagaatatatttattcctaaaccatcgagccacacatgcattgatgaaccctgaaagaatccacagtaattgactaacaggcagtactgaatgaaagatgtcatatgtggtgaaaaatatttaatatatcagtttcttgggctcacatacagccctttagttccaagtgcttggttagattagaaaatgggatgaacacaatttgatgctgaagcagctgctgagcagcacccagggagtctaggtcatacgccctatattgttttcggcccacttattgttgagttgaaaagtctcatatttgtagactagagtgtatgtgtttagaggctcatgttgtatctgagttttctctggcaactaagatctctttctaaacgttctagaaagatactggtatcttactggcccattatttagtaagttttagaatacatgtacatcagtgttttcaactgcttggtggacatttcactgatgcataatcaaagtagcagattataatcatcagagtgatctgacaaggaaattctgtatttgcttccataaagaaaaataatcaaaacatatatcagatataatatatatgcagtatatcacataggaaattttattgtaggaaattagagaaggatgctactcaattcattctctagcaggaagaatacagcttaaaaatcacttgggtccctttaataaagaaaagtgtgattctgtgttgtgtgtttggaactgaaattggagaacacgtgccagtcgactgtgaaatggttgctggataaaaccacagatgtggttttatccgagaaatgtgggactgaaattattttgatgagaggtacataagagagctgcagaaaagactgtagcttctgaggaggcaggagtaccttgttaatatccaaaccacccctgagttctaatgttccaactccacctaaacgaggaattggaaactttaaatggaattatctaatttaaattcttagttttttctttgtctttctcagctgatacttgtagttttgttttgttttttaaccaccaagaacacttgcaagtttgttactgaaa

SEQ ID NO: 11972 - DNA, 1120 bp, Homo sapiens
caccccaatcccaaaggggccctattgttgctagttttaattcctgtagctcctgttctaagtcatgcccatcgaagaatcaagattagtccctccactaaatcaagatttagtactcttgaaaaggggagatgtctggaaagaagagcaagataaaaaccctgcacatcaacaggaagtataatcctgcagttactaataattcctgtagaagcagcagctctaggagtctccagatctgattctcagtctgtgtgcaagccaggctggctctcgtgcatgactgtctatgggtgtggaatgtacgtcagagcctgtgtagagatacaggcagatgggctaactcctcatgtctagtcatgctggcagggctttccccacatccatgcttttgaaattagtgtgagtgtacaggtttgtgtgtgcatgtatacgtgtgtgtgcacaggaagcatttccacttgagggaaatcctgccccatcatgcctacctccacaatgaaatcactcgttttttggtgtttgctcgcctaactgacttgaaccccattttatttatttagtttttttctcatggcaaagtagaatacgttggaaggtgtagggaaatcctgctggaactggtgtttcagagtaaatcttttttctctccggaatttcttgttttgctattaacaaattatatttacctgattatgaaaaattaattttccttatacattttccccttacaacactagaaaagagcaccttgttacagttccggcctctcagtatgtgggctaaatgccagcattagggaattcattaatcatgagactaggctacaaactaggcttgcttgttttggggtggttttgttgttgttgttgttgttgttgttgttgtttccaaatctctactgccttttgaggaaatgtaaatctgagacatggaaataagtgtttgggagaatggaaaagagctgaatcaggtaggcatgaaaacttttacattctctatcctctttagatgttgaaataggccagacaggttaactgatgttttttaaaattgtcttttatttctggaaagatctgacttattcctagcttttttcataccctttattattagtgcc

SEQ ID NO: 11973 - DNA, 1115 bp, Homo sapiens
attttactgcccacacatagccaggtctgtcctccggcatactagtcagctcagttcacctagacccaaaatcagtacaccttgagtacatagtgcccactattttggagttgtcatttcatttgtagagtcctttgataccagggatttctctagatttggggctttataagctccctgctgcctagaactcctaactcactgcccaaagaattcatttatttaaaaaattagggcaatacattaacaggaaaactgcccatttatccccagacattttatcacattgagaagtaactgaaacataagcaatattaattctgaatatcctaacctagtgtagtaaagacatttatataggtacttataaggtccaagtgaagtaattcacatcatgagagaatgaaatactgaaggacaatagggaaagagtgacattttatctgagtgggagcctgaaagtttcaaaaaggacatggcatttgaactggggtttgaaatgagattttgatagttggctaaggaggtggggttgtggagggcatcctggcctaaaagaagagcaagagcaaaggcacaggtcagaggcttgaaagtatgaggatggtttctgcagaggtgagaaatgtggctgaaatttacaaaaatggcactcttgcatcccccaccgtggagtttcctcttttttccctctccacccacttttccctcttactctgcatctcctgtgttccacttgggatgacccctgttgagatacttggagaggaataacttccctgtgcacattaatgagactgccagaaataaaacgtttatttatgtgactgtgaaaccaaattttcacgtgcattactaaatgatatcttggaatgggtggttggggaatgtttttcaggttgaaaacatcctcttgcatgaccgaggccactatgtcctgtgtgactttggaagcgccaccaacaaattccagaatccacaaactgagggagtcaatgcagtagaagatgagattaagaagtaagctttttctcctttcatggagttttgtccacaatcagatgagcaactttaccttcagcttatggatgagaaggtcagggtggggagagaat

SEQ ID NO: 11974 - DNA, 1125 bp, Homo sapiens
ccatttaaatgctatactgtaaagatggagacaattagctcatgtgtcaaaaactcagatattactgaaattcatctttaagcaaagcatacattcattttctagttgatgattggcattggcctgcagtaaattaggacagtgatttttaacttgtatttggggtagtgagcatgcagacaggtcacaaataggaagggaatatataatttgaaaatgcatagattggctccaggtccagccagaaaaggagagaacctcaaagaagatggggattggctgtataccctctaaagaggcacattatagacttaagaggtcggagtgtggagaagacgtgagattttcatatttatcaaagaagatatggtttttaaaagactgataaatatggcattaagcagctgagttataaaatgagtctagagaggtggtacctgtagttgagtactgtatgtacctctgggaacaaacatatttcttcctgttcttgctagtttcagagaggaggagtgaaaagagcaatcaacagcaaattctgcgtggtggtttgctgtgagctccacagcatttttgaaaggtcagctctaggtggctcgctcaccaatgatgagaatttccttgaaaaaagttaattttagatcatagagacttcctcagaagatgaagtattcctttctcttttaaaatcatagtgttagaatcagtataacatcaaatgggttatttaagtggctgtctactcacccagcaattatgtggtgatttttaaggtggtatgacagagtgttgttcaagtctaccatcaaatcctgcttctagggttagctcacagaacacaaatgaacaactgtatgagatagggaagtaggttatctggtctcttcagtgatcttggatatatcacttcccctctctgagcttgtcttatgtgaataaggagatcaccgggtgatcttgaaggtctcttctagtgcaaacatggtttttaagttctgtggtttttgttgacactatttgggagggagaatgagattgggttgatgagacggaaatgttagacctatgtagctgggataagaaaacattaaaaaaaaaaagaaaagaaacagggttttgctatgt

SEQ ID NO: 11975 - DNA, 1103 bp, Homo sapiens
gtctgctgtgggtgaatcagtttgagctggtcagttttctccttgggctctgtgttaaccttggcagacaaggaatggcagtgccaactgaagctttgttatttttgtcaaaaaacagagattattggaccaaagagctcatggtatctattattattatagaaggctaagcatagcattgatgctagattatcttttgtcgttataatgagcttaaataatgatgcctgtcatctaggacttgaatcctgtagaaagcaacataatgccacataatttgtttgctgcatgttttcaaggacacttacagctattgtactgggacctttagggtaagagaaagattattgtccttttggtactgagcatgaatttgagaacaaaatgatgactttattacctatggggacaggaagaaggaatggaactaaggcatcgtaggttgggtccttcctggaggactggggcctgagcagcatttactgagatggcaggtctcctgctagtaccttggttcattttctctggtcagtgaatctgattgattcaggaagtgctgattattttacaggtttgttagacttgtttaatctcccctgggatagcccacccctgttccacaggcctttgttctctgctgtttttagaagccttggaatcttggtattggaggggaagggggcagcactggaagaaataatttcattgggctttttggctgtagagaaaaatcttggcttgaccaggtgtaactcagtaatgattatggaaaacctgatatccaatactgtctttcctccccttcccccctggaataaagggagtgctatgatgttctccttaggagaagactttcaaggttagtactgtgtgtgatggtttaaaagcatgagaattgaaggtaaatagcccttggctggaatcctggacatgtccctgtgatgttaggaaaagttaactaagatctagtcttctcatctataaaatgtagatttgtaaaatgcaaaagcatgggttgttgtaagaattaaatgatgtatgcaaagcacttcacacagtgactggtgtatgttagttagcagtttgtaaatggtaactcttag

SEQ ID NO: 11976 - DNA, 1169 bp, Homo sapiens
ttaatatattaactagtgttcattacatgtagctgaaatgtaagttaaaagaaattaagagatattctttgtcctgtgtaccttatccttgagtgaggcttttgggctccagagtttcactggcctgttcaggtcttgggagggggattctggcgagaatgtgtaatcctaagtacctttctcaagccttcctttcccaacttgctgcactatacatgccaaatgcccagaaacagctgaattcccagcctgggggtttcattaagaccaaagttaatttcctgggattttaaaataaatctccttatgttcttatctgtaaacctaaggtttataaaattcttgagaactttaaaactagcttattttgtattctaatagacatgaatgtacgtatcccccgtccacaaaaacatttaagaataataggtttgaaaagaatggctgtttaacttacatggttttttatagattttgaaggtatggcctttcttgaaactgaacaaggaaaaccatttgtgtcagtattcagacatttaaggttacaatatattatcagtgatctggcttctgcaagaattattgaacaagatgctgtagtaccttcaggtaagagaacataatttgtaattttaagtaatatatttctgattataaagtaatatagatcatagaaaagaacaaggaaagaagtagaaattattattaatcccaaaaaggtatacatctttatgccaaagtggaatcatcctatagaagtaattttctgtgcttacatatcatgagtattttcccatatcatatttcatgaaatactctctagaatatttaaatgattatctagtattctgtaatatggatgttctttaatttaataaaccagtacatgattttggatgagactttttaaaatgacttttgaagtatttaaagatcataagtgatttttctattagtgctccttaaatttgtttattttgattttttcttattctaaagtcttaaacttcatgttgaagcaaatgtgtctttgctaattataatttaaattttttgaaataactactgatttacctttctgagttaaatctctagtgcttgtgaataattctatttagtactatatatacatatacaaaattgaaaatagaatttctgtttgaacattt

SEQ ID NO: 11977 - DNA, 1958 bp, Homo sapiens
tttaagtcaggtactcttactgtccccatcttacagtgaggaagctgcatttgacaaggtcacacagctaatgggtgggagtttggagagtggagttgtggatctcagactcaggacactatctcctttggttcactcagttcaacagtttggttttttgtttttattttatctaattgtcattgaatctacaaatctgtcttataggaacaagtggtgatgaacttggacagcaggcttctgatcttccctttatatatctgctgtaacttcttgtatatatcaccagaaaaaaagaattgaaaataatcgtcacccagaaaatccagaaaactgaagatttcatcagttggaaacagtagcactttgaaaactttttaggccagctttaatttaatggccctactgatattcacatcgaaggtgactaacaatgacaaaggccttatgaactgtacagacaatacagaagattattcttatcctcattgcatttctatgcatatgcgtaagaacattttaaagccaagaaaatatctgtcaaaccatttctgttagaacgatgtcaattcatgcttttaatttagcatcaatagaaaattgctgtaggtaaatctcacatttatctgcaacaaaatatagatttaatttttagcttaaactttgtttctaccttatgttagtggacctcagttatccatctgtaaatttctttttatttggctaaaataatctaaaagaataatttggttggccaattagaaatgcctttttcagttggtgtattgaaagctttcctttaacattttcacctgctcattgtgattcctccttttagtctaatatctttccaggtcatacttgtttttaatcattaaatattttcttcctggttttggagactaagctgataaactttttttaaaacttaagcattgtcattgctattttttttaatttgactttcctaggagtttaagaacagtgaaagttagctttgcaccttcaaatgatcttgaatgagggaaaaatcagtttgattccaaggatatttcttgccttacatggtcttttctttgacagtctgtacacctttattattaggttttgaattatttatgtaccagatattatagttttaaacattttaatattctctgatctttagaattatttatgttcaaattttagttgggaactttgtttcctacttaagctcaggactttttaccctctgaattgagtgcctttgagtgacacatgctaatagaaatttcatagtaaatgtaaataaggtcagaggatgtaatatggagcctgatgatgaagcattaatgtaaaaatggaacttatttttgtcaaaaatgagatgtacacttgtcatgatttatgtatgttgaccttttgtgtttattactgttttgaaaatagccatgttcattttctttccagttagagtaagtacttctgtggttaatgtatatttttattatggtttttaaaatgggaatcatttttatgtatctgtgcaaataataaatgcccatttggaaaaagagtaagctcttacataaaatggaccaaaaaatcccccttaattgaaaccaaaattttttctttctagttaggtttttttcccaactccttttaacttttggaatttattaataatttttttcttttttaatgatatgcccataggttcataaattgcttttgttcttttaaaattcatccatttggtttaacttaaaggaaccttttaaatgcctcacccttgaccctcagagctggaatttaaatgtttctaatacagtgatttggctgttatcaagaggttacatttcagctgggtgtcagccaggtgtggtggctcacacttgtaagcccagcactttgggaggccgaggcaggcagatcatctgaggtcaggagtttaagatcagccatgaccaaca

SEQ ID NO: 11978 - DNA, 1853 bp, Homo sapiens
acgagcccaactcccccgaacgccgcccgccgctcgccatggatgccggtgtgactgaaagtggactaaatgtgactctcaccattcggcttcttatgcacggaaaggaagtaggaagcatcattgggaagaaaggggagtcggttaagaggatccgcgaggagagtggcgcgcggatcaacatctcggaggggaattgtccggagagaatcatcactctgaccggccccaccaatgccatctttaaggctttcgctatgatcatcgacaagctggaggaagatatcaacagctccatgaccaacagtaccgcggccagcaggcccccggtcaccctgaggctggtggtgccggccacccagtgcggctccctgattgggaaaggcgggtgtaagatcaaagagatccgcgagagtacgggggcgcaggtccaggtggcgggggatatgctgcccaactccaccgagcgggccatcaccatcgctggcgtgccgcagtctgtcaccgagtgtgtcaagcagatttgcctggtcatgctggagacgctctcccagtctccgcaagggagagtcatgaccattccgtaccagcccatgccggccagctccccagtcatctgcgcgggcggccaagatcggtgcagcgacgctgcgggctacccccatgccacccatgacctggagggaccacctctagatgcctactcgattcaaggacaacacaccatttctccgctcgatctggccaagctgaaccaggtggcaagacaacagtctcactttgccatgatgcacggcgggaccggattcgccggaattgactccagctctccagaggtgaaaggctattgggcaagtttggatgcatctactcaaaccacccatgaactcaccattccaaataacttaattggctgcataatcgggcgccaaggcgccaacattaatgagatccgccagatgtccggggcccagatcaaaattgccaacccagtggaaggctcctctggtaggcaggttactatcactggctctgctgccagtattagtctggcccagtatctaatcaatgccaggctttcctctgagaagggcatggggtgcagctagaacagtgtaggttccctcaataacccctttctgctgttctcccatgatccaactgtgtaatttctggtcagtgattccaggttttaaataatttgtaagtgttcagtttctacacaactttatcatccgctaagaatttaaaaatcacattctctgttcagctgttaatgctgggatccatatttagttttataagcttttccctgtttttagttttgttttgggttttttggctcatgaattttatttctgtttgtcgataagaaatgtaagagtggaatgttaataaatttcagtttagttctgtaatgtcaagaatttaagaattaaaaaacggattggttaaaaaatgcttcatatttgaaaaagctgggaattgctgtcttaaactctttgttggtgccttttttttccctccccttttagcctgaggtgtttggagggaggagggagaagggtgggcccgtccttggtattctctcaagctcttctcaccttatcggtaagattccattccctctgtgccccaacaaaggaacatggcaggctgggcctgctttgggatgtttccagggacagagaggttcaagttccagagagaggcctctgcccatttctctggtagaaacaaggttttctcgaggggaaaaggtgtgcccactcagtaggacctctaaatggcagagcgtcctctccatctaaccagttcccccacccccacctcacaggataaacttaggaaca

SEQ ID NO: 11979 - DNA, 1189 bp, Homo sapiens
gttctgtaaaatatacttaaatggaaaaaatgatgttcatttagattgaaaacttttctcagatggattgataattgcattcatcttgtgttttatatgagaaggtgcctcaagaatttcctgttggatttgtttaaaaggatttttatctttcgtgataaactttgctgtgtaccaggaactataaaaacaaaaacttgttactaaagaaaatatctgaaatgtgataagttcttatgccatgttaatttcatgtgtcaacttcaacatttacatgtattatttcattatgtaaaatgttttagcaatttaatattttgcacagttagcaaactttgtatgtcatttccttcaaggcatcatgcagagttgacatgagatttataaggttttaagttgtttgcatgtgaaaatcaaatacatactttggtagtctttgaatacaaagtcatctgctcttgtttttcaagaattttgagacacaaagttgtatgtaaaggaatatattaatttgccgttttctaggtagatttgctcaaaaagagtgaatcaacttaatatgtacaaatgatagctgtgaaactgtagaatatctttgtgtcaggcttggagttcattgtgacctccaaattttgcctgaaggaccagctgggcaaagcatcttttaaatgttcagaggccaaaagataaacaaaaaaaaaaccttaaaatcctacctctttaaacagccttcagataagagaatcctcagtgcaatcattattttgattcgtttggtacctgttttcctggagttcccgattttattattttggggtggctccaagcattaagaggtttaatctttgatggcattgttctagttttgaaatttctagtatatttcagagtctcttagaagacttgtgtgggaagtttcactttgttttcagtgaagatcacaaacctccttcttcctttactcaagaggaaaggtcccagtatacatatttgaatggttgatggttttcaagaccttcagggagctccctgcattttacctagaaacagaaaaggcccgcaaaatcttaagtttcctggcctgcatttcccgggtaggggcaaatgactccaagctggtctctaagccaatacccttataaaccagagcccaggaaagacagctcgagtgtataattctctggagctc

SEQ ID NO: 11980 - DNA, 1587 bp, Homo sapiens
acacacggttctaattaagtgtgaaggtatagctattgcacttatgccatctccaaaatttcttaagtattctttcactatccattaggagtttttcttaaacttgtctgataataagaatcacctggagttaggaggtggtggttgcagtgagccaatctcaccattgcacttcagcctgagcaacacgagcaaaactccgtctcaaaagtaaataaaaataatcacctggagtttgttaaaccatatggattctcaagctcctctcttgaagattctgattcagtaggtctgggagtggcgcgctggattttgatcaaaattgtagagcattttaaggtgagtacctgagggagaacttaaagacatcttagttggggagtagtccttttgaattttacagctagatataatcttcagtcagataaaatttatgggagctggtgtcttatgcctgactcttagtaatttcataccggtttgaagtacgtgtgcccatgcctaaagccttgactttcagaatgttgtcttttgattcttctgtcttgatttgattaggggtgaaatttagaagtcttagtaatgtaacttgaagatgttaaacaaaaatctcaagtaaaatgaaaagcaaatatgggctactgaattaagaaactggcattctagtattaaatcctcacttcaggagcttttaaaaatactgagacccccccataaccagagattcagattcaaagactgaggataggaccttagcattgtagctatttaaagtttctaatgtgcacccagggttgggaatcaccaatgtgggtgtgaaaatgcctacaaagggttttagtgccttagaagtcctaagaagcccaatctgtatcaaagcagatccattttgcaaggatctttcttttagaactttctcagttctcttagtaagaactttagaagtaatcttgataataagcacagacagcctaacagcagaggcaacttaaataactcctgagcagttggcactagaacagaatacttggaatgacaccaaagttaaccaagtccagcatatgtccaaagagttaagtgtttcatttactgtagcattctgggtgagaaattggttgctgaaatcttaagacagtggtctcaaccttggctgcacattggaatcacctgtagggttttaaagcatccaaatggtaattaacaggcagcaaaacttcagaactagttctgcatctactgtgcaaagatcatgattaactgtcaagacactggtagaacagaacaagcaaaagattaagagttcaaaagtaaatgcaaccaatttaacatgtagtgttattaaaaaattacaaaggcctagaccagcctgggcaacatggtgaaaccccatctctacaaaaaatttttaaaaagttggccaggcatggtaatgcgcgcctgtggtcccagctgctcgggaggctgaggtgggaggatcacttgagccttggaggtcaaggctgcagtgaatcatgatcatgccactgtactccagcctgggcaacagagaccatcttaaaaaaaaaaaatccttccattgaatagaaa

SEQ ID NO: 11981 - DNA, 1672 bp, Homo sapiens
aaaaaaaaaaaaaaaaaaaaaaacttggccaatcacactaccatgtccctttaattgaccaagataatacatattaaacctgtagcacagggcctaacacataatgagcacgcagtaaatggaggccttactctcagctttttctacgttcttccttcttgccacaggaccgcctggcccggtgcaccatgcattgcaacgacaaagccaaagattcaatagatgctgggagtaaggagcttcaggtgaagcagcagctggacagttgtgtgaccaagtgtgtggatgaccacatgcacctcatcccaactatgaccaagaagatgaaggaggctctcttatcaattggaaaataaaagtatttgccagtggccatcagggctgagggcaagaatatattttttataaggaattgggaattttagtcttttaagcaaagtttacgaatgaagaaatgaaggatggccacaagcgtaaggcatatgtcacttgcctctggacactggttattttatgtttcagtccctaaaaaatgaaatggaaaaaagtggtgctaaatcgagtcagagatattacaggagagttttagagcttattatttcctgtggccagtgcttgtcctggcagtaaggctttcccctgtaacaagccagagccctccaaggtaccagactcttcttactacacaggtactaacaggctggcaggttagagttggtggagtctgaggagagatattttctctttgttgccaacatcctgtttaccaaaagtgtcaccccaccatcttccataagctgtgaaacaaaatcaatgaggtcactaacttagaagggaaagaaagttttctgggtctttgttttcttgatttggggtaatttatacaagggcatacaagttgattttaagatgtggaactgggaggtagactagtttggataagaactttgaaatgttccttgtggatccccatttctggtcatcaagatgtggatgtacatttcttaaaattattacatgctgcatctttcagcctggagactgtgcagaaacatgagaggtgatgacacactaattatgggaagcagaattactggctgatggcccctgaggctgtgtgtaacaaaatgacaggacaatcttgcagtaacactttccccttgaagagaagggggttttgattgtgatatatactagtatctaggaatgaacagtaaaagaggagcagttggctacttgattacaacagagtaaatgaagtactggatttgggaaaacctggttttattagaacatatggaatgaaagcctacacctagcattgcctacttagccccctgaattaacagagcccaattgagacaaacccctggcaacaggaaattcaagggagaaaaagtaagcaacttgggctaggatgagctgactcccttagagcaaaggagagacagcccccattaccaaataccatttttgcctggggcttgtgcagctggcagtgttcctgccccagcatggcaccttattgttttgatagcaacttcgttgaattttcaccaacttattacttgaaattataatatagcctgtccgtttgctgtttccaggctgtgatatattttcctagtggtttgactttaaaaataaataaggtttaattttctccccacta

SEQ ID NO: 11982 - DNA, 3094 bp, Homo sapiens
cggggcaaacgcttagggatcctggttgtcttctccttcatcaaagaggccattctacccagtcgtcagaagatatactgacccccatgcaggcaggatgtggggggcaagatcaggagagtcaggcccctgggcctctatgccaggtggggaccagaagtcgggaaggcacctaccacctgccctggctttcttcccctcaactctggagccccatccccaccctccttggggggctcagcttggctcagatctgatgcttcaagaggctgtaacctcagagggcaccaaggagggtggcagagcctgcttagccaggaggccgaggtccctcagtcctcccctgtcccttccaaggtgggtcaggaggttctggccccgctggggcaggcagggcagggtctgtgaagcttaagagcagatggtgacaagttctctgggcaggtggccatggggaggggccatggcttggcatgtccaacagaaatagtttttgctgttgaacggtgatttctgtccaagtgcagatttccgtttgaataaagcttcgcttctaggtggcactgtttgccttaataccctgacagttcatcttcctttcttcctgctaaccttctgctctggactggactcacttttctgctccagggactccttttctgggtttgggtcttgcccttcccaagggactgttcttgtggcccttaatgggaagggggcaggggtgaggagctgagcctgctcaaggagtgggaagtggggctataggcagcctctctgatgcactctcttccatctctttccccaaggctccgtgactgtcaaactgggagtaggagaggggacaatttaggactgggctagattttcagaagaacatctacaatatcctatttataaatcttcctctgggaaaaggagtggtttctggctgaatactatcttaggctcaaggagaaacaaaataaaaattagcttccaggcagcctgtttttaaagaaatgggactaatgggagaagctgtttgtcactctaagagcatccaagccctggcccgtctgtgcactcttggctcctggggagatatatctgccttctaagaaggcaggccaggtcttgggcacagacctgcatttgttgaccttgcactccaactatagtgccttgcaagtgctcaacagtacatattggaatgaagtccctatgagagccatttctggccatgttctatacctcaaagtgaggctggcaggtacagagatgaactgtacacatgtgatacatttaagccactggaaaaacccctgtgcttgaaaatatttcctctatatcatgcctggagttccatcatagcccttcatttccttggctttagcatttaccttctcttaagaataccagctttcccctttccctgagaggaagagcacatgttggtctcctcttagtgtgaacgagattgccaggcccttttctcctatgcacaccaggatagacaaggcaggggatactggcagcctgcatcatcctcccattgggctgacagctggccctactttcctccctctgctgcttggtccctcaccttgatgatgtggcttcgccccctccactctactgccagtgttctcccagggcttgctaaatccagcagacccctttcctgtcttactagatctgggcagcatttgacatggctgatcaccccttgcttcttggatggcacttccctggcacctctgtggctagttgtcctacctccctggctgttcctttcaggcttccgtgcaggcttctccacttgcccatgcacagtagggtctttcagggttctgctgtgggctccctagggaagcccatccatctggatggtttcaaggatggtgaggaatttagagttgacctccagccccaacatccttcctgatcacctgaaccacagttttgctgccctctaggtgcacagacaattcaggtccatggcccagatggtacttgctgtcttctgcaaacctgccccttctgggtacttcccttgaccccgagatcactcaggagccagacaggaaacttattctattcctgttttctctttctgcccaccacatccaatctctcaaaacggtcaggtctaccttaacatctcttgatttgagccactcccactgtcatcagctttcacctggattatcgtgacagcctcctactgcttctctatcatgtggccagagctatcttcctaaaatgcattgcatagttgatcaagtcactctctggcctaaaaccttccttggctccctgctgccctcaggataaagtctggacccctcagcatggcttgtgagactcatggtgtccttgtccctgctcacctctctggtctcatcacttgccttcttgcattctgggtcccagcctcctgtatccagagatgcagtggctctccattgccactctgattcctcctttcttttggtcacagagaaagggtactttctctgtcaaatctcaacttagacttgacttcctccaaggagctttggctatactctctcctcccgacccccaccctggcatactacacagatcactctgggctcacttgcctgcctaatggtcatctccccagtagactgtaagctccttgagggcaaggattgtgttggaatttttgtattaacagtgcctggcttggtgcctggcacctagaaagcactcaataaatgtttgtttaatgaatgaattgtagtgatgtgtacaaggggatacagggaagccagttaacttcctggaggaagtacaagtgctttcatagactcgaatggaaaccacacatccctcccctcccttgatgtactgcccatgcctccctgaactgcagaaacctcagtagccgctgggaataaggatggcagcccagagtagcagggaagcccatgccagggggacatattagttgccctccaccccattctgggtctcagcttagagcctgcagcaggaagggcttaatctgaacaagaaacagaatttcccagtgggtccttccatcctggaagcctgggcccttagggctgggagggcagtgggggtg

SEQ ID NO: 11983 - DNA, 1181 bp, Homo sapiens
ttctttaacaaaagtgctttatgactttaataaaatattagagaatggtaggatccatggaagccccttgcaaaaacttgtgatagaaaattttgatgatgagcagatttggcaacaactggaattgcaaaatgaaccaattttacaatactttcagaatgcagttagtgaaacaattaatgatgaagatatcagtcttctcccagagagtgaagaacaggaacgtgaagaggatggttcagagatagaggctgatgacaaggaggacctagaagatttagaggaggaggaagtgtccgacatgggtaatgatgatcctgaaatgggtgagagagctgaaaactcaagcaaatctgatctgaggaaaagccccgttttcagtgatgaggattctgaccttgactttgatatcagcaaattggaacagcagagcaaggtgcaaaacaaaggacagggaaaaccaagagaaaagtccatagtagatgataaattcttcaaactctctgaaatggaggcctatttagaaaacatagaaaaagaagaggaacgaaaagatgataatgatgaggaggaggaagatattgatttttttgaagatattgattctgatgaagatgaagggggactgtttggaagtaaaaaacttaaggtaaagttttgagagaagagagagcactttcctcctcaaattagcttttcttctgtttttctaggagagatttaattgtagttagaagatttagtgataagaaatattgtgctctatcttatcagttataaatgaatctgtacttccattcaatttatgttccagttggtcttataattttgtggtagtgttattagttgccattttcacctaataattatttagttattagtttggttattagttattagcttgtagtgttattaagtcagaaagtaatatatacatacaatatacatgcaaatctatatgcatgtgttaatatatttttctatccctaattaatagtttttaatatctttttattttagtcaggtaaaagttccagaaatctgaaatacaaagatttttttgatccagttgaaagtgatgaagacataacaaatgttcatgatgatgagctggattcaaacaaagaagatgatgaaattgctgaagaagaagcagaagaactaagtatttcggaaacgtg

SEQ ID NO: 11984 - DNA, 1251 bp, Homo sapiens
atatatggcatgtacagtaagagatggccttataacatgtgtataatgtttgcctacacttgtgggtctaaaatagaaagggtttaaagggtgagtatcatgtgcagaacatcttaaaatttgaaatgaaacatgataaactaactcaaggcttgacttttaaacaaactgtgatggggaaatgtggaattaaagttggtaaccaggtaggaagactcatttaaaacagaaaaagatatttgagtaatggtttctttgctttcctaatgtttattctttgtgacttgaatagttatttcaggagttgaaaattttctttttgctataatttgcttactctgtaataagtaataataaatatttattataacaatgatataatttactattaatatattaatgataatttattaatatattgataatatttattataataatattccagaggaagattcttaagtgaacctagaaataaattgtaggttttgttatgttctacctgcactttatgtttcaggcttgggatgatgtagtacgtaaagaaaaacctaaagaggatgcatatgaatataaaaagcgtttaaccttagaccatgagaagagtaaattgagccttgctgaaatttatgaacaggagtacatcaaactcaaccaggtgaggaagcctgtaaggccaagccattattattaaagaaatagaagtagagaactaggctttttgtgactgttgaaatcgtgaaacagaaatcttgagctctttggctacctcatgtaagtatgagacagagcatgctaggaatagaagggttctaatattcccgctggatgtgaggggttgaggggggttgctttgcaattagactttggtcacctgatacttttacaactcattaactttctagcaattatggtggtgctacaactttaaaagcatttctcattgatattttgaagtaactgatatattttacatgattatgaattcattctgatttttaggtctgttttttctttcacttaactaaaatctctgggctgggtatggtggctcacatctgtaatcccagcactttgggaggctgaggcgggcggattgcttgaggtcaggagttttagacctgcctggccaacatagtgaaaccccatctctactaaaaatacgaaaaaattagacgggcgtggtggcatgtgcctgtaatcctagttacttgggaggccgaggcaggggaattgcttgaaccagggaag

SEQ ID NO: 11985 - DNA, 3217 bp, Homo sapiens
tctggggatagtaatgcacaaaatggtggagctgaagagggggatggggcgggcgaggggtgcacagcgggaaggggagtggtggtctcacaatactgtgactctgagtaactaatatgctcagtcttattctaagcctctgagtatttctattttgttctgctgacttttgtttggggagtttcctgttttgtttttttaaatagctctttcgagttaaggaaattgcattttccccccttcatcagaagtgttccgcggtgtgtatttaaacaaaataagctgactaagaaaaactggatatttaggaaatgcccctctcaccctgctgtatacttatcagggacagtgagcacctggagagctttttgtggaatctattgagttggatgggaaaagggacaagcagaaagagcaggtggtgcaaactggaatttgaggctcagctgccccacccccggggtctcctgcaatgaactcggataaccaatgtgctgtcaagcccttgcctgtttgtcctgaaccccattcaagaaaacacagacttaaagtacttagtttacagtaacttttgatgattgttgaaagttgtaaatcagaaggtagggctgtgatggtggttgtcacttgagtcatttagttactgttgtcctgttcataagcctgtgttcaccaccaccatcagactcaccatttataagtagaagagcactagggttgatctgccacctcatctttcatgaagtctattccccagcctcctttttaagaaaagatactgctaccaaaggcataggggaggcctgctgtgctggcaattagcatgagcctgcagaagtcatccttgaatctgttgtgtcttaattttatttggacagtttttttttccagcctcatcaacacttggtcttcctggtgtcttaattccctcagacaagtttatgcacttttttaaggaaatatttttcaggacactagtaagaagctcagttcacagtttggatatttcttcccacattacagaattatggaaaggaactcaaaatcagcctaggaaagtgagtcctgcttgacccatgtgactgtgtacctgaccttctgggatcttttcagctattaaaacattttactgttcccacatacccagctttgcaagttttgtagattgacctcttagggtgtgtttctttgtctttcctgcctttaacttgctggggtcttttgttgctacccctaaggaactaaactgggtgccaggagctaccttcgtgtatagagatgtagatggcagtgtggggtacaggagagccatccaggccattctcccagggatgaggaattggagagccctgaagataatagtggcttctttctgattgctactgtgctgtgtgataggcctaatagggaaaagatatgtaacttgaaacaaagttggtataaattcagtatgtggctgtgggacagaggttggaaggaaaggactagggtatggaaagctgaagaaattctccttatgagctctcgttgactttttgaacagtgataagctaatgccagatttaaaatacacattttttcctatttgagtctttaggattatatcatttgaaaaaattgccttccttgttaggtcacatgtcataggagagtagcttagagaacttgcattaccagacagacacattaattcccaaagcctctatgttgagagaatgaaactgttaactctttttcagagaggactatgaataaagaaacttctttattcaagcttcagctttcagctgggttgtttcctctaaaagggaaagggcattgcaagtgcatagaggaaatctctcccttctgggactgcttttcctccttcatcctcgtgagcctgtccaagctcagaattccgaaggctgttagaaatgcgttgggattgcagagagaaaggagcttgtctttccttctgctgtgctggtctgttttggatgtcagtcttcaggactatgaaaacttcctgccagtttagcatggacactgagggctggcatttctagtcttcttcagacactgaacatactgactccaggtataggaagcagctagcaaattgattcttttttaaatgcataggactctgcttccggcggttcctcttgtagtccaactctttttgccatctatttatgttgggaggtaggggcacaattgtcactcacaacacaggctagttagagtttgctaccttcttagcagaaaatgcatgtgtgtcttgttggaccttcactggggaaaggctgggagcctctggctgtcagtgacttttctcacagaagaagaaccagcaagccagactggacacctttaccctttaatggtaagacttgtatttataaggggtaattttgatgttgaatttaagccactactttgtttaaacttttttaaattggcaactagaagtttgagaatttgtatagaaatggaacatgtatttctaacagttgccaatctggctggtcccaatgttagtttattagtgattgatctgtaattattgggattatttattcaactctaaaattccaagatgaaaataatttatctctttcttttcaagggaaaaaacccaaatgaatgcattttcagtttctccaggcctttgaactgcagcagaaaattcaaggatacagcctaggcctgggcaaatgcagccctgggtctttgggccagtttctgacaataatagttgagttttgggaatcacataagggtgaaaccagaaacgatcctaaggaaaggcttgacctttgttaacacctttagtttccaaagtcacagcagctggggtccctcttttttttttttttttctttttttttgagacatagtctcactctgtcacccaggctggagtgcagtggtatgaccatagctcactgcagcatcaaattcctaggctcaagcaatcctcccatcttagcctcccgagtagctgggacaacaggtacgcaccaccacggccagctaattatttttattatttttattttttgtagagactggatcttgctctatttcccaagctactcttgaattgttgtgctcaagtgattctcccatctcagcctcccaaagtgctgggattataggctgggtgtggtgagccaccccagcctggggtctctttaattaaggttataatgctaaccatggcttaaaatac

SEQ ID NO: 11986 - DNA, 1104 bp, Homo sapiens
ttaacattaggaagtaaacagttggcctctgaaataaacactaatctttagtattgtgaagtcccagtttaaggtttctcagaatgtttgtctttcagtgttaacgtttgttctaatgcccagcttttattgtatgctttttctgaaggctgtgaaattctggtattactgggatattggggctggagggaggagtggcaaatgagatatctgtatctcaaatgcctttctggaatccttttctgttccatttcccagaatgtggctgttttcatttgatcgttacaaagagtggttgtttaactttggtgttaatgtcatttatttgacatttcaaactgtcttttcaaactaacttgatcaatattgaggcttttttcccatattagccagaaagcagatactagttttggtaaatgacttctctaaagaaaacactatgatttgaaaagactagcacacaaggacaaatatggaattaaataattcttctgagtagacctgtgttctctgtttcaagtatggaactgcataatggttcagtttgtatataagataataacttttttattgaaaaacttgtgaaggggaaagtcttgctatatccttgagccaggaatcaaggtctccattgttatcctagccccatagatgtttttacttagccctaagtttctaaagttttatgtagggttaatatgcagtacagtaatgaggcaggaatttgaatattttcttcattattggaaatgagtcttgtaatttaaagacaaaagcttgttttgagaagtaatattcatatacctgctgtaactgtgaatgtcactgctcttttctggttgtgctttgccacaaattttattgtgaattgtaaagatttgaaactcttaaaattagccatttatattttgaaaaaaaggggtgtgattattttaaaaaaaaaacattttagcatgcaaagaataacttgcacaatggatagaatatatattgattaaggtttagggtcaagaggtatttctctaatctggtagaaaagttttctcctcaggatgtaatctttggggcatgagggaagaccagtttggttcaaatgatttaaga

SEQ ID NO: 11987 - DNA, 1129 bp, Homo sapiens
tgtgactatttggaatctagccagtggtcaaaatttgtttacaatactatgatttttaactttccaacaggagccattatttccatttaatttggatgaatttgttactgtggatgaggttatagaagaagtgaatccttctcaggccaagcagaatccactaaagggaaaaaggaaagaaactctcaaaaatgttcctttctctgaacttaacttaaagaagaaaaaggggaaaacttccactcctcgtggtgttgagggagaactatcttttgtgacattggatgagattggggaagaggaagatgcagctgcacatctagcacaagctctagtcactgtggatgaagtaattgatgaagaagaactaaatatggaagaaatggtaaaaaattcaaattcactttttacattagatgaattaattgaccaagatgattgcatttcccacagtgaacctaaagatgttactgttctgtcagtggctgaagaacaagatctcctcaaacaggaacgcttggtaactgtggatgaaattggagaagtggaagagctacctttgaatgagtcagcagacataacttttgccactttaaatactaaaggaaatgaaggagatactgtaagggattccattggcttcatttcttctcaggtgcccgaagacccttctactttagttactgtagatgaaatacaagatgacagcagtgatttgcatttagtgactttggatgaagtaactgaagaggatgaagactctctggcggattttaacaaccttaaagaagagcttaattttgttactgttgatgaagttggagaggaggaagatggagataatgatttaaaagttgagttagcacaaagcaaaaatgaccatcccacagataaaaaagggaatagaaagaagagagctgtggacacaaaaaagacaaaacttgaatccttgtcccaagtgggtccagtaaatgagaatgttatggaagaagatctaaaaaccatgattgaaagacacttaacaggtagatacttggaaggggtagtctttctgttttatgaggggattacatttaaaattaattttaaaatacatgttgtggcattaccaataatgtcacccagtatt

SEQ ID NO: 11988 - DNA, 1244 bp, Homo sapiens
tcaaagtgttctccgtgggctgtatgtatgcacataggtgtcagtgcacacgcgtgtgtgtttgtgcacgtgtgtgcatgtgcacgtcagtgtgaatgcgtgaatgcgtgtgtgtgcctgtcggtgtgtatgtgagtatgtgcgtgagagggagacgtgttaaagcctgacatatggatgatgtggagtaactcacagtcaggctctacgggtcacagaaatgcctgcaacagctcagctggcaggcagcagctgcgggagagcccactgctcagcatccccctggggcctcaggtcagggtccttaaatcacttgtggcaatgaacatttaaggttccatcttattttgttaatccacgtgcctgcttctgactgagattctctttctctctgggccttggctcttcccccatctcctctgaagcgcactgcagcctagtggctctaagtgtaggctccggcactagagtggattccagctctgtctatgccgtgtagggattgtgttttctgtacaagtctctgtgcccctatttcacctgtgaaatggggataatgacagtatctgctgatggggttcctgtgagggctaaacactgcttagaacagtctctggaattgagtaagtgtgaagtgttggcagttattgtttgggagggaagagctattgggttggccgtgtgggccacatgttccctgtgaatgtgagtttccatgatctttctctgcaggtggtagactctcgttctctcaggacagatgctctcctcggggagttccgggtaattgcttattttctatgaaagcagtcagttctcacttctccgtgttggtggagcctctgtggaccatgggcaggggctccagagatcctgtgtttctctgctttgggaaaatataatttcaaagaacaacgccaagccctctgcacagcatctcctttcaccccagaaaacctctccacaaaggtagaagagaaagaaagcactttttgtcactgaagaggccttaaaccagagtgagatgtacatcacaggcaatgatccactaagatgctgcaaagacagaaagaaatctcacgctaatttagccagcgggtccaacccattgcccaccacatacgttctcaagagaagctatgccccaccctcaggtcaggggactttacatttcagacctcctgagaatgacatttgtatactaaagctgacaaatggcttatttagtttcttaaaaagatgta

SEQ ID NO: 11989 - DNA, 1147 bp, Homo sapiens
aggtctcctgtccctttgcaatatttttaatgccttttatttatttaaacagtttttccttaaagccctatttctgactactctgacttctgttgtctgattctgcaattggttggctctagctggctcttgctcatggtgcctagttccttatgtgtttgattgtgaactcatgttccttggaactttatctgagaattctttggggcctgggtggaagttacattcttttagagaggatatgtgtttacttttaccagatgtctggagacactataaacacagattaacttaaaactaaatgttcagtgtgtggctttttgggtccactagttagtatgcattttggctccttatttctctggatttttcctttctcatttgcccttaagaattttctttacattcccatcagctcagccatgcatttaaaatggattttagaaatatcttttctgttaatttaggtgttcttacttggagggtttctctggttgtctaatttgtcattttgctggaaatcaatgtctttattagaggtttaaatttgaagtcatggttttcatcatgcaggtttatctccttcagggttgtgtactctaatttcttgtttgcagtttcctcttaagacttcctatgaatacacatgagccatttgttttcttctgctttttactcaactctttaagagcattgggagacatttgtctttgtcttcagatcgctcttcttcttttgcccttaatatcttcttttttttccttgtgtttatccttacagagggaagtccttgcttgtcaaatactgggacctcagttagattctttccataaattcatgggcccttctaatctcaaactcagacaaaaagaagaaggaaatagtttagatttgcagtagtttcactttgctggttagaaatccagcagggtgggagaagtaagaaggaaaccaggatcagaggcagctatgtggggctattcttctgggctgaagagtttatttcctatgtttgttatggtagtcaggggttagctagggtaggccagagggccagagctgctgcgcctaccaatgaactcctatgtaggaatttcttaagtaaagtagagttgaccctctcccactaggcccaccaggcagggtg

SEQ ID NO: 11990 - DNA, 2622 bp, Homo sapiens
gtgaacaagcatggcatatggcaagatgacagcttcattccaatcccccaagaatggcggtttctttagcctgatctaaccccaggcttttattgcaattttttctagggcaggatacagctaagtagacagcagtaataattggatcccatgtttaactgcatattgccccagctctaggagtgttgagtctcaactcgaagagtttttctggatcttgaaagccagttttcatggaatcagagacccaatcccttccctgttcatctcatttccttcacttacagtcagagcacttggttcaggacataaatcaacagttacttccataggccttcacagggcgtttcagacttagcctcctccagtaatgccattgaaatagttcagatttcggaagcctaaaaatggcctttaccttacccttaggtgtaacctgaggattagttgggattgttcctttatgttttaaaaccagctttttggttatcatctttaaggaaatgtcaccagctctgcactgtgggggcagccatgcctggactggatgcctctagggatggagacattgttaccataaagtcgacagagccaaccatggcttgtggcttgttgcctctggcccaactgtccttcactaaataatatcctagatattattttgttgctcaagcccaaggttcccaccctcttttgagatccccaaagccatctttggccttgtctaagaaagattgcctataatcctgtcctccaaactctaaagcctggagcagcttagcgtggaggctgcactcattgacccagatggactcctgagacttaacgcaagggctttgctatgaggtcagtcgggggaaactgtactttaagacacttcagaaagatgctactggctagtagcagaaagatggctagtggcaagagtataattgtgcatcaccaaacaatgacaaataagccacacaggcatttccagcttggattgatgggaggagagactcatcaaacagaattcttcactacctttgtcagctactgagttgcttctggggagggaagtacttccttgcccctccccaacccccctacctcaccatatcctatcatatcttgatagtcatggggaagaggatgtgcacacagacatacaaatttcctcaaagctggagagaccaggctacatgtgagctcatagatgctgctgaggctcatcctgagggctggatggttggccagggtttcagaatgagggtaagggatgagcactgccacccagaacttgataagccaagagaaggcaggagccaaaatggcatcgccaagctctcatctttgttgaaacaagtgagaaacgattatattaatctgaagttctattgcttgagaagagttcaaaacacttctctttgctagtacccagtttgcagcaagatctcttcagctttaagtgctgagagactttgaagtggaaatggagagatgtgtaagcatggcacagtgtttgtctttttagaggatcatcattgctggtctggtctcaaacctctgccttggaagaactgtgctatacaggaaaaagtgaacaaggtggaggaataggggttattctgcacagaagtcccatgaaaggaaaagcttattcaagctcaagacataaagatggaccctttgatatatcttctctccattcttagtctgccttcaccttatctaacaaaaaacaacatgcagctactgagttgtatgtagagacatactcttggtgggccagggaaggtaaaaacagggaccagcaatgtcaagtttttgaactagaaaagtgggatgtttttagttttgtctataacctgtagctgggccaacccttgagaggacttgtgcaaagcatgtgtgcccagacccatcagactcctcagatatggcctcaaatacctagagatgtagaagtaccgtggagggcctcaataagagggcaagcacacagatggctagaagcctgtatggcttctggtcaggatgaacccttggccaagttcttgaggaaaccaggtctatattcctgaagggacagttcagtttgggactctattaggtttcagtagtaatataggctgcttgcatcattttaacattcatagggaaaatctctttgagcaggctataaatgaagctgttgcaggtagggaagaacaggacctgaaaatgggaaccaggaagtgagatcctgttggcaaagggaatgtagagcttccagggtgcattgcccactgttctcattgcataccagtcctccaagtcagtctagccttactgtacacttgacaagtgcttactcagcaagtcccagacccacggccttttatctcccaagactggctttggccatgaccttcctcatcaggcctctgagcacactctctaggaactgctgcagaaattcccctaccttagcctcccttctcccaggactcctctcttgactgcaattgcctcttcttcttcttcttcttcttcctttttgttttttttttttttgcctgcattcacaattacttttcacaaaggtgttggaaatggcatttttattttacacagatagttgcacatatatagagaaaa

SEQ ID NO: 11991 - DNA, 1133 bp, Homo sapiens
agaagctgaagggagagagacatgactccttagaagcttggtcctcctctcccccagcttctcttgtcttccctgtcatccgtctgccaatctccctgtccatggttagttaaaggcgctttttatcctcttttctttcccacagagtttgccagatccggcccggtgcctgggttccaggaggacacgctgcagttggccttcatcgacttgagacaagtaagtctttgtgtttttgttttttgtttttcttttaagatgtgtgactgaagaccatcaggtcttaaggaaaaggggaagggagggggattggcgttggcgattcacattggagacctaagggttttccctgtatttgaggccacctcttttatttagctatctgggatccttagctatggtggagttaaaggttttgtgggtagaagggaaggcgggggtgggaggagggacccagagtagagggactcaagtgaccctcaagtgatgcgacccattgtgctgttgttggcttttgcagacatagcaaaaagataactcagcaaaccaatgctaagcaggtgcactgatgcagagactgcctgcttggagaagttttgtttgtagataatgtggccagcagcatttaagaaaaatgaaatattttacattctggattgttggttggtttgttgactttttcctgctgccttaagtcttcccgcctcctcctttgtagaatgttgtcagccatgggtaactaagtggtcgtttttgaagatgattagaaaaggcctggaccagtgatgctaaccctattaaagtaatgtgatgaaagctgatacttgggcatacctgagctttgggaagcccattagatagaaccagtcattctataggactgtttcttgcagattgaactgggtgggttggtaggccttggtggtttggatatagggaacagggtgagcgggggcctagtgagggagagagttaactgggctctgtcatctcttcactcttaagatggatggggttggatagaaagtgtgaatgaagtaagaatcaatgactgatgcttctttcctattaaaacaatcttttttttttttgtctgtttaaaaaagggggctggctttgtttctcctgccata

SEQ ID NO: 11992 - DNA, 1422 bp, Homo sapiens
gaatcttggttttagacatggtagtctagagggtccatgttcagtgggcttttgaatttcagtccagaacttgatggtgacaaattggagcctttggcaaccctgaccacacatttcagccaagatgacgtgtttcctctggccagacctgactcagccccacccccgacataaaacagggacctgaaaccttctgtccctgccttggccatgttccctcatcgtctccttttcatcctctaggtcctctggacacagacatgcagcagttggcccgggagacctccgtggacccagacatgcgaaaagggctgcaggagctgaaggcaaaggggaagctggtggattgcaaggtgtcagcccagaaactgctgagcttactggaaaaggacgagttcaagtctggagcccacgtggacttctatgacaaataagcccatgtttttggcttcctgaacctttttgcccccacttttagacataccccagagccctgtggctccccacaccctgccataggggcagtcctgccttacacatagaagcattcatgcctgctgccctgccctcaggcacagccagctgtgagctcccaggtcattggccttaccagttgtcaggagtctgtgctgtgcaccctgggttataaggaggcttaggagagaggttatgggtattggtgtctctatccccaggaatagaacttaaggggtgggaagaacaggaaaagaagctggaacacagaagagaggaggttgtgtctcttgctcatagcaagcctgtgggtagaggaaagagtgatctggtgtcgaataggaggacccatgtagattcgcagatggcctggatgggaggaagggcagacggtacatgtcccagcccacatagatgccccttgctgagggtagcaggaccttctgttgaactttgtgtcctcactctgatgtctccttccttcagaatctaccacccctcccccaggctgggagaaggggctcctgggtgtctgtatacacgccaaaggcagatacaaataaaatacagattgtcctttcttcatgcttgctttctcctctgatacagggcctatgactgactgcctggttcactgggcccaaggccattcccaaggcagttaacccaaaagtgaggtgttgtccttatttcctagggagctttccgggggccatctgcctccagtcatcaggccccactcagtggcaagcccaggtgcaaagttgcccacaatcggcatgcctgcttttttgtgctgttgcccacgctgaccccagccttgatagcccttttctcaccctgggctattcagaatacccatcttttagggcccagcttacagcctgccctccacatggccctaaagcctgggtcctttccccaactctgtggattgccaattccacc

SEQ ID NO: 11993 - DNA, 1202 bp, Homo sapiens
cacagcaaggcgctttggggggaggagtgaagcaggcagactctgcatttgtcaccccccactccccacctgcccacccctcccaggtccccccacttccatcctgcagcggggctgggagagttcaggcggggtcaacacccacactgcactgggccacggggcctggcccagtcatgtgagtcccaggatgggggagcagaaagaggatccctgagctagttgccagctaatgggtggccccagacttcaacaaccagtgcttcactaaggagccgggaaccctccccttagcccaggttcccaagatctcagatggcagaggggcctagccaaaggcaggcactcagccataggaagcaagaatggagaaggtctgcccttaactcagcccgctgctcctgccccaaccctcttgccccctgagtattcagaggcagaggcactgtagcctttctgctctgtcccactctgctgtgtgacctcagataagtcactcctcttctctgagcctcagtcttccatccatatgatgagggggtggtgctgggtgaacactgaggtttctgcctctctggcacctgctgtcagggaggcaaatttctgggaacttgatttgctcagagacaggaggggctggatgttggaccgacagtttaagaggatagggcagcgcaagggccccagtgatggtggaacatcaggcctcggggtcaggggggatgcgacttcaggtcagagagccctcccagatggacacccactttgcctgcctagtgggcttgccctggaggagaggaaagcagcccctcggtaagtggccgctctctgaggccagaacgggtgtcctccctgatacctgttcttttccactttcacttaccaggttcccaagggcccccagatccctcaccaggctgataggcagatggacaacagaaccaccccttccctaacctttgcccatgcatttgaacacagaaccccaaggcttgcgtaggaaggagtgtagtgacctccctccaggtggaatgccatcttcctcctcatcctgctctctgcatcccctctctctgcagccagtgccaatatctgcaatgtggtcctgatgcggtacggggagctggaggaagggattgatgtcctggacagcgatggcaacctcgtgggctcctccaagatcgcagcccgacacgtgggtc

SEQ ID NO: 11994 - DNA, 2055 bp, Homo sapiens
aactcttcccccaagacagagcaggggtgaactgtagcttgatgcagtaatctgggacaagactggttgctagcacatactttattatcccccaaggatggtcagccatttcttcccacagccaaagccccatccccttcatttccctccagtccctggaggggcttctagtattactgggacaatgaccacgctgcctgtttgtctgtgagttacgggcaaccagcctcttcagcctcacacccattcccctgagagcaagaagcctgtgtggtctgggccagtctctgccatgtcctgagtctgcttcagtctggagctgtttgtggggcgagtgccatgtggacagtggtggatgatgtgtgtgcttcaggctgctccctgacccctctgacctttccacgagtgtcacatgggaatgtgtggggcgcaggggcgggtgcggagagagcacctttttgcttttcgagctcttgaccacctccaatgtgtaggtccctccaggctggggcttgggactgcttatgatttggggatcaagcctccatgtctattcttgttgcctgtccagatgccaaaactctgtgttgctgcagggtttgaacttttggaaaccaattaaaatgtgcctttggtgggcggggtcaagagcccctggatgtcgacctctcccgctgtgtggcgtccccctcccacctgttgaatacatagggatggctctctcagggccctgggaatgggaatggacagcactgctgtgggctgttcccctcccctaaagttaatctcttggtctggccaagttgctgctccctcaaccttcctgctgtcttcccctccctcaaccccaataggaggatcccaggataaacactgctgggcaggcgggcaggcaggcctggggctgccctgctcactctcattgtctggcctcaggacttagccatactagaccagtcagcttgcctggaagagggaggtcccactatgcctttgggagacacctatacttaggaaaaagcctttgttgtcctcccatccatccattaagctgctatctcagcctgtcccttctgccccaggggcttgcctggcttggctgcagtgcactttgaaatgaagtatctgtcctttggcccagcccctggtttgcttgtagaaaacatggtaggcttccccaaggcatctgcagggaactttggcagcttggggcaccctgaattagcaaaaatggggggtgatgaggtgctgaagaaggatacttaacagcttagtgaggaggcaagagctcctctgggaccaccacttcttcaggagagggcctgtgggcttgcttttggaaggcctcaggcagacacgtgccctctgggtgatgtctgtctgctgccaggatggagcagaggagcgccacacatggaggaaagcccctgtaacgttacctaccttaaactccactcatcaaatctgagaaaagtatccactggtccccagggtttcagtcatgcttttgggggtcattgggtattagagaagtaagtatcttttctgagagagggggagtcaccccccctactggggattcctctgggctttattcactcccagccctggccctgacctttgtgggcctccctaatgcccagggcatggatggcttcagaggagtttttgaatcgaagcccagggtccttgttgatgtttcttctcctagccacacttggaggaaagttgcaggtgggttgggcagggagcaggcatggttctgctttgctgtttgtcttcctagttaaggctctttataaagagcttgttcttcatgttttaagcactttatgaagaataaaacattcatgtactgcaggtggctctgttgtgttcctgttttggaatgaacagttacaggaggctgctgtgggagaaagcaccttaaatcaaggtgatgggattcttggatgacactgtccctgccccttataagggggcagcagcacagtgttgcccagcagcctgaacttagtcttttctgactcccagggtacccacatttattgcgca

SEQ ID NO: 11995 - DNA, 1214 bp, Homo sapiens
ggcccggcccagcccagcccgcagctgcggcggcgctcagagttggttcctgaccgccttctgccgcggccgggtttgtcaccaggtcctggggtctgcaccggctcggccagacctcgccccccgcttctccgccatggccctggtgcggggcgcggagccggcggcggggccttcccgctggctgcccacgcacgtccaggtgacggtgctgcgggcccgcgggctgcggggcaagagctcgggagcgggcagcaccagcgacgcgtacacggtgatccaggtgggccgcgagaagtacagtacgtcggtggtggagaagacgcacggctgccccgagtggcgtgaggagtgctccttcgagctgccgccgggggccctggatggcctgctgcgggcgcaggaggccgacgcgggcccggcgccctgggccgcgagctccgccgccgcctgcgagctggtgctcaccaccatgcaccgctcgctcatcggcgtcgacaagttcctgggccaggccacggtggcgctggacgaggtcttcggcgcaggccgcgcccagcacacgcagtgagtagggggcgcgggggcacagaaacggctaaaggcctaacagggcggggctggtgggggatcaggaccccgaacttcagccgggccagtgagcccttgcctcgtgcttaagggcgtaaaccgacagaaacgttggttcttcgcatttcggggtcgtcttcaagcttcccaaacgtgcgctgtgtggggctcagccactggtggtccctgggaggcctgggggaggtttaagtggtggcgaacgttaggagtagattgtcaagtaaagttaggaatgagattcagaggctttggggctatggaaacctcaagaagggaaatcttggggccgttcttagaacctccgggcctgcctccctttcctcaaaggggaggggaactgcgggcgcctgtccggcaggggagtggagaggcgcagccttgccctacgggggaaggaaagccaggtgtcttcctccagggcgaggttgaatgttgattaccccgctaaacgtagaagctggctgcagggggcatctgcctcttgctctcaagatgccctccactatctagagatgtcacccccccacccccatcctgtccctctgtgtcctgtgtccctggtctgaggataggaggagcttctaagttaaggaaggaaacac

SEQ ID NO: 11996 - DNA, 1114 bp, Homo sapiens
ctccagttgctgtaagacagtaatacacacacattattctacccatttttaaaggcaggaaaaggaaacgaggcttacacggacaggcactgtctccactgtcctgcaaccccaccacactaaggcatcagtccctaccatcttacctaaacttgcctctccgagacagaagccttgcttttctgtctacaagacatcctatttatccagcacccccctcctcccagcatcaagcctctggatacatcttggggctgtttctcacctgtgtgccctgtggacagatctgaagctccccacaggcacaaagggattaccttcccccaccattaattcagagcaccctggggaaagactttgtgtccaccatctgactgggggggtcgccatggctgggtgaggccaaggccctatctcaccaacctgcctcgatgtccttgtatagctggtcaatgaaggcgtcaagctgctcacggtcctgaggcttcaactccagagtgtcacaggcatggacccactggcttagggagctggggggtcccaggcagcccatggttggggaggcagaagcccaggtcacagggctctccacctccaggtaagttaagcccaggaagaagggtctcccatccccaccccacttcattctccaggtgggggcccatcttccccaacagaggctccccaaaacagattccaatgcctcattctgattcccaccactgtgtccagttcagtgatctgtccagagtcccaccctaccccatcccagtcttgaaaggaactgtggctaccttcctcagtttcccacccctgagagtaacttcaatagctctggaacattctaacctggtcccgattccttggccattggtcccaacaagagcaaagagagaccggaatccatctggagtgaaccactgtggggggaaaaaagagatgagtgctcattacagccactgacttttcttccaattggactctctgtttgggaagccttctgtgagtcaggctcatctgaactccagaagaccaagtcggctttggctcagctgtcccagtaggagatgatgacctgattgctcctggagagctggagtaacaaggaggccac

SEQ ID NO: 11997 - DNA, 1158 bp, Homo sapiens
actgggtcaggggtaatcaccagtcccttcttgcaggcctcaacttggggtgcttcagttagagggcaaaaaaagatctcgggctttggaactcccagattgatggggacagtggggcatgatggggtaccaagaaagtgaccgtcaccacctctcttcatgccctcccagctacatgatccgccgctctctggaacagcatgggctgccatgggccatcatttccatcccagtcaatgtcaccagcatccccacctttgagctgctgcaaccgccctggaccttctggtagaagagtttgtcccacattccagccataagtgactctgagctgggaaggggaaacccaggaattttgctacttggaatttggagatagcatctggggacaagtggagccaggtagaggaaaagggtttgggcgttgctaggctgaaagggaagccacaccactggccttcccttccccagggcccccaagggtgtctcatgctacaagaagaggcaagagacaggccccagggcttctggctagaacccgaaacaaaaggagctgaaggcaggtggcctgagagccatctgtgacctgtcacactcacctggctccagcctcccctacccagggtctctgcacagtgaccttcacagcagttgttggagtggtttaaagagctggtgtttggggactcaataaaccctcactgactttttagcaataaagcttctcatcagggttgcaactgtgtcctagaataagagcacacgggtgggcaggaccttcaaactcactcgtatcgtcccatactgtcgttctgaggaaaggaaacacccacagaggacagtgactggcctaggtcatttgggaccagtgctcagactgctagtcttagatcccagcacagcttcctgctaggagccaaggaagccctgggaagccagagttcagcccctcaggagaagactcatcttagagcctggaactgggggtccaaactggacctcagggctaggcatggtggcccatgcctgtaatcccagcactttgggaggccgaggtgggaggatcagttgaggccaagaattcaagaccagccttggcaacaacatagcaagatcccatctctacagaaaaattaaaaattagctgggtgtggtggt

SEQ ID NO: 11998 - DNA, 1085 bp, Homo sapiens
tagtgggtttttttttttttttttaaagagacggagccttgctgtattgcccaggctagtcttgaactactggctcaagtgatctcccacctgcgactcccaaagtgctgggattacaggtgtgagtcaccgtgtcaggcctttgtcagaaccttgactgacttcctgtggccaaattggatgcagaagcatgctgcaatccctctatgtgcctggggctgtttggctcctgccagacccttggctgtgtcccagcccacagagcacaaaagaagctgtcgactgtagtttaaaagctgccacatatgagatctttgactgcagtcaccatctgtcactgataatctgccctaaagatacaaaaggtgaagttggagagggctgagtttagagactggaagggaactacctccacactgtagtagaatcagataagagggatttggttttcaagacctgatgcagattctgcccttgtgtcccagggagcagaggaagctgctggaaaagtgtgccatgaccgctctgagctccaagctgatctcccagcagaaagctttctttgctaagatggtggtggatgcagtgatgatgctcgatgatttgctgcagcttaaaatgattggaatcaagaaggtacagggtggagccctcgaggtaagcctgctgtggccttcctagacagctcttgctttcatattgacccttcagacagcttcatatggcagaggggtactcattacaggaataaagagaatgcatgttaggcaggaagtcagacttacattgtactttccatactgccattagaggctgttactagatgaacttggtaacctctgtggatattatttgtcagcagagtagaaaattggactgtatgattttcagaatctcaggttctctgtgtcagtgggtggtggaggggtagtaggactagctcaaatcatcaatgacctcccaattaatacatctgagagggatttttcagttcactgcttactcctaagtgatactgttaagcttgcccttctttcattcatttatcttgaatagatgatacatatttcaaactgtgaaggggc

SEQ ID NO: 11999 - DNA, 1178 bp, Homo sapiens
acttctgacctcaggtgatctacctgccttggcctcccaaagttctgtgattacaggcatgagccactgtgcccggccaaaggggtcttattgggaactccatgaatccagcacctcagaagagtctagacctcagccagtttaaactatttctcgcatctggacagcaccagctgtggttctcagccttggggttactttctgcttttgtgttggggagtttcaggtgattcctaagtcatctcatggggtccttatttgcttggactgaggagtagctattctgtttatctctgttaattcccagatgaatcagcatgttttatttggtgggggcagatgggtatattttaccctaccgtatatgtcaaccttcaccccaaagcattctcatccttttctgggtctctccaggattatcaggcaattgttgatgctgagtggaacattctctatgacaagttagagaagatccatcattctggagccaaagttgtcttgtccaaactccccattggggatgtggccacccagtactttgctgacagggacatgttctgtgctggccgagtacctgaggaggatctgaagaggacaatgatggtaaccagattttcacaggctgcttctcggcctttgtggccctgaagggttttcactgacccctggtataacagagtgtactgtcaggttggcgtgtgaattgagccctgttttttttttttaactcttttttttccaggacacattccatttccatgtgtgtgtgcccagtagcacaaactactttagtctaaccaaaacaagtccagaaatctggtttgtgagagaacctagcagtaatgctatgattagctggacaaactcaaatattgattcttccagccagattttttccctttcatgagcatcccacaaaagatacttttaggtttaaagtactcctgagttcagttgctggacccagtgccaccctagtttaggggagggagtataagctgaattgaatgggtccctatctccttttaacttcttctgtttgcctttgatgtgttttagttctattttgttttttttttgctctttcagagagggggaagggtcgcctggaagtcaagggaaagggcgggtaatgtagaggctctgggggcatgcgtgggaattggctttgagacgag

SEQ ID NO: 12000 - DNA, 1387 bp, Homo sapiens
ttacctctgtgtctcacttgcctcatctgtaaaatcgggctatttgaagcaatgagatgaaagatgggatagtatttttgttattcctgtttatcttgagaactcattgtttgatatatatatatatatatatatatatagtcctcaggtgacctgaggatggggccgccccaaaacacaacagcttgcctgggagaagatcccagaggtcttgtgtggtatgtccagggctaaggggaggagttggcgggagtaggggtgtttccaggttcctggcatgctcataggaagatgcagtattcttcagcgaaatgccaccaagttcagagagtctgcgggttcctagcagtgtcttttggagtaccagtttacaagaggaaagttgaaagtagttccatattacctcctttcttttcctactcttttaggggggtacatggtatggagtagacatcaacaacgaggacattgctgacaactttgaagctttcgtgtgggagccagctatggtgcggatcaatgcgctgacagcagcctctgaggctgcgtgcctgatcgtgtctgtagatgaaaccatcaagaacccccgctcgactgtggatgctcccacagcagcaggccggggccgtggtcgtggccgcccccactgagaggcaccccacccatcacatggctggctggctgctgggtgcacttaccctccttggcttggttacttcattttacaaggaaggggtagtaattggcccactctcttcttactggaggctatttaaataaaatgtaagacttcagataactttgtaaattattttggcatggtactcataaatgtctggctgtagctcagaattttagctttacatgcacttgtccaacagggagacaagagcatcctggggtgagctccactagagtggcccgtctggaagtttcactgtggttgcattctttgttccagaagtggctggacaacacgcagttgctttcttctggcatcatcttatttagccctggcctagccagacactgctctcagggtttctctggtttgagtaaatgggttacattaccttgtctgccccttctatctccatattcttttggtttagtcttttgttccctcttactcaagactgtgagaagggtgttttagggagggcttatgctctctaaactctagtgatcccttggaagtctactaaggagacgactgaaagcacccacctagtcttttcagttcagcccccagtgatcttggtccttctgctttcttgtgaccaatgggagtttggaatggctggcacagatgagctggaaatccagcagtgtctaacatcctcctgatttacactggtcctgatagctggcctgcaccctgctgtag

SEQ ID NO: 12001 - DNA, 1130 bp, Homo sapiens
gagtatcttcaagtacaaattccttcataccccagaaagtctgttcctttttgtagtaaaatgaatctttcagaggtttcccaagccacttctcatgatacagtgaatattcaaaagagagctacatttgaagcctgtacaaaagcttatccccggaacacatgtgccataatatacaaacttctacttttgtcagtccttaatatctacctctctgaattttcatgaatttctatttcacaagggtaattgttttatatacactggcagcggcgtacaatacaacttagtataaaaggtttttttgtgttaaaaaaagatgtgtagtaatgggaagaggtctaaaatgtagttaatattgtgagaacaacagctttacattttctatactttgatgagaatgtcattaaataggaagctatataatacatgagtggacattttcatctaaatattaatatgtatggtaactcagttaatgacttagcatgttttcctttaacatttttctagaaaacagaatcttggcattgtcttcctcaagaaatggactcttcccaaaccttggatacatcccagactaggtttaatgtgagaacggaagatactgaagtgacagacttcccctctctggaggagggcatattgacgcaatcagaaaatcaagtaaaggaacccaacagagatctcttctgttctccactgctaggtaatgcctgtttattttaactagtagtaatacctcacatttgtaagttttgcggggactgcaagtcttgtaactttcccctttttgagttaaggagctctgtagagacctactcagagggattagcttatttctgttttgtttgtttgtttgttttttactggctagctgatctaattatattaagtgtgcagttgcctctcattttatcacttcccgttgctcacagaaggcagaaaggtgataactgtctactgtgtgtgcctcctcagtcttgaatttgcagagtttttgggatgaatagtatactttggttatctcagcaatggagactccatgatcccccacaaaaaacaaaaaacaaatgttcatatttacctttttgatttttagaattaattaaggcatatgttattatcct

SEQ ID NO: 12002 - DNA, 2063 bp, Homo sapiens
agtactacaggcatgtgccaccatgcccagccaatttttaatttttctgtagagatagggtcttgccgtattgccaaggcttgtcttgaactcctggctttaggtgatcctcctgcctcagcctcccagagtgctgggatcataggtgtgagccactgtgcctggccttgcatggtttcaagagcacaataaatgatgactagtaaaaaagttaacgcaggttaaatgaaaaatcatggtaggcgtcattatgaaaatcacattctgtgtctattgttttaggagaagtctgagataatatcagggttatagggtggtagttcaccttttagttaaaaagaatttgctttactcagtcattagccatcttagaagagtctgaaattaggagagctgtgtttttcaatacacttttcaaataaacttgatttcagtgacatatgtatttttgtgttagtacttaaaaattaaatgtttttaatgttatttatttatttatttttaactatatattttcaggggaattcctgataagtctgaagatactgaatggtcttctcgaccatcggaagttagtgaagctttattccaggctactgcagaagtagcttcagacttagcaagcagtcgctttagtgtatctcagcacccgcttataggcagcacagctgttgggtctcagtgcccttttttaccttctgaacaagggaataatgaagagactatttcgtctgttgatgaactgaaaattcccaaagactgtgatcgttatgatgatctttgttcatatatgtcatggaagacacgaaaagatacacagtggcctgaaaacaatttagctgataaagatcaagtttcagttgcaacttcatttgacataactgatgaaaacatagctactaaaagaagtgaccattttgatgctgctcgttcatatgggcagtattggacacaggaagattcatctaagcaggcagaaacatatttaaccagtaagtaccctgattctttttcagattcatctgacacaattgataaaaataaaattcccaagggaagtaacaattttagtgtccccttttcctatgtgccatggaacaaagagggaactttgcaccacccagaaacgtgtgtaatcagtaaggactgtttttcctttccatgtgaagttgctgctcatcatcatcatcataaaatgtcatattctttcttgtgttgtttgttggaaagaagaggaaaaggggttcccttgacttctgatagtcattattttgagaatgtttatttaagggctccagctgagattgaggtgaaacaaaagatggattctttggagggttatgaaagaaatgaagaaggtttacagaaagaatcatctcaatgttttgaactaacggagactagaaataatttagtatcttcagaagtgcaacccagattcttagaaatacagtatattaggaatgttatagctcctgataattctgtaaaagtttcagaagcacatgtactctccaggggacataatacctctaaaatggaggcttctggttggattgttatatccaacttggatgagatatcagaacaactgtattttcaagaggaaagaaaccaaaagggaacttctctttttggtgagaaaaatattgatgctgctgaaaatatagcctttgaggcagttattgcctctattgagccttctaagaaagagagtacagtaaatgaaatccaagctgacatcaataaatatttaacagatgacagccgagagagagccaaaaaatccagatctttctccattaaattataatgatgaaacctctttatttgataggcttaaacatccatgctatcagtctactcctggggtgtttgaaccagcagcttcaaaaccattgttgcataaaaagggtaataatgatagcttcctatactggcatccaaatttaaaattaccccctaatgctcttcagaaaatgttcattaagccactttgtgttattccagagcttaagtcatctgcttctttgagtgaaaaatcttacaaccaggctgttggt

SEQ ID NO: 12003 - DNA, 1962 bp, Homo sapiens
tcacaaagagagaagcctggtattttctaccaacagaccttgccagagagtcatctgcctaaagaggctctgaaaatttcagtagctcctggactagcagaccagaagactggcacaccaactgtaacctcaacttcctactcacaacatagagaaaagcccagcattttccaccagcaggccttgccaggtactcatatacctgaagaggctcagaaagtttcagctgttactggaccaggtaaccagaagacttggataccaagagtactttctaccttctactcacaaagagagaaacctggtattttctatcaacagaccttgccaggtagtcacatacctgaagaggcacagaaagtttcacctgttcttggaccagctgaccagaagactgggacaccaactccaacctctgcttcttactcacacacagagaagcctggtattttctaccaacaggtcttgccagataatcatccaactgaagaggctctgaaaatttcagttgcctctgaaccagttgaccagacaactggcacaccagctgtaacctctacttcctactcacaatatagagagaagcccagcattttctaccaacagtcgttgccaagtagtcatctaactgaagaggctaagaatgtttcagcggttcctggaccagctgaccagaagactgtgataccaattttaccctctactttctactcacacacagagaagcctggtgttttctaccaacaggtcttgccacatagtcatccaactgaagaggctctgaaaatttcagttgcctctgaaccagttgaccagacaactggcacaccaactgtaacctctacttcttactcacaacatacagagaagccgagtattttctaccaacagtcgttgccaggtagtcatctaactgaagaggctaagaacgtttcagcggttcctggaccaggtgaccggaagactgggataccaactttaccctctactttctactcacacacagagaagcctggtagtttctaccaacaggtcttgccacatagtcatctacctgaagaggctttggaagtttcagttgctcctggaccagttgaccagacgattggcacaccaactgtaacctccccttccagctcatttggagagaagcccattgttatctacaaacaggcctttccagagggtcatctacctgaagagtctctgaaagtttcagttgctcctggaccagttggccagacaactggcgcaccaactataacctctccttcctactcacaacatagagcaaagtctggcagtttctaccaactggcattgctaggtagtcaaatacctgaagaggctctcagagtttcttctgctcctggaccagctgaccagacaactggcataccaaccataacctctacttcctactcatttggagagaagccgattgttaactacaaacaggcctttccagatggtcatctacctgaagaggctctgaaagtttccattgtttctggacctactgaaaaaaagactgacataccagcaggacctttaggttccagtgcacttggagagaagcccattactttctaccggcaggctctgctagacagtcctctaaataaagaggttgtgaaagtttcagctgctcctggaccagctgaccagaagactgagacattaccagtacattctactagctactcaaatagggggaagcctgtcattttctaccagcagaccctatcagacagtcatttacctgaagaagctctgaaagttccacctgttcctggaccagatgcccagaagactgagacaccatcagtatcctctagtttatactcatatagagagaagcccattgtcttctaccaacaggccctgccagacagtgagctaactcaagaagctctgaaagtttcagctgttcctcaaccagctgaccagaagactgggtta

SEQ ID NO: 12004 - DNA, 1268 bp, Homo sapiens
gaagactccatcccagacagcttttcatagttcctattctcaaacagtaaagcccaatattttatttcaacagcagttgccagatagagatcaaagtaaaggtattctaaagatttcagctgtccctgaactaactgatgtgaatactggaaaaccagtatctctctctagttcttattttcacagagagaaatcgaatattttcagtccacaggaattgccaggtagtcatgtaactgaagatgtgctgaaggtttcaacaattcctggaccagctggccagaaaacagtattaccaacagctcttcctagttccttttcacatcgagagaaaccagatattttctatcaaaaggatttgccagatagacatctaactgaagatgctctaaagatctcaagtgctcttgggcaagctgatcaaattaccggattacaaacagttccctctggtacttactcacatggtgagaatcacaagcttgtttcagaacatgtccaaaggctaatagataatttgaattcttctgactccagtgttagctcaaataatgtgcttttaaattctcaggctgatgacagagttgtaataaataaaccagaatctgcaggttttagagatgttggctctgaagaaatccaggatgcagaaaatagtgctaaaactcttaaggaaattcggacacttttgatggaggcagaaaatatggcactgaaacgatgcaattttcctgctccccttgcccgtttcagagatattagtgatatttcatttatacaatctaagaaggtggtttgcttcaaagaaccctcttccacgggtgtatctaatggtgatttgcttcacagacagccattcacagaggaaagcccaagcagcaggtgcatacagaaggatattggcacacagacgaatttgaaatgccggagaggcattgaaaattgggagtttattagttcaactacagttagaagtcctctacaggaagcagagagcaaagtcagtatggcattagaagaaactcttaggcaatatcaagcagccaaatctgtaatgaggtctgaacctgaagggtgtagtggaaccattgggaataaaattattatccctatgatgactgtcataaaaagtgattcaagtagtgatgccagtgatggaaatggttcctgctcgtgggacagtaatttaccagagtctttggaatcagtttctgatgttcttctaaacttctttccatatgtttcacccaagacaagtataacagata

SEQ ID NO: 12005 - DNA, 1177 bp, Homo sapiens
tccctatgatctcaagatataactgcaaccttgaaaactcctagttctcccagaactccttgacagaatgctctgtttcttgtttatctttgtacactgtgtgtatttagcacagtcccctaatttatggtggacatctagtaatttaaaaaaatgtattttcaattcagctgaaaaatagcatttcctcaactaaattatataatttaacattctaaattaaaagtaggttttaagataaaagtaaacatgtgtgataacattgtatcaaacaaaataaagggtactgctgaaattttaccttaataacgtttgacattgatgtgtccacaatatattcctatagctacttaaatattccttgaaaccacttttggaaagagatttcagtctctaatggccaaggatataatctgctgtattctttctcttttttggtcagattaccagagaagatgaagaccccactttctgctttctctgaaaaattgtcatctgatgcagtcactcagataacaacagaaagtccagaaaagaccctattttcatctgagatttttattaatgctgaagatcgtggacatgaaattatagagcctggtaaccagaagctacgcaaagctcctgtcaagtttgcctcatcatcttcagtccaacaggttactttttctcgcggcacagatggtaagagaatgtgattgcattttagattgttagaccagctcttttgtgtagttatcttagaaatttgtggttgtgtctttctagtcagaaaacctaattttaatttaagaattagggtccatatgattatatctgtcttttatttgcatagctgtcaacagaatatgatttattatattttatcttaatttcaagcacagttaacatgtagaactcatgctgtttgtgttaaaacttagttttgtctcatcatatttgcaataaaaatgcaagtagttcataacaacttgaaagtaattgaggtctgcttttaaaatggcggataaattatcttgtattacagtaacagtaatgttattactatatagtgcgtatatagggagagtatgtatatactaaatactataacaaatagatgcataaacatgtgatagtgcaaacacaatagcagtttatctcttacttataaagcaatcaccagagacccaggttg

SEQ ID NO: 12006 - DNA, 1189 bp, Homo sapiens
ttttatatcatttgcatctctgccttgtattattagaatttattttacatggcttacaacttcagtttgactgacgtttccttctgattatcctacccattgtagtgtagtgtttttttgtttgttcgtttgtttgtttgtttgttttttaagaccaagtctcactctgccactcaagctgcagtgcggtggcaacatctctgctcactgcaacctctgcctcccaggttcaagcgattctcctgcctcagcctcccaagtagctgggattacacgcacctgccaccacgcctggctaatttttgtatttttagtagaaatggggtttcaccatcttggccaggctggtcttgaactcctgacctcaggcaatccgcctgcctccaccttccaaagtgctgggattacaggcatgagccatcgtgcctggcctgtagtgcttttttcatagaattggtctaagaggcaaatttttaaaaagtctttctcaatctcatgtcgctatttgtgttttgtattacttccccgtttttctgtaggatccaatgatgccattgctccagacttcccagctcaggtgctaggcacaagagatgatgacctctcagccactgttaacattaaacataaagaaggaatctacagtaagagggtagtgactaaggcatccttgccagtgggagaaaaacccttgcagaatgaaaatgcaggtaactggattggctttgtatactttgtagctttttctccccttttcatcctaaatgagattactatccaatctttatcctttttttctgttttgttatacaagcttttctccttgctgttatattgagcatatacaagaaggcaaaatttcataaaatcctttaataataaaggaagcataagcttcagagatttttgaaaattataaacttcattttcacaacggataataaaatatgatacaacttttgaaatgaaataatacccaatcaagtatgttttagatactaagatccacagaaaatcttgattaaatgccacattagtttatctctgtcagatattacaaagtaatgtcttataggctggattctgtagggagatatgtagctgacatgattttttttttttaatttttttaaagacagggtctcactctgtcacccaggctggagtgcagtgatgcaattatagctca

SEQ ID NO: 12007 - DNA, 1209 bp, Homo sapiens
aaagagcctcagcatcaatgtgaatttgggaaacaaagaagtgatggatactactaaaagtcaagttagagattatccaaaacataatggacaaattagtgatccacaaagggatcagaaggtcaccccagagcaaacaactcagcacactgtgagtttgaatgaactgtggaacaagtatcgggagcgacagaggcaacagagacagcctgagttgggtgacaggaaagaactgtccttggtggaccgacttgatcgtttggctaaaattcttcagaatccaatcacacattctctccaggtctcagaaagtacacatgatgatagcagaggggaacgaagtgtgaaggaatggagtggtagacaacagcagagaaataagcttcagaaaaagaagcggtttaaaagcctagagaaaagccataaaaatacaggcgagcttaaaaaaagcaaggtgctttctcatcatcgagctgggaggtctaatcaaattaaaattgaacagattaaatttgataaatatattctgagtaaacagccaggttttaattatataagcaacacttcttcggattgtcggccctcagaggagagtgagctgctcacagatactaccaccaacatcctttccggcaccacttctactgtcgaatcagatatattgacccaaacagatagagaggtggctctgcacgaaaggagtagctctgtttccactattgacactgcccggctgattcaagcttttggccatgaaagagtatgcttgtcacccagacgaattaaattatatagcagcatcaccaaccaacagaggagataccttgagaagcggagcaaacacagcaagaaagtgctgaatacaggtcatcccctagtgacttctgagcacaccagaaggagacacatccaggtacatggctacagattccatctggcaatgtgactgccctcttcatggactttttagttaagctttgcacacaggtgaaaaaaacaagccatttgccctttcctctctataccatttcttaccaactggaaaagagtgagaaagtgtagtacagtgctattgtgagttgtcattattttcatcaacattcatttacgaattaccttttgaatgaagggctttgctgctagatccttcacagtctgcaaagtttacccctgaaatgggggagctttgaggttagaatgatctctatc

SEQ ID NO: 12008 - DNA, 1161 bp, Homo sapiens
attcatttattgatttgggttgtttccactttttggttattgtgaatagaattgatatagaacgtttgtgtacacctgtctgcaattcttttgggtatatatctaggaatggaaatgctgggccatatggtaattctgtggattagcttattgaggaactgccagactattccatagtacctgcactattttgcattcccatcagcagtgtataagggttcctccaaccctcctccttttttccacagcgactgctttagtttatattcgcaccagcagttcacaagggtttcaattttattgcatccttgccaacacttattttccattttttaatatataaactaaccatcctgttgggtgtgagttagtatcattgtggttttgatttgcatttccctagtgattattcatgttgcacatctttttatgtgcttatttaaccatttgtatatcttcttttgaaaaatgtcttttcaagtcatttggccattttaaatctggctgtttgattttttggtttttgagttgttgggattttctatatattctggatattgatctcttgttagatacatgatctgcaaatattttctcccattttgtaggttgcctctttcacagtcactctgctgaccgtgtcttctgacatatagaagttttaaattttgatgtagtccaatttagctattttttttttgttttttgtgcttttggtgtcatatcttagaaatatttgccaaatccagtgtcgtgaaagttttcttcttaagagtttaataattttagcttttacttttaggtctttgatccattttgagttaatttttgtgtatggtgtaagataagggtccaccttcattcttctgcatgtgaatatcccgttttctcaacatcgtttgttgaaaagactttttttccccattgaatgttcttggcactcttgccaaaaatcgtttagccatatacgtgagggtttttatctgggctctctattctgttagtctatatatctctctttatgccactactgcactgttttgatttactgtgtatttaaaatgagttttgaaagcaggtagtgtgaaacctgtaacttagttcttttttcaaaattattttggctgtttggtttcccttgagatttcatgaattttagta

SEQ ID NO: 12009 - DNA, 1245 bp, Homo sapiens
gaataaatctgtcaactcagcctcaaggttactcccagagacacctatgatccttcccctcaggtaacttggagattgtgaacggtgccaaaaaacacactcgagatgttgggataactttcccaactccaagttccagcgaggctaaattggaagagaacagtgatgtgacttcttggtcagaagaaaaacgtgaagagaaaatgctctttaccggttatcctgaggacagaaagttaaaaaagaacaagaagaattcccatgaaggtcagtttctcattccagatcttgtagtagagaaactagtgaatttcaagtcccctgcgatgctgactctgtgtttccaagtgactctatgtggtccccacctacccccagccacaaccttgtcaggttttcagagtccagcatggcagttacacagtcatccctgcagcaaaaccagactcaagggcaccctgtggcctctgacagctgagacccctgagaacctgtattatatgcatatcctggataagagctgggtggggctgtaaaaaagtgaaaaatctgtgttccttctaaaaactgtttcctgtaggagtttcctggtttgttcctgtggaaaatgtggagtctagatcaaagaaggaaaacgtgcctaacacttgtggccctggcatctcctggtttgaaccaataaccaagaccagaccctggagggagccactgcgggagcagaactgtcaggggcagcacctggacggtcggggctacctggcaggcccaggcagagaggctggcagagacctactgaggccatttgtgagagcaacccttcaggtgcagtgacgttgacttaactttaatgctacgtgtagggagaagaagggcaaggcgcagagaagctggctctgtgacttggtgagctgaggtgtaggcctgagacgctcttttccagcacctccgcagttcacctgttttcacgcacgagggttgggtttctcatcatctgtcaaaggctgccttactcctaaccatagatggtgcatcaccgtcgggatctggggacaaggccgcaggagggaggatttgcatctctgcttattgggcctgtgggtccctgtgtgtggagggcccggaggcctgacgcttgtgcggcctcatgtgtgttcctccatgtccgtagctcctgtttctgctccatgtcggatttaaaggaaaccaggtctcttctgatgtgtcccttgggggataaaggaaatg

SEQ ID NO: 12010 - DNA, 1163 bp, Homo sapiens
tcattttctatacgtataccctttaagactcagtattagaaaagaaaagggccagggggaataaccagtctattatcctagtgtaatagatgaggaaacagattttgtgagagaataaaagttatctaaagtcacacagctagtaaatgtcaaagccaaaactgaaatgaggtctctggatttctacttcaatactttccctgttattccaagctgtttgggaatatagggggaaagaaatctaaatttagtggcaaagaaatctcatgaaaacctttttaaaaagtttctctctttacctgacatggtcagagaagaagaaacatcaactgcagatagaagggaagaagagacgatactagcggatgtctgggtggctgaagccaaccagtgcatgtgtccagtatgaaggccactggtcactggttactggtcactggccccttgtgatgatacaaatttacaggccacgcccaggaaaccccaagatgctaccaggtggtggtcggtttggtgggagaatgatgtcacaaagcaggcagtttaaaggtctgcgatagccaatagggaggtcagattccccacaagacaggattggctggcagaggtggtaggaaaggtgtaacagcactaagtggctgagctctggggaggtgaaatctgcaagacagacatgatagtcccactttcccccaggctctcatgttagggagatcatctcaatgtttctcataaatgttcactaatataattaactaacatttatattttatatgttacatttcataatatgtaatagtatgcatttataattatatagtacatacacaatatccttggggagaaaggaaagggatgtttaagttgagcaattacagttgttctaaaactatttcagtgaatctgattaatgaatttactgctgctttttaattttattgtattttttgtgagatggagtctggctctgtcgcccaggctggagtgcagtggcgtgacctcggctcactgcaagctccacctcccaggttcatgccattctcctgactcagcctcctgagtcctgccacttcgcctggctaattttttgtatttttggtagagacggggtttcaccctgttagccaggatgatctcgatcacctgacctcgtgatcggtctt

SEQ ID NO: 12011 - DNA, 1199 bp, Homo sapiens
acttcacacttagagcacgtgtgtacacacaggcttggttggatttctttccatcttgacaaaaaacaaaataaagtcctagtgtgactttgatcattgtgaattaaggacctttttgtgtgtctctggttttaggagagcctcatttgtgtgattgatctgaggctctaaaagtttctgagcaacattaagaatgtctcattaggatcttctctttaaaaatatcttaaagatcttctttttgtttctgctggtgaagctccctagggaaccagagacatgggaagatgaattggaggctcaagaagtaccagagagaggatttgcaagaaaagttggggtcagatgtgcacctgagtggtatgaagcagggaaatgcttttcaaatagtgtggttcatttttttcctttttcccccttctctctctctttagacaggctcagagctcagcccagttgatggacctgttccaggtcagatggactcagggccagtgtaccatggggactcacggcagctaagcgcctcaggggtgccggtcaatggtgctagagagcccgctggacccagtctgctggggactgggggtccttggcgggtagaccaaaagcccgactgggaggctgccccaggcccagctcatactgctcgcctggaagatgcccacgatctggtggccttttcggctgtggccgaagctgtgtcctcttatggggcccttagcacccggctctatgaaaccttcaaccgtgagatgagtcgtgaggctgggaacaacagcaggggaccccggccagggcctgagggctgctctgctggcagcgaagaccttgacacactgcagacggccctggccctcgcgcggcatggtatgaaaccacccaactgcaactgcgatggcccagaatgccctgactacctcgagtggctggaggggaagatcaagtctgtggtcatggaaggaggggaggagcggcccaggctcccagggcctctgcctcctggtgaggccggcctcccagcaccaagcaccaggccactcctcagctcagaggtgccccagatctctccccaagagggcctgcccctgtcccagagtgccctgagcattgccaaggaaaaaaacatcagcttgcagaccgccattgccattgaggccctcacacagctctcctctgccctcccgcagccttctcat

SEQ ID NO: 12012 - DNA, 7154 bp, Homo sapiens
tccacgcaccctcctgcatcacactggaactggggcctctgcttaattgtcagtcagaagggtatctgcagcagccacagccagcctgataggaggccgtggggatgcaagtacagcaggacttgttatctgcgtggaagtgagcttggtagaggggaagcactgggtttctcctctagtttgcatccctcagagaatcagaggctcccctctgagctctagtttgctcccctctgagatactgaggtgagtagcagcacttcaggacatgtgggtgtgtgccagggcagcagggcttatgggcggagacggttgctggcaggcatctgagttctcattctcctggccctggtccctgcagtgatcccgactgggctgggcacagagtgggtggtggtggttcagtacaacttctggagttctctagggtgaagagaggagtcggtgggggtactgtggaccccgcatgaggtgcttctcagcagggatcgcctcctcccacccccagtggggctggggctggggcctgtgctgagcagggcccagggagtacgacccgttctgggctggacatgcctcagcacctcacctgcctgtcccaaaagaggaaacatccctgggaaagagggagggtccatccccagtccccgacccagggcctctccaggctgtggtgttgtctgcccctctgccatcttgccttctgtttccccaggcctgtctctgaagggtggattgtcccagcaaggcctgaagccctccctcaaggtggagccgcagaaccacttcagctccttcaagtacagcggcaacgcggtggtggagagctactcggtgctgggcaactgccggccctccgacccttacagcatgaacagcgtgtactcctaccactcctactatgcacagcccagcctgacctccgtcaatggcttccactccaagtacgctctcccgtcttttagctactatggctttccatccagcaaccccgtcttcccctctcagttcctgggtcctggtgcctgggggcacagtggcagcagtggcagttttgagaagaagccagacctccacgctctgcacaacagcctgagcccggcctacggtggtgctgagtttgccgagctgcccagccaggctgttcccacagacgcccaccaccccactcctcaccaccagcagcctgcgtacccaggccccaaggagtatctgcttcccaaggcccccctactccactcagtgtccagggacccctccccctttgcccagagctccaactgctacaacagatccatcaagcaagagccagtagacccgctgacccaggctgagcctgtgcccagagacgctggcaagatgggcaagacacctctgtccgaggtgtctcagaatggaggacccagtcacctttggggacagtactcaggaggcccaagcatgtcccccaagaggactaacggtgtgggtggcagctggggtgtgttctcgtctggggagagtcctgccatcgtccctgacaagctcagttcctttggggccagctgcctggccccttcccacttcacagatggccagtgggggctgttccccggtgaggggcagcaggcagcttcccactctggaggacggctgcgaggcaaaccgtggagcccctgcaagtttgggaacagcacctcggccttggctgggcccagcctgactgagaagccgtgggcgctgggggcaggggatttcaactcggccctgaaaggtagtcctgggttccaagacaagctgtggaaccccatgaaaggagaggagggcaggattccagccgcaggggccagccagctggacagggcctggcagtcctttggtctgcccctgggatccagcgagaagctgtttggggctctgaagtcagaggagaagctgtgggaccccttcagcctggaggaggggccggctgaggagccccccagcaagggagcggtgaaggaggagaagggcggtggtggtgcggaggaggaagaggaggagctgtggtcggacagtgaacacaacttcctggacgagaacatcggcggcgtggccgtggccccagcccacggctccatcctcatcgagtgtgcccggcgggagctgcacgccaccacgccgcttaagaagcccaaccgctgccaccccacccgcatctcgctggtcttctaccagcacaagaacctcaaccagcccaaccacgggctggccctctgggaagccaagatgaagcagctggcggagagggcacgggcacggcaggaggaggctgcccggctgggcctgggccagcaggaggccaagctctacgggaagaagcgcaagtgggggggcactgtggttgctgagccccagcagaaagagaagaagggggtcgtccccacccggcaggcactggctgtgcccacagactcggcggtcaccgtgtcctcctatgcctacacgaaggtcactggcccctacagccgctggatctaggtgccagggagccagcgtacctcagcgtcgggcctggcccgagctgtctctgtggtgcttttgccctcatacctgggggcgggttgggggtgcagaagtctttttatctctatatacatatatagatgcgcatatcatatatatgtatttatggtccaaacctcagaactgacccgcccctcccttacccccacttccccagcactttgaagaagaaactacggctgtcgggtgatttttccgtgatcttaatatttatatctccaagttgtcccccccccttgtctggggggtttttatttttattttctctttgtttttaaaactctatccttgtatatcacaataatggaaagaaagtttatagtatcctttcacaaaggagtagttttaaattccatttaaaatgtgtatttattggattttttaaaagcgacaatagtaatggtaaaggatgggcaggaaaggccagtagtgctcccccgcccagtctcgctgggtctggcgagccaagcccctcgggcgctggcgaggtcctcagccatctgcccctcgagagccaagcgcggacggtagccacccagttcatccctcccgacatacaccccttccctttggggaagggagcctcaggacagcttctgtcctctctgataggatgggagagtctgcagaaaaccatctggggtcccttttccagtccccggcttggagtcgaagggcagatgcaccccaggccagccccacgagatgctggcatagctttccccagaaaccaggttggaagtagatggcttcaagcttgctagtctccacactgaatcctctgtccgttatttatggagtcacacgatgtcatggttcactaggcagcacctcacgctggagctggagtgcgaggttcttaggggccgtgcccaccatgttgccaagccaatgcatgctgagctgaaggaatttgtcttagtggcagttttttaaaaaatgcccccaaagtctatgctgatactgaaaaagggctactgtatctttaaaaacaggaagttgaacccaagctgtgaaaagccagtggtgctctgtgcatggtgctgtgcggagcctggtgctgtagtgttgtgctgggactttcttgactcttgggcaggtcacatcctacaggagctcagcagaccagtgtaacaacagttaatgcatctatcctgatccctgaatttccacattggacaatggtgcatgcctcacacctgagcctgcttcctccatgctgtcattgggttcgggggcctacacttaacaattttaaagtgcaagagtcaaacattttcaacaggttgctataattttcctccctaattggtgccatttctccatttgatcattttctttttttcctttctcccctcttcatccactttaatatagctgttctgaaattctggtgcattcattcggttctttgaaatgagaatgtggtgcttaatttttgtgacgttgtcgagagaggttgggcctgatgggagcaacactcatcatcaccaagtcaaactttgttggagtgttggtttttcttgtgatattagcagaaatgatctcatgctagccatgtggatgtgtgtgtggtgaatggggggcttcatcaggacacacagaggggaatgtggccacacggtggatgaccaccaagccctgagatgaacaggtatttactgagcagttgtattcagatatgggtcttcatgaatcatgtttaacaatcagatgaccgctataggcaagttcctgagcttccgggtgccttgagtaagagctgagaaccggcctgctgggtgtttactgtatctgtttggaagcactggcggagggtcgttgtaagatgtcctgagcatttatgtggtctggttttaactgtaaatagtgaaagatttttttaagcacttttgcctagatttaaacagcaacttgaaaaaaaaagtatgttttaacatgtaattgtgggagaaattgtaaatagtagccgaatatttaatgtgctttgtctatcctccacttttaccatattctgtaaagttgcatttattttacaggacaaaaaaatgaaatattattgcttttgaaataaatacccaagagcttatcaggacttagaattattcagaactcagatttataggaaaacctctgaccttcagtttgacaagctaaaggaagcagagtctttaatgagcatgctaattttctagttttgaggaaaaattgggtcctttaaatgctattttgcttatcgcatcagtacttttatgcaggtctcatttgactccgtgcttaggtagatgcgggggtgccttgaaaacttcattttaaatgatcttaagcaagaaatacaatattttacgaaacatttggagaatgtgaccgtctgtatgacccgtggaagccccaggttggctgttggtttggaaggtcccgagtgtaacccaggtgattctgatacttggcatgtgtgaatcttcctgatgtatgttaaataaactcttcccctcatcaccctttggtaggaaagccattagatgaaaggagaaaccaatacaagctaaaagcatgcgacgtctgtcccccagcccaaacagccttggttcatcagtttctgcagtaggagataggctgctgagaggtgagtcaagaggcagtctccattggatgtccccactccccgcagaatggcgtttccagagttaggcggtgtggttgccgtgctcaagcccatgctgatttgtacactacatgtctaacctacctcaaatctcagtcattaaaattagcatgctttagacatatatttaaaaagtaactatgcacagctctttatcccccccttgctgctgaagctttcttaaagagaaaaatcaaatttttattttttactggcactatcattttttaagtcctaaagatgattaacagacatttttatcatgagaagaaaaataaagccattgcaactaaagaacctaacagcatgaccaagttcgaagagtcatattatagcaacggaaatcgatggcgtcttagtcatctccccagtgtgccctgtccacggacaccatccacgtgcagtgcaaacatttggttccttttctgctctgttttgttttccctgcctgttgcgtgcaagggaagtgcttgtaaagttctgtgctacgagatttttaaaataaaaatcgcttcgcagcaggttctcacaaaataactggtgctagctcaagaaatcatcatctgaccatcagaaatcttgactaaaggtgttgcatggatttgggggtctttcggtttttggttttgggtctggcttttagcagggccaatgtttcccacaccccggcttcatgggtactgctttgccttctcaccaaggtgacgatggtgtgcgtggaaagagatgataccccaccgccccctcttggtccttccaccagcctcttttgggaacagtagtttgcagagcaagggatttttaaagcgctaaagcaaggaaagaagtagcagagcttaactgctttgtaccacacagcagtagatgtgcaaggacggttgacaatgagtcgatgataacctaatttcattgagagaaacccagccagacttgcttctagaggtttaatcaccatgagatctcaaaccaaggcaaagctggtggaaaactatatgatatccctgacgtgcctcaaccagtatctctttccttttgttactgaagtgtgttttatggactaggaagcatttttatgaattgaaatagtctaaataaaatggtgctatggtgttttaatgtgactgtccctgatcctgtcttgctgaggtgctatcaacgttctgaaaccacaaccaaccaaaaacaaggtgggctccagtctcttggcttttttttttccctcccctcttttggtgctgtcttagacccgtttaccgtgctataatctgctctgagcagtgttgtgttgtgttgtattgttcttcccttggtggccaaacaaagcaagtcgagaaggcagctatctccctttctgtgatcgggagtgggcctgcctggcttggcaggtgctttttggttccacacctgtcttctcaggcttgatgtgaaagaaagggcgaagggttttttgagtttttgtttttgaggaaggggagttgggtacttctgcctctcctagcatgataggcattctcatagccagggacagattttctcctgcagcccagggtgctaagcagacatctctgggagtcccaagggcacaccaagggagaccagatggatctccttcctcccctggcactggctgggaccatggtgggcaggggcttcattctctgacccagcgttgcttctgcctctcattggtaaccccttatgttcggactaaaggaaggagctttctttgctcactcgatgccactgaggctgctttttagttggtgctaacctaaatttcttcttgggtccacagaagttgatgttttaaaaactcaccaggaagctccattttgtgtcatccactgtcacaataatttttttaaatacctcaaaaacaggacatcatgacaacttcagtaaagtagattccatgagggtctgatacctgcaggttgtccgtctg

SEQ ID NO: 12013 - DNA, 1725 bp, Homo sapiens
tccaaggctagggagccaaggggaggaggagaattggaggaaggggagataatgggaagaggatggcgccttcctgagttggctagagggccaacctttgataacagtttgacgaaatcaatcttttttttttttttttttgagacagagtctcactctgtcacccaggctggagtacagtggtgggatctcggctcactgcaagctctgcctcccaggttcatgccattctcctgccccagcctctcctgagtagctggaactacaggtgcccgccaccacgcccagctaattttttctatttttagtcatgcctggctaattttttgtatttttagtagagatggggtttcaccgtgttagccaggatggtctccatctccttacctcgcaatccgcccgcctcagcctcccaaagtgttgggattacaggcatgagccaccgtgcccggcctatagaaatcaatctttttgactcttctcacttttatctccccatgcccaaggtttgcctgttccataacactcactcccttcccccttgctaatcagaagccatctcctctcagtgtctgatctctgctcttcatacatgattacagtcatggggtagagagtgcttgctaaattatgcagttaatcctatggtgctttaattttcaggccttcaaaaaacacttgtacagtgatgtgcagatttttaaacagttgaacttccttgtactacagtttttgtattgacagccaaatttgtctttcattcttcagattgtgaataaagtgatttttacagggcttccagcaaagtttttcctttcatctaaggcttgtagaaccctagcttatatagctgcttacatgagaaatgcaaaatctgtattcaccatgactttagtaacaaaggtaaagttttttagtagtgccaaggcaagaggaacaatcttggtggtagtactaagttttgtcaatattgtggtttcctgattgtattgttggctttctctctgagcattgaggtatactagaagtagagcttctcaaacataatatcattacctcataagcattaacaaatcaggcccaaagagcgtaagtcctagaaatttgttttaaagcagccctagtcatggtgctggtgctaccgccttgttttaggagcctgcctcctgtcagtatgaaaccctcacctgaaaaatgccagcctggacaccaaacactgagccccttcaacaggcacattatttccccctgagatccataagggaatttagtttctactattgtagagttctgaaaagaggtaaaatagtagtcctttggtcatcctatttttgctttcaattttgatatttcagactgtaaaaggccttgggggatgatagtacatgtggtagcagtaatttttttgaagcaactgcactgacattcatttgagttttctctcattatcagattctgttccaaacaagtattctgtagatccaaatggattaccagtgtgctacagacttcttattatagaacagcattctattctacatcaaaaatagtttgtgtaagttagttttggttaccatctaaaatatttttaaatgttctttacataaaaatttatgttgtgttttaaaatccttaggggctttatctatttttctaagtcagttaactgtacttctaaaaaaagtattttgtatctacttttgtaacttcgtcagaataaaatat

SEQ ID NO: 12014 - DNA, 1155 bp, Homo sapiens
ttctaaggatggtcttccaggcttttaaactgaaaagcttaattcagatagtagcttttggctgagaaaaggaatccaaaatattaataaatttagatctcaaaaccactatttttattatttcattatttttcagaggccttaaaattctggataagagaatggaggaaaatactcagagtacttgattattttatttccttttattaaaaaattacttctatgtttttattgtctcttgagccttagttaagagtagtgtagaaatgcatgaacttcatcctaataaggataaaacttaaggaaaaccacaataaaccatgaaggtgtacacatcttataacacagataaagttttggtgtgctacctattcttgagagagtgagtgagtgtatgtgtttaaaggaaacaaaatgggagaaataagttttaaaaaaatcctcattttgttaatattcaaaagatggactgagcttccacttgggttttatcttgttttaattgtttttgtatcaaaacttgaaattcctctatttctattgggatataaaagccttccccttcagtgaagaaaacatttattttttatttgattcctaggatttagtaaactctagctgtctatttaaaatgtactgaggcacaacaagtattatactggaagacttgccaaactggcaaagctttaagttcatcagcattctatgtggttcagagctgtgatttttgcaaagtattttaccaacctcctcgatggctttgataaaggttagatttgatgtttttttttagatttatttttcttactccactaaactataaagaaaataattacttagaaactccattttaaataatcatttcctagaaattcttaaatatatacagaattttaaagaaaacatttcatctgatttagttagcatccacatatcattgaggaattaaagtgtgggacagtcattattaaaaaaaagagagaaaagccctctattagacattccacaatccatgttttaagcttatccaaaggtccaaatgtcagccattctgtatgttcatgttgatcatttgcgaacaagaaagcaggtttctaggtatcacttaggatgtgaactgcctctcaactttaaaccctgttagctttacttttt

SEQ ID NO: 12015 - DNA, 1130 bp, Homo sapiens
cttagatgtataaatattccttgaacaactctgtatgtgcatgttattttactagtgtgttcacaaaaccttgaatgatgtagatgtgatttttgagttttatgcttatgtatgttactttttccttgcatgcttgtttaataatatattaaagtacacacatgtcctttgccataactaaagcagcctgcctgtcttgtttctatgtaggagtcagacaaaaagctgggtatatcactccagttcctggaggtgttggccccatgacagtggcaatgctaatgaagaataccattattgctgcaaaaaaggtgctgaggcttgaagagcgagaagtgctgaagtctaaagagcttggggtagccactaattaactactgtgtcttctgtgtcacaaacagcactccaggccagctcaagaagcaaagcaggccaatagaaatgcaatatttttaatttattctactgaaatggtttaaaatgatgccttgtatttattgaaagcttaaatgggtgggtgtttctgcacatacctctgcagtacctcaccagggagcattccagtatcatgcagggtcctgtgatctagccaggagcagccattaacctagtgattaatatgggagacattaccatatggaggatggatgcttcactttgtcaagcacctcagttacacattcgccttttctaggattgcatttcccaagtgctattgcaataacagttgatactcattttaggtaccaaaccttttgagttcaactgatcaaaccaaaggaaaagtgttgctagagaaaattagggaaaaggtgaaaaagaaaaaatggtagtaattgagcagaaaaaaattaatttatatatgtattgattggcaaccagatttatctaagtagaactgaattggctaggaaaaaagaaaaactgcatgttaatcattttcctaagctgtccttttgaggcttagtcagtttattgggaaaatgtttaggattattccttgctattagtactcattttatgtatgttacccttcagtaagttctccccattttagttttctaggactgaaaggattcttttctacattatacatgtgtgttgtcatatttggcttttgctatatactt

SEQ ID NO: 12016 - DNA, 1171 bp, Homo sapiens
gaggaacttccttagccttcctggtctctgcaactccccacccagcctgtgagcctgagaagactcgggtcaccccctcccccatccaggtctggaccactttaggtgtggcctgtcccagctggggcccctcaggaaccgcaaagaccctgtggccaccttctgggcccttctccccagagacccaaacccagggcctctccaagcttgaacatccctctcttctatgacccataccccttaggcagttcaccctttcagatggggtggcaggacacacccacctctgcaatccttgcaaggagcacctcaggccccttcagtatcttctggaaggcagggggtccttgaaccatgttccacagaatggttgcatccaggaggaactggctccccagaaacttctccctcccccaaccccgctcctgcagaaggctgccggctaccatctggacctgttctgggtgggcatcctcatggctttgtgctcctttatggggctcccctggtacgtggctgccacggtcatctccatcgcccacatcgacagcctcaagatggagacagagaccagtgcccctggggagcagccccagtttctgggagtcaggtaggaggggtcagggcctagggatcacccaatggggaggggcccactcggggaggagaagctggctttgcctgccacaaaaggatttggacaaaaagggcccccgctctgacggcccaagaaccacagggacaggagtgctatccctggagggagggaaggagagagacagaagtccagctctaagtggggctttttacctactgggctccaagcagtatgcataccccatccataaatatgcacacgtgccagacactcatcttcatcagccacccaaggtccccacaaggcttcgtgctgtcctgcccttttcctcttcctcaagaccctccaggcccctactgccctgatggccctcctgcgggttcaggtcctgctcagtctctattcctccagaaggctgtcctgggatcacccccgctccccagtctgtggccctgcctgttactcctgttccttcacttgcctcttctctcacgccccatggtaggcagagaagtacatcttcagccccttagggcctccagggcgagaccacaccaaaccctggctttctcc

SEQ ID NO: 12017 - DNA, 1247 bp, Homo sapiens
gaaattttgcgtgtgggaagtaaccccaaggagttaaaagccctgcaggggcatagaggagcctttgaattgggcttcggggaagcgagcggccccggcctaaagtcggggttgatgacagaggctggcccagatggctgcgacaggttgtgggatggggctggcgactggggaacaagcgggagcccaggccaagagtccgagcgcttggggcccgcctagctgcccaccgcccttggcccggggatgcccaagacattttggggttcaggcacattttaggagtcgagctggggccctacaaattgagaccaacccgggctttttccaggctcaggcagataatcctaaccaggccgcggaatgggcagcatggatccgatgaaaatgcagaccgtccacaccttactttttaagtcaacaactccgtcgggtttgtacccagaccgtgcgtctccgcccctcggcgtgcacgcgggcgagggaaggaggccgaggtggctggggctgcccccgggagccgcggaaggggaaggcagggacgcgagtctctcacctcgggcaggtcgctgaagaggctgagtcggaagcggccgcgtttgaactccatctccagggcggagcccctggccacggtgacccggctccggtggtttcgggagaacatgctggcggccctgcgactttgcctgctcagtgcgctccccgcgccgcccggcttagcctcctctcctcggcttctgtctctcgacgctcgtccgccagtccggccgggaatctcccgctgcggggctccaaaccccgcccccggagacgacacctgggccgggcagggcgcggcaacctcctcttccacccccgccaaaggcccagcccgtccggccagtccctgggcgccaagccgacctggcccgacggccccggagcccccaggggcgcactgcacctcgcgagcactgtgggagcgcgttctccctgcccgcgcgggtcgcgagcgcctacctggacttgggacggaccgagaagccctgccccgccagccgccccaacctggcaagcctggcttcccgggcgctgaaaaccccgtggctcagggatcgccgcgtagcacgctctggctctactcgggccctgggaccttgcccagtttcaatcccggcagcctccgaagagaccatttcaacatcccacagtcccaaatgttccttcttcgtccccctccccacctaggctcctctgcgaggcta

SEQ ID NO: 12018 - DNA, 1247 bp, Homo sapiens; identical to SEQ ID NO: 12017

SEQ ID NO: 12019 - DNA, 1699 bp, Homo sapiens
cgccccgccctcggcgcagccatcagctccgccttggctgcctcctcgcccgccctactcagaggcggcacccaggacgcgagcaggcggacagtaggacgcggggcacgccggtacctgaagtccttcagaagtgcacgccgggaccaggattccgggaggccgactcctccctgccccacgaatgccgggaattgtggtctccgccggacgcgagttgtgagacggcccaaggggccgcggggtatgctgggaccgctagcccttccggcgcgcctcaggacttcgggtcccctcaccccgggcggatgcccaaagactccgccttcccaagagcccctgcggccgggcgcgaaaatggcggcggcggcgacggccgggcgctcctgaagcagcagttatggagcttccctcagggccggggccggagcggctctttgactcgcaccggtaagagacccggcgggaagagaccgatccccgcgtgctctcggccttcggcgcctgaccacttcgcctctcgcccccaggcttccgggtgactgcttcctactgctcgtgctgctgctctacgcgccagtcgggttctgcctcctcgtcctgcgcctctttctcgggatccacgtcttcctggtcagctgcgcgctgccagacagcgtccttcgcaggttccgacgcgggcgttcggggagtgtcagagctgggtctggcccgaggccacacagtcaccacctcctgtgtccccagattcgtagtgcggaccatgtgtgcggtgctagggctcgtggcccggcaggaggactccggactccgggatcacagtgtcagggtcctcatttccaaccatgtgacacctttcgaccacaacatagtcaatttgcttaccacctgtagcaccgtgagtgagagcgaggccgagagcgccacggggcggttccctggggcccagctgaaggcccccctgtccccactcgcgttccccatggaggatactgagccttacccctaaccccgatcctctacccaacatgtcagttttttttttcattttcctcaatatttttcttcttgctttctcttctcctggttcccagcctctactcaatagtccccccagctttgtgtgctggtctcggggcttcatggagatgaatgggcggggggagttggtggagtcactcaagagattctgtgcttccacgaggcttccccccactcctctgctgctattccctgaggaagaggccaccaatggccgggaggggctcctgcgcttcaggtgggtttagcacaggtatggggcgccagctgggtaggtggtcaagcttgtgggcccttgagtttttacaactttcttcggcccttagaccccatcatctccagttcatttcctttctgtccactttaagttctttctcctgaatcccttcattcttcaattatgtgcttgtagagtttgacagttgcctgttataaggcaggtgtgagctgctgactaggctggctggattcccatcctactttctccttcctcttctagttcctggccattttctatccaagatgtggtacaacctcttaccctgcaagttcagagacccctggtctctgtggtgagtgtgtgttgaacagggaatctctggggcttgaaggggaaatttcccatccctggccctggcttaggcctcatctcatgccc

SEQ ID NO: 12020 - DNA, 1168 bp, Homo sapiens
tggtgccctcatgtggtgtacatcttttatgtacatgttgcactttattgctagaagacagaaagtgagttgccattgtattttgtagtacctagcccatgtcctgtccatatatttatcaatgtgttgatgagagacttgaggtggaactcaggatggggagaatgcctgggtttggctaatagggtgatctgtgtactttcagcatccttgctgaactacagcttcgagaaccaagctttcccgatgttcagcatggtgtactcatccataaagtcatcctgggctcccctgcacaccggtgagggagaggctgcagtgtgatatggggatgggcaaggtgtgcatgtgtccttgaactaggctttgtactccttcctttctctctgtccatttttctctatagggctggtctgcggcctggtgatgtgattttggccattggggagcagatggtacaaaatgctgaagatgtttatgaagctgttcgaacccaatcccagttggcagtgcagatccggcggggacgagaaacactgaccttatatgtgacccctgaggtcacagaatgaatagatcaccaagagtatgaggctcctgctctgatttcctccttgcctttctggctgaggttctgagggcaccgagacagagggttaaatgaaccagtgggggcaggtccctccaaccaccagcactgactcctgggctctgaagaatcacagaaacactttttatataaaataaaattatacctagcaacatattatagtaaaaaatgaggtgggagggctggatcttttcccccaccaaaaggctagaggtaaagctgtatccccctaaacttaggggagatactggagctgaccatcctgacctcctattaaagaaaatgagctgctgccatcttttgtgggcagttagtcaggtgctgctctttgtggtgtggtgggctctggtctgttctgctcggtgctgggcctgggagcaaagattcccatgcttggctacagatactgacagctggcctctgaaggagggtgaaaacttctgcttgacagttccacatccatagtgcatggtctgatgagtgcggttgctgacatgggtttcttggtaagctcctgaggtaatggcagcctcagacccctgccattaggggccagtg

SEQ ID NO: 12021 - DNA, 3070 bp, Homo sapiens
aagtgcaaatacaaaccaatcatgactaagatggtttttcctgtgtcttcctcccaccttttccagctttgccaaagtcatgcatgagacagtgaaggacctggctccgaaatgtgatgtgtctttcctgcagtcagaggatggcagcgggaagggggcggcgctcatcactgctgtggcctgccgcatccgtgaggctggacagcgatagaacccctgaaatcggaagggacttcctctttctctccttcttccctgttttaaattataagatgtcatccccttgtgtcagagacagaccccttggcttttgcttggcagagaggaccccactggactgggttttgtctctgcatctcattgtagagcttggtggctgagcttggccctattaagataaatagagttccaaataaggatttgttcacatgcatcataaccattcccattggttctcctaaaacatgaaaattatctcccttagtaatcccccttgccaaattccatgtccctgtataattctacaggatggggacactaatgaagatacggttgcttcaccttggagcctgaacatgacatttctaagtggggtgcatcccccagcactgatgttgttactgattctcctgtcagagatctgggaggtctccactgaggatgtgagcctgattatcctataggcagacgtggggagggtggaggggtgacagtggaggaaaatccatggatatccacgcagcagcccctctttaacctcatctacaagcatttgccctgtggattccagcatttgccattcctggaatcaaggaatcctgagtctgggcaatgaaaccaaagccaggagttgacgcatcctgcagttgggccagctgtcgcatctcagcggggcgcacatgttatccacaagcaatggacctttggggaagggggagtttttagtttgttttacaaatttttcctgcaaaagtggaatcactgtattttcattttaatttatatttgaaattttatttagttcttgagtagatctgcttcttcatcttgacatgtaatgaatggtcagttgtacgtaatgtatttatatgttaatttgttatgtatatagatgtgcaagtcttgtcagaattggcctcagtgtagttaaagggcagaaggggaagatactgactagtcatagaaatacctcattcgcctgtgggaagagaagggaagcctcttcagggtgagtgaatggcaaagcggttgcttctggctcctccttcccctgtggtcttggaagtgtgtggaaggcagggacagagatggaggccgagccaatagactgaagagaccacagcaattggctcctccatctagagattttcttggcagtattccatgggatgttaagcaaaggaaaccaaaggaatcgtttcaaatggactcatggcttagaaatctttattcttagggcagtcagtagtattctaaagctttctgacaagataaaggaagtcaccaaaatttctttttttaaattgtatctaatcctcaacaacaaaccaaaacagaacaattaaacagccaaataaaacctcagggacaacatttttggtgtatttgagccctcccagcaagtttcaccttgggtttgtattttaaatgttttacaagaattgtccatgtgcttccctaggctgagctggcattggtctgctgacctgtttttgtgtttttcttttttttatacacaacatttatttcaaactattgggagggatgagagtggcttaaaaacttccatccctacttttcaagagtgcagttgattctgaatctgaaagcccgcctctgtcctaaaatacaaacaagcacagacattaaacctggatactatatgataaagagggatgtaactattgaattggatacaaggatcagaatggaaagaaactcacgatgaaattgaacctggtttttgtatatttatcaaacttgtgctgagaatagtgtctgattatacgacttttaagcaaagttgggtgtaattaggtgaaaacagcccaggtcctcccgggagcacagaggggctaggggctggtccttctcgtttgctctagtcttgctttgctgtctggtgtagctcctctgctgctcccatctgcactaattgacccaaaacgtgggtatttcctgctacacaaaagccaaaaggtttcatgtagattttagttcactaaagggtgcccacaaaatagagattaattttaacttaaattttaagcttgaagattaggtactatctgtgaagttacacttttttttttttttttaaaggtagagatgtgtgtgtgtgtaggtattaaagatgtgttgttggtttccaaaaaggaacactggaaaataaattttgaatgtttatgttctcagaatcaggttgacagtcccttgctgacatggctttgctttgtgtaaatacagtggatctcaatcttcggggtgtgatgaatagcgaatcatctcaaatccttgagcactcagtctagtgaagatgttgtcattatgtacaatacataactagtttaattaactatgtgatgttaactattattaataaattttaacattttccaaaataatcaaatgtgattcatgagtgtttttaagagagtagtcatcttccggtcgtatcagtacttcctggccagcccgatgagtaatttatgggtgtcttgattttgagtgtgtgtgtttgagaggcatgtggcttttccagaaactcagtcccagtggaattagaaggcagcttttcctggactgccttggaccccttagatttcaagccactgaagagctatggctagtcctgcggtctactgtttaaatagcttggctgaaattagcaccaccctgagggcctctggctggtcttggttggcaaatgtgattcatattcaggatatatagctctcgtgaacatccaaaaagcacttgcctctgtcctctccctaccaagcttttccttctccccagtaagcagaacacaggtctggggagtaaattcatcaaaagtccctagtgatac

SEQ ID NO: 12022 - DNA, 1096 bp, Homo sapiens
tcagcagggaaaaaggaaaacccttcagaggagagacttgggtagagtggcactgcagtgtctggggacagacaagggagggctgggctggtttccccttgtgcaggttgagaagacgtcactctgatctgagaggtgccacagcgtctctccccaggatggtttctgttggccacagtgccaggaagccctacctgtagaggctgtctgcttggggtggcggggcagtgtgtgaaggtgtctggggttgccgtagcggactggatcccttcataccttctgccaaattgcaccagaaaaagatatttctttttcacctagcaactggggatttgatttctgactcttgtctggctgggaaccctcacctgggtaagatttcgtataccgtattctcatgcgccctgcgtctattgccacgttcttctctgacaactttaagagcaaagcgaataaataatttaggggtaatttaggaggcccccaacccccgcgttgaatggtatttgcctatgcttttcttaactcttctagggagacagctaatatatataagagttgctggtagagtagatatggatctcaaggcagcaagggacgcatcttataaatgccctcatttgcccaaagcctcatgcccttcactgcagattgtgctgttttctgactgaggtcagcatggctgaagttagtcaggtgtctcttttccttgtgtttcagataatgcaatagaagctgtggatgaatttgcttttctggaaggtgagttccctctcagtgggcaatcatttccgcctgtcttttgcatgttgatgtgaaattcaaaatctcataaaacggatgcctgcttcttgtttgtgtagggataattctccgcacttgctattaggatagaaaaaagtaacttgctaaacctagtgaggttcagttttctcccttggggaattaaaatttctacctgaaaattgctaaccataaagaaataggagggaatataaagatcccagtggagttagatgaattcgaaagttcgattcctactttgatcgccatccctaaatgtcaggcttgccccccctcatcatgttacagatca

SEQ ID NO: 12023 - DNA, 1211 bp, Homo sapiens
ctctttaattagagagtttacctcatttattttatattcttttcttatatggtcttcatcaatgttcattaactaacacaacgacttcttagcccttttcccacttctaattctagctcttccgactagtatgcttaattcctaactgcccaccatctgtaatgacatgttttccctggggatattttggatggatcatcctcaaaattagtattttggtcttagagaactgctgccaataccggagcctcttctgcattaagtttgcccagcttgttacactaatccagcttctgaggtcccctgatatactcattgctctttgtatgtttaggtactttagattgattgccgagcggggcagttttgtgagccttcatctgaagccttcagttcacccctctgcacaggcctcagctttgaagaacggagtctttgcacttacacacactcttcctgttctgccttcacctatgccgggataagcagagatctcatcaattagctcttctctgcaaggtcttccactatttctgtctgtcttccatatcaagcctggatgcagctgctgctgcttagagcagagatgaagaaagtgttctgcataagtggcttcctgaatgatgaggaccagaataaaggtttttgatcaacctcagtccagtgtgttttataatctcgcctttgttcctaccctgtgactggagagtcaccatacctggtcacagaccttcctgatcttccctgccagccattctaacatacagtcctttcattaattttgttcttttatttttccagcacatcaccagaaagtggttccagaatttatggaacaccacttgccctcaggagttcaaataaatatggtcctagattgaaagccagttaaattttttttaagttttatttattgacatatccacatactctatatttcaccaatttaaagtgtacaattcagtggtatttagtatattcacaaatatgtacaccagtcatcacagtcgattttagaacattttatttatttatttattattattatactttaagttttagggtacatgtgcacaatgtgcaggttagttacatatgtatacatgtgccatgctggtgcgctgcacccactaactcgtcatctagcattaggtatatctcccagtgctgtccctcccccctccccccacccgacaacagtccccagagtg

SEQ ID NO: 12024 - DNA, 1149 bp, Homo sapiens
aggtatttctaaggttcttgacattttgttcaaatccttgtaacaatctgtctttagctttattctctgagaaactgagcaaacctgtttccattgccttcttagaagggttcatgtatatagcactacagaagcataatgaagtttctcagctcccaaaattattgttattatactgctgtgaaaaaataaatattattcaaaacctccctctctgcttctggatttaggaaatgtaaagttgaagctctgcatctgtttcgtgaaattcaggctgacacagactgattttgaaagctgttattctgtgttcaaacaccctcatcctggtacatttttcttctgtaatttgattgttcaggggatcctaaagataataggtttcaaaatcattttgatcctaaatgtgatttggatcttttatctttattcattccatctctcttctctctctcttctgtttctgaaggaatttgaaaagaggaagatgctatgaaagaaaaaaaaaattcctaaaactgtggaatggatcacgtagacatgtaacccagcagcagtttgcttctgttgtccactgattaatcagcctatgtgcctgacactggtcttgcagtacaactggaagccaaaacaaggtggaagatgtcctgaattaagatgttttcaccacattgtattacagagacagccaataaatctactatttgatttcaatatggttttggaggcttattattgttccagtgtgaaggatgaggagagtgggagaaatggaggtgtatttatgtgtgtgtatgttttaatatgttctttttgtttgtttgtttgtttgtttgtttttcttggagacagagtcttgttctgtcacccaggctggagtgcagtagtgtgatcttggctcactgcaacctccgcttcccggggttcaaacagttctctctgcctcagcttcccgagtagccgggattacaggcacctgccgccacacccggctaatatattttttttgtatttttagtagagacggggtttcaccaagttggccaggctggtcttgaactcctgaccttgtgatccacctgcctcggcctcccaaggtgctgggattacaggcatgaggcaccgcgctgggcctttaatgggttcttt

SEQ ID NO: 12025 - DNA, 1669 bp, Homo sapiens
cggcgcgggagaagccgcgcccagccgggctggtagcccagcggggggcgcggcagggcgaggagcagcccgcgctgctcccgcccctcgggtgccagcaccgcccctgctgcggcgggtgaggggcggggcggggcgcggcgtatataaggctaggggcgggcgccgctcttttgtttcttgctgcagcaacgcgagtgggagcaccaggatctcgggctcggaacgagactgcacggtgagtgcggcgccggggcggggggcccacccagggtgtggtcggatccggtgcaccgggcgggcgcgccgcaaccgcgacaggcgcccttctcggaccggacgcaggggccggcgaccacgccctgggaccgagaagaggggtgcgggacgcgcccagatcctcggccttggggctgctcggcacgccttggcgcgagtgccacgtcgagaggcgtcggcggggagcgcggaaggggacgctggcccccaggcccaggtcaagcgccttggtttgcccactaggattgttttaagaaaatggcagacaaaccagacatgggggaaatcgccagcttcgataaggccaagctgaagaaaacggagacgcaggagaagaacaccctgccgaccaaagagagtgagtgtgcctcggtctcccgcgccccagcccagcccctcaccctgctcttccttgcaaacccactcctccaccccccaccccgccgttgtccccggtgtgggcggccccggccactctttcagtttcacaaagcgccttgtttctccccagccccaagcttccttctaaatccccacacctcgtgggtgcctcgcccacaccgggaagcacctcggttgcgggtgggggttgcagctcccctccagcgcccgcttcccgctctccacagccattgagcaggagaagcggagtgaaatttcctaagatcctggaggatttcctacccccgtcctcttcgagaccccagtcgtgatgtggaggaagagccacctgcaagatggacacgagccacaagctgcactgtgaacctgggcactccgcgccgatgccaccggcctgtgggtctctgaagggacccccccccaatcggactgccaaattctccggtttgccccgggatattatagaaaattatttgtatgaataatgaaaataaaacacacctcgtggcatggctggcgtggtctgagtcttttagttgagtatgcgtgggcagtgccactgcagcaaagcccctcgatggagtagagttcctgccgcaaaggggaggaggtgggtcgcagaatgggctgactcggagggagtttttaattttggctttacctgcttctccgtaagatttcatgacttgttagccacttaactcttgctcgtaagcaatctgtgtaaaatttaaccccactttgtccccaggttgcgttggaaaatgctttttcaaaagagcaaggtttgcttttgataagcttcgaaagccccactgtttccctctggcctcctcctagctgactcagaagggaacactgattttaaagaaagaaaagacaatctggaatgttggaaattgggtgaggtcacaaagtctccggaagcctttcttcgggagcttaaaacaaaggcgggatctagggatacagcaacgggaacgtcaga

SEQ ID NO: 12026 - DNA, 1085 bp, Homo sapiens
atattacaaatgtaaacaggtacctaagcactccttgatcacgtgacgttgttgaatattttaggcacactttcttttggagtgcagtggcatgatctcggctcactgcaacctctgccttccaagttcaagcgattctcctggctcagcctccggagcagctgagattacaggcatctgccaccatgcctggctaatttttgtatttttagtagacacgaggttttaccatgttcaccaggctggtctcaaactcctgacctcaagtgatccacccaccttgtcctcccaacgtgctgggattgcaggcatgaaccactgctcctggcccacactttcttttttacattattgtatcgtacgattacatttttatatgtttaaaaactaatattcctcaatgcaattctaccttatttttcagatttatactatggtggggaagctttctctgtagagcagccacagtcttttacttgtccctattgtggaaaaatgggctatacggagacatctcttcaagaacatgttacttctgaacatgcagaaacatcaacagaagtggtaagtgaagcagcaaccttatgactaaaatgatgttgtaaagtatattatttctaacattaataaagctaggtcactgtcatctgcttcctgctcagtgtaatgataccgtttgcatagttattaaaatcatcttttaacagcaaattttatacatcatgggaggctgcatttttgcaaaataatacctcttactgtccacactgggtttcttaacctgtagctaaacccacagcatggagtcttgaccaaattcaggagccctttattcaatgcattgtgaaaggttaaaaggatggcaacctgcagtgcatctcttgttatagtatccttgctatctgcttaacttttcttctacaaggaacttcacaaggaaatttaaaaacctttggtagtatcataataatccattgtcacatctcattgtagcatatcgctgatcttacctggttttcatcagatcacatctcttgcttcctaggtcaagctctggggtccctagaagttcttcctatcctgat

SEQ ID NO: 12027 - DNA, 1167 bp, Homo sapiens
cttacactcagctgtgtaagacggttgaggctgctgggaatttttcttcgtgataaatgtcatgttaatctatctgtgtgtcttatacaagaaatgcaaatctgttttctgcttagcagcggcattggaaagaagcttgaagacagagtaaaactaataatccaaaaggaacctttgatgtgctgaatatacattcagtattgttcctttttcattataggtggtatttgagatttcatgagctatatagagaaacttttttacctcacacacccaatacacacacacacactcacatgttgccttacatttgagtgtctttttagggttaatagccctcatagatagagttgggacatttgcactttaagttaaatgtgctgtttttaaatgcttacaattcaggaaatctttacatctgtctagcaaggactcaggtgattttttttctttctgtgaaatactttcgtttttttcttaacttttgggttatgatgaatcgagtggtgttcgacatgtacgtagaatgtttcaccctggccggggattaggaggtcctcgtgctcgtagatcaaacatgcactttactagcagttctactggtggactttcttcttctcagagttcatattctccaagcaatagggaagccatggatcctatagctggtaagttagtttcacattaataagggaaatggcaggggaaggaggagctccttttaaaactttttgtgatgccaggtgcggtggctcacacctttaatcccagcactctgggaggctggagcgggtggatcacttgaggccaggaattcaagaccagcctggccaacatggcaaaactccatctctactaaaaataaaaaaattagccagatttggtggtgggtgcctgtaatcgcagctactctggatgctgaggcatgagaatcgcttgagcctgaaaggtggaggttccagggagccgagatcgcaccactgcagtccagcctgggtgatggagtgagaccctgtctcaaaaaaaaaaaaaaaaactttttgtgagatttgtgttcttaagtctcacctctctgatcataagccatgttccttcacaaaattcccaaatacattaaaagtgtaaaatgtgttaaaagcagacacttaacataaagtaattcatact

SEQ ID NO: 12028 - DNA, 2343 bp, Homo sapiens
cctgtaaaacttcacagtggagagcactgtagaaattggccatgccattgttcattgactttttaacaataaggtcttttctttttaacttacacaggttgaatgatcctaaaatgtctgaaacggagcgccagtccatggaaagcgagcgtgcagaccgcagcctgtttgtccaagagctccttctgtccactttagtgcgtgaagagagctcatcctcagatgaggatgatcggggggagatggcagattttggtgctatgggctgtgtagatattatgcctttagatgttgctttagaaaacctaaatttaaaagagagtaataaaggaaatgagcctccaccacctcctctttgatgacatcccaattcgcagacaatgtcctctgtgctgtatttgccaatgaaagtggacaacaactatcttgggtttgtttggtgattgtaatttcaggtctgtcactcttgttacattgtgtacattcaaaaggaagagagaaaatatatatgataatcatttccacttaactaatttttacttctagcaggtaaatgtaggtagcagtgcaggggtgatctctgcttcctgtaccttgacatgcaaaaggctctcctaatactccacattcaaactgaagaggaaaattgaaatctctaatgaagctgctgtgtgtatttatgaatattaatgaataaaaactgcttggatggtttaccttaactactgcatgaggttttttgcagcgtgcatgagttttagtgaccttgttatttaagaagttaaatacaaggagtaaaacttaaaaaaaaaatacaaagcccaaagctttcccaaacattattcaatggttacacgacgaagtagcttttgaataatgtctgcctgaatcacctttctttgtgtgcctcctacgcacaaagccagctctgcagtggaatctggggattatagccgggtgtggcactccgccctgtgtgactgtcctgtcgccctgttagtcatcttgcctgtgtggagctcagcctgtctctttaactcatctgtagaagacacaccagtaaagctactgttggaatctgctgcaggggcctttgtgtgccctaaaaacaaatcctgttcatgtttgtttaaagtttttactttttgtggttgtttaaaattttttcaattgttaaatatgttttattcaggtgtagatgaatttcatttattgactgttcaacagagttaacctgaattatgttgtctttgtttttaaaaatctcacattctcaatcatattttgcattatttatgtatttgctttgtagtttgctgagacagatcagtatcaggggagctttgaggatttgccttcccagatttgtcagtatattacaaccaaattcttaatgctaattttagcaccttttatttattgggttttttctggcataaaaagtaaagccttttaattgaatcatgccacctatatgcctatattattaatcctatgtgtaaaaaaaatgtacagctttttttgggtttgttttggggtttggaagggccgggttattttttatttcctgtttcagtttttgtgcatagactttcacaatagctccaaggcagggacagcgggtttgggggttgggagggcagtttttggaatgtaaatttaggacttttaaaaaggtgcgcacagcttctgataaatttataactagacttaacctaatcatgtctcgttccagttctcttttctctgagcccttttcaaagtctcctctctttctcctgtcatccttttcctttcctgtccgtgtatctccgtttcttcaacatgacaagcatacagacttgaacacccctccggtgttcttccgagaactgtgaagtccatgttcatccaaatgtaaccaaaaaagaagtcaccctacatgtctgaaaaactgttgcttctcctctgaaacttcaaactccaacgatttccaaatacaatagctttgttttctttagttctgtaatggataatgtttaaaggaaaactttacaccaggcttctggttacactagaagtcaagcccattagggattttcattttttttcatttggttgttgagaagtttcaaaaatcagttttcaagctgtggtctttcaaacacatctgcacataagtcacacatttcaataaagcattttcaagactgttgaccacttgaatttctttggtgttagtggattaacctaaccattactctgagattttatatctctaatccagtattttttttctttttatgctaaacatgggagatcctggttttgtgtgaatgcattattttggatgtgagaaataaa

SEQ ID NO: 12029 - DNA, 1211 bp, Homo sapiens
ccaagttcaagcaattctcctgcctcagcctcccaagtagctgagattacaggcacgtgccaccatgcccggctaattttcgtagttttagtagagacagggtttcaccatgttggccaggctggtcttaaactctagacctcgggttatctgcccatctcggcctcccaaagtgctgggattacaggtgtgagccaccacgtccagcctagtctctttttttaaatgtactcttaatattggtgattctgttcatcaatccccctacttaatagttgtataattttacatgataattgctttctacataaaattaatatttttcatgcttatattttactctttcaacaaaaaataagcatatatatatttctaccaactgatacatttcaagagataagggtcacaaggagattttcactcaagttgcacgtggaatgtttacctgtttttgaaagggcatgctcagataatgacagcagatttgaacaatgcttcgtttccttagttctcacattgctacatggatgggatatgttggtcacctatgtgattacatcatcatcaatcaggcagaagttcagtccttctgaagattcatgctaaagctggataacagatttccattgactagtataggctgaagccatactttgatgtattcccaggatctacctcatagttgcaaagattaaataaggttgcatataagcatgtagaacagtgcctggcacacacagcaagggttttgttaagataaactcattatctgttttagtggtcctgggtttcatgatcttgctagcctttataaatttttttttttttttttttgagatggagtcttgctctgtcacccaggctggagtacagtggcacgatcttggctcattgcaagctccgcctcccgggttcacgccattctcctgcctcagcctcccaagtagctgggactataggtgcccaccaccacgcccggctaattttttgtatttttagtaaagatgggatttcaccgtgttagccaggttggtctcgatctcctgaccttgtgatccacccacctcggcctcccaaagtcctgggattacaggcgtgagccactgcacccggctagcctctataaaatttaatctctacactgcactattcctaggacactaacttatgtttaattttggattgctagttttctagaatacatattctta

SEQ ID NO: 12030 - DNA, 1135 bp, Homo sapiens
atgttgggattacagatgtgagctacggtgccccaaagtgctctttttgttgaacagtgtgtgagcccagctacctggagggtgtgtctacctgcctgaccctcagccatcgcagcctcatgacggctacaccccgcacattatcatacccctcaaatgtgccttccaaccccacacagatttcttgtggttcccatcctggtgaatcttctcagttatccacattacagacctcagtggaatcttccacaccacctggctcatgatggtctctgctccttgcctttcacgttcttcagaggctagtgacttcctaaagtgaggattgaggaaataacaaccacgataagagttacagctgaccctggagtgtttcctgtgcaccaggagcccgttccaagtatctgtatttattcactcgtgtcatctgtagcagccccaacacataggttaggacctgtcactagtcccatttataggtaaggaagctgaggtgctgggaggttgcatgatgtgccgagcatctcacagccagcaaatagcaagtagctagaccgcttcctccctggcaggtctgaagcacatgattcctagccccagccttcctaagggcccctaacagacggtggccttcccctggcatccagagtggctctgctgactggagcagtcaactgtttctcctctgcagttcctgaaggaaggagaaaagggggaggctggtgggttcaggtttcgtagacctaagaggccagctgccctgtgacccctcctgagttggggcttctttttgggggattagggaggagagttataagagaaagaggtgcggagagcagggagcacctgagagagggctggaagaagtggtaaatagatggacctgcccaatgagagtagccagcgtgtgcatgtgaggggcaggtagcacagagggaatgtattccttgtctaacttggcatatagccaaaagctaggtgtaagttagtaaactacagccttcaaaacagcccctgggaaaggccctgctttggagggtagaaggacatataggaggctcccagaggtacgggtgtgcctccctgctgggcatgggcccgcctgctgggggcagcagcaaaaggaagcaagtag

SEQ ID NO: 12031 - DNA, 1209 bp, Homo sapiens
tagttctggtggaacatatccctgagtttttgcacactgggcctccatccaggccttttcctgggagagtagaaaacccatgggctctgtggggtggggaaaagccctcagttctgggtctggaagcatcatcagttgcagccatgagcaaggttttgccattctgtgcctcagtttcctcatctgtgaaaaggtgataacattatttctttatcccactatgttgttctgaggattaagtgagtttgcagtgtaaagacatagacaaagacatagggacagagaaaggtaacatttgttattgttgtttttctgtagcatttgtgtctaatgcagtggactgtgtgcccaataaatgagtcctttaaattaatgatagaaagagaagtggggaaatgggttataagcagtgatgtactggtaaatatttaacagtcagctcctggtggggaggattgtgctctgattagtgtttgccaatttccatgatgtaaatactctccctgtggctgatttcaagctaccaacgtgacatcactgaacactgagtttgaaggagatgccagtacaccagtgccagctgctctggtccactactggaaggcatctgcaatagaccaaagccataaggcacccatcacccctggccttctcaccttgccacacacaggaattggtaactgggccttttaaaaaagcactcggtaatatattaaatattaaacatagactagctcaaaagtgagaattttttttttttgagacagagtctcgctctgtcgcccaggctggagtgcagtggtgctatctcggctcactgcaacctccacctcccgggttcaagcgattctcgtgcctcagcctcctgagtagctgggattacaggcgccggccaccacgcctggctgatttttgtatttttagtagagacagggtttcgccatgttggccaggctggtctcgaactcctggcctcaaatgatcacccacctcagcctcccaaagtggtaggattacaggcgtgatccaccatgcccagccgaaaaatgagatttttaataagcctggctagctttgtattacactattttgtgtttcgtgtatgttaaaagctcccaagttgtgccgtcccctgcaaagaaagccctgaatgcacagaattaggcacatcttgaggacagataacctttgagagacctttcagagcca

SEQ ID NO: 12032 - DNA, 1196 bp, Homo sapiens
gattgcttgagcccaggagttcgagaccagcctgggcaacatagtgagacctcgtctctacaatacaggaaaaaaaaaattagcagggcatggtggtgcgtgcatgtagtcccagctacccggtggggactgaggtaggaggattacttgagccctgggaggtcaaggctgcagtgagccaagatcgtgccactgcactccaaccccggtgacagagtgagaccctatctcaaaaaaaaaaaacagacaaatagaccttgtacgtgaggcctggccatttgttaacccgtgtgaaagatgtttcggtggccatttaatgaacatatgttgaataatgtgctgtactgtgtaccacagatacaaaggggaaaaagatacagaaggaaaaaagaaaactcagtatcacatactcagccccttctgatagaacaggtgtgtccaagcagcaacatcctaaaatagttgtcctccactctgggatgtaaaagaagttcttctgggatttggttttattacaatgactgagaatttgctctccctcagttatcatatctactgtgacaggccttgcacacgtcctgtgagatcctacctgccaagaacctgtctgccatttctcattagtatctttgtggtttgcagtcacctgtgtagaatttgcacatatactcaagtgttatttgttttcaattacttcctcaattattgctggtgtgtgtgtgtgtgtgtgtgtgtgtgtgtgtgtgtgtgtgtgtgtgtggtatttcatagccaaagctataaaatgtatttccaataatattagtagaattttttcagcccctaaaacccaccataaaagttaactataataacaaggcccgtaggcctgtacacaagggcatggtttctatcgaagtgtattacacaggccagacctctggattctccacctccagtggctgctgtttaaagcaggcattaaaaggaagatcattttcatgtttgtgatttgaagcatgtgtgtgctcacgaaggatacctccctggacaatgcctggaagaggactttgtgaagtggagactgtacatgattccaccagcaagcatgtgtcttgacaaaggttgttaaggacaagaagttgtgccttagctgtaaccaaaacccagcctaagcaatcaggtgagttgaagtagatgttgtcaaagctaaaaag

SEQ ID NO: 12033 - DNA, 3000 bp, Homo sapiens
taccatctctactaaaaatacaaaaattagctgggcatggtaatcccagctactactgaggaagccgaggtgggagaatcgcttgaacttcggaggcagaggttgcagtgagccaagatcatgccactgcactccagcctgggcaacagagcaagactccgtctcaaaaaagaagaaaaccaccaccaacaaaaaacacatgtaaataattcacaacagtacagaacagtatgaagcagaagccaggattcctctctctccatcaagtgtatatctttctagtgttaggtttcatttcaaactttaaaaatcattttgtgtgctattttaattaattgctgtttctgtggtggtgggtcagtatgtcttaattctgaatgttttccctgcacctcctaaaagatcttttttcccctaagtcctaacagaatggtatattcctctggaaaaagatgaacgtcaccaatggattgtgctgctctcgtttcagctttgatttttttgtccttgagaaccttgtcctccctgctgatttgtttctaaatcaaaagaaatgaagaaaaaagtactgtgacctgagagacaccctcctctagaatttagtggcgggtctgggctggcagaggtagggggctgctttgggctttgcacctgcactttggtgacattgttcttctgtgttccctttatttatgctggtggcttccatccgttcctcctctgagggtgagtggaggggtatatggaaacacggctatgaccaaagggagatcccagcctgggcaggctgcgctgctgaccaccctccctggggcccgggctctgtaggaaagttggtccttgactgtggcattgcactctgcactgtttctctctgcagacctaggggaaaactgcaggtggaagtgcttttctactaaggcctcttactttgggggggatgtgccctacagaagacatagaagatggggaaatgccaatgggcaaagagctactttgaatacataattctcttcaaagacttcagcagcaaaccaaaacagcaggttaaaaaaaaagatgcttttttgggtgcaagtctaacctgtctagcatgagatcttcttgattttctgattattttatgtagcttgagacaaagtgaatcaacttccacttagttgtaccgagcataaaacagaacttgggcttcctggcagtgaggccactgtcccatcacagatttttaaaataaatatgatttgaagtagtgtgatctttcacacaatcatactcagtaggaactttttgaaatagggcaagtttatgtttcatgcgagaaaacatgaaggagggttttggttttggtctgcagtttttccaaagggcttttatgagatacatttcccacaaagtccattttgcctttgttgcctaaaacagacaaaatagacttagatttattaatagaaactatactctctgccaattttacctcagtgtatttaatggtcctttaatctgatataagatgccaagggtatttgataaaaattcttcttccatgccatgtcaggagttaatacaaatgaagaaattccgtgggttcccctgggataagtgagggtagtgtcttggacaacactattgtttgaaggtttatcttttctaatcatgctctaccgcattgtagagagcctaaagagagttgtttctgagctgatctcagggaaatacaaataacttgggagatgagggaaataagatgaattctgtgctgtcaaggcagtaagtctgaagaaaggaccatgcttcttatattatcttccaccttgcttaaaacagcccatagctttgagttgacattttcattcttggcggatagcctactttatgaaggtaaggaatgaactcctacccttcttgggtcattctctgtactgatgcgttagtcttataatactttgcaccaacctgaggaatcttctaggcttctctagcatcccctaagactgtggctatttcacgtctctctccctgcctgccttccttttcccttcctttcccctcctcatgttttctggttgtgcccatctgtaccagctcctttccatccaccttcgtatgcacccagatttttctgttcccatctgtcctatttgttattcatcccgctgctcaacttctccagtatgttgcttcccttaagttgccattcattctcttcatgacttttactaactcacttcggtctctgtctgtcaactaaacttttctaaaggttaccagttatccaatcaccaaatccatggctttttctcaaagcttagtcttgtccttggcagaactggacactattgaccatccaaatggaaattcccctttcttggtgtctctgacaaatggtcctttgccttatcttgtgctggtggtgaagaggccctcaaagccaggcctctctattcctttgactgtctcctcagccattaacccattcttcatcctcggagtgagtgattcccaagtctttgtcttggcttaatccctaaagaacccagttctgctggtatcgaatagttcagcttggttgtcattgaaaggaatttctctcttctgtccatcagcctgtccctcccaactgtctaggacagtcttcggtcacctaaattcctaactgcagacttttgccctttttctctctcatcaccaaagtcccatccatttttttttaataaaagatcctcagctacagtctttccattttccttgcttctcttattgcacacccccagcccattttgcttctctcttggattttgttttttcagatccacatttattgggtttcctgtccagcttcttggaaaggagctcactcttggaaagactgatctttccaaaatattttccctggtctgaagctttggtgtgaacttctcaaggcttagagaatccagttacagaccttttggggttcaggatgctatagattgacaccctcctgcctgtttttctctgcat

SEQ ID NO: 12034 - DNA, 1231 bp, Homo sapiens
attcgaagcatgtttcctagagattgtgtggatgagggtgagctggctgaggcatcactcaagctaggggtggtgtgtaagaagcacgaggagccacaagaggcacctcctatagtcagctaagggcttccctttctgcgcccagcttttggttgaagggtgaatttttttttttttttttttttttttttgagacggagtttcgctcttgcccaggctggagcacaacggcacgatctcagctcaccacaacctccctggttcaagcaattctccagcctcagcctcccgagtagctgggactacaggcatgcaccaccacgcctggctaattttgcatttttagtagagacggggtttctccatgttggtcaggctggtcttgaactcccgacttcaggtggtctgcctgccccggctcccaaagtgctgggattacaggcgtgagccaccacgcccggtgaagtgtgatttctattagacgaatctgtggttcagtcatggatgttaatagaggaacctgttttcctgctacagattcctgagtaaaattgctgtaagagtccacttctggactcagggcaagtcgaagaccagtctatgtagaaaggctgaggcaactgggaaagacctgacagctagttacatatattctgacatagtccccccataatggcttttagtgacacatgtgctgatagaattctaaacctctagaattcccctgctggtgatgctggtgtcttcttttgtgcttgactgtacagggtaaactgatgcagaatgctgcaagtgtgatgagagctagaacgctgtgaaaactcttgctaggaaggttgggctcggtgtgacttgctccagtaggaatcctgggtagagatttttagctgcaattaaacggtacatccagagccaagggtgactctcaactcaggtagttctacaggtcaggtgtgaatttaccaaatctcccaatttgtttatttgttttgttttgttttgtttttttagaggagggtctcgttctgtcactctggctggagtgcagtgatcacagctcactgcagcctcaaactcctgggttcaaacaatcatcccacctcagcctcccaaaatactgggattacagacatgagccattgtatttagccaaatctcccaatttagaaactcctctgtaaagggtttgggtctgagctatatgtttggtcttttttgtttgttttgtttt

SEQ ID NO: 12035 - DNA, 1321 bp, Homo sapiens
gacatcagcagtgacacactcctctccgattatgtgggctcggggcctcccaagggcacaggtctccaccgctatgtctggctggtttatgagcaggacaggccactaaagtgtgacgagcccatcctcagcaaccgatctggagaccaccgtggcaaatttgaggtggtgtccttccgtaaaaagtacgagctcggggccccggtggctggcacgtgttaccaggctgagtgggacgactatgtgcccaaactgtacgagcaactctctgggaactagtgggttagcttggggacctgaactgttctggaggccccaagccatgttccccagttcagtgttgcatgtataataggtttctcctcttcctgccccccttggcacaggtgagacctgaccagtcagatggtggttgagggtgacttttcctgctgcctggcctttataattttactcactcactctgatttatgttttgatcaaatttgaacttcattttgggggatattttggtactgtgatggggtcatcaaattgttaatctgaaaatagcaacccagaatgtaaaaaagaaaaaactagggggaaaaaaccaggtctacagtgatagagcaaagcatcaaagaatctttaaggaaggttttaaaaaaaaaaagattggttgcctctgcctttgtgatcctgagtccagaatggtacacaatgtgtttttatggtgatgtcactcacctagacaaccagaggctggcattgaggctaacccccaacacggtgcatctcagatgcctcaataggcatcagtatgtcgctctggtccctttaaagagcaatcctggaagaagcaggagggagagtggcgctgctgttgttgggacatggccatctagaccggcagcagcgctcgctgacagcttgggaggaaaccttagatcggtgtttgttaaactgatcattcttcacgggagtaagaaaagctggtctggagttgctgaacattgcattaattgtgctgtttgcttatagttgaataaaaatagaaacctgaatgaaaaaaaaagttacaaaaagtggccatctaccgactgggcaaacaaaaaagaacagtttcaacactcagtcatttattgcacatggagtctgatgaattaaaagaataccaatcagagtgtccggggctggcgtgttggcagtttgaagtaccatacagctcagggctgggtgctttggctcatgcctgtaatcccagcactctgggaggccaaggcaggtagattgcttgagctcaggagttcaagaccagtctgagcaacatggcaagacc

SEQ ID NO: 12036 - DNA, 3127 bp, Homo sapiens
tatttgctgaatgaattcagaataggcaacctaatccacttggaaagcactaggcgtaaagtaacttaaatcctgtaatttcagggtgatgctggtttgactggacgcaaaatcattgtggacacttatggcggttggggtgctcatggaggaggtgccttttcaggaaaggattataccaaggtcgaccgttcagctgcttatgctgctcgttgggtggcaaaatcccttgttaaaggaggtctgtgccggagggttcttgttcaggtatacactctttatataacgaacgattaaaagtcatgtaagtgggagggtatttagtagtaatctacttaactacttgttttataccaacgtattatacaagtatatgggtctttgcaatcactgattcttacgacatttgaatccttttaggtctcttatgctattggagtttctcatccattatctatctccattttccattatggtacctctcagaagagtgagagagagctattagagattgtgaagaagaatttcgatctccgccctggggtcattgtcaggtaaagatggtaaagcctgttgctagtcaagtattgagggtgttgggtgtgtgtgtatatacttaaggctgaggaggtgaaggtgtgaaggaagactcctcaaatgggaatatattttaattcctggaacagttttgaactgctgccttagtgaagacttagttatttgagaaatttaaaattacggtgctccatggcttaggctaaccactctagagaatgttccagatttgatatttgagctttgtgctcttctacttaagggtgttaagaaaatagagataaagtgggttgctcaaggtttgttgcaatgtaaaaaccatggtagggtgtgggcggcgggaccttggtaagtattgtgtgatctcaggtgagctttttgacaattgaaatttctcagaataatgacaagttttcgtatttgttgagccagggacggaaaaacaactatagttactaataaggactgtgcaaggagtttggacaccagggaagtaacacttttgccacaaatttttttcctagcatatcccagagaactcatttgccagagctcttgaaaatgagtcttgctgattgttttgctttattttaatttaatgctacatattaagttacggacttgtatattccagggatctggatctgaagaagccaatttatcagaggactgcagcctatggccactttggtagggacagcttcccatgggaagtgcccaaaaagcttaaatattgaaagtgttagccttttttccccagacttgttggcgtaggctacagagaagccttcaagctctgagggaaagggccctccttcctaaattttcctgtcctctttcagctcctgaccagttgcagtcactctagtcaatgacatgaattttagcttttgtgggggactgtaagttgggcttgctattctgtccctaggtgttttgttcaccattataatgaatttagtgagcataggtgatccatgtaactgcctagaaacaacactgtagtaaataatgctttgaaattgaacctttgtgccctatcacccaacgctccaaagtcataattgcattgactttccccaccagatgctgaaaatgtccttgtgatgtgcacgtaaagtacttgtagttccacttatagcctctgtctggcaatgccacagccctgtcagcatgaatttgtaatgtcttgagctctattatgaatgtgaagccttccccttatcctccctgtaacttgatccatttctaattatgtagctctttgtcagggagtgttccctatccaatcaatcttgcatgtaacgcaagttcccagttggagctccagcctgacatcaaaaaaggcagttaccattaaaccatctccctggtgcttatgctcttaattgccacctctaacagcaccaaatcaaaatctctccactttcagctgtcttttggaggacgtacgtaataaggttttaatttagtaaaccaatcctatgcatggtttcagcactagccaaacctcaccaactcctagttctagaaaaacaggcacttggcagccttgtgatgtcatacagagaagtcacagggcagtacctgagggtctgtaggttgcacactttggtaccagataacttttttttttctttataagaaagcctgagtactccacactgcacaataactcctcccagggttttaactttgttttattttcaaaaccaggtccaatgagctttctgaacagctggtgtagctacagagaaaccagcttccttcagagagcagtgcttttggcggggaggaggaaatcccttcatacttgaacgttttctaattgcttatttattgtattctggggtatggcgtaagtacagagaagccatcacctcagatggcagcttttaaaagattttttttttttctctcaacaccatgattcctttaacaacatgtttccagcattcccaggtaggccaaggtgtcctacagaaaaaccttgggttagacctacagggggtctggctggtgttaacagaagggagggcagagctggtgcggctggccatggagaaagctgacttggctggtgtggtacagagaagccagcttgtttacatgcttattccatgactgcttgccctaagcagaaagtgcctttcaggatctatttttggaggtttattacgtatgtctggttctcaattccaacagtttaatgaagatctaaataaaatgctaggttctaccttaactgtgtctgttactcatttgttaaagtgctttggggccataggtacgtgcctataatcccaacactttgaaaggctgaggtaggaggatcactttaacatagaagttggaggctgtagcgaaccattatcaagccactgcactccagcctgggtgactgagactttggctcttaaaaaatgctatcatatgaataacctgagaatactatatgtgtatctttaaccttgaattgtaatccataattagccataattcaggaaaataacctcaatccctagacccagtgggtgggcattttttaaaagcctaagcaagatttagtcct

SEQ ID NO: 12037 - DNA, 1255 bp, Homo sapiens
aaaatacaaaagttagctgggcgtggtggtgggcacctgtaatcccagctactcagtaggctgaggcaggagaatcaattgaacccaggaggtggaggcagcagtgagccaagatcgagccactgcctgagtgacagagcgagactccatctcaaaaaaaaaaaaaaagtatggcctgtgggctgcacttgtactcttataatcttgttccagtgggaggagccactgggtcactcactctgccttttccccaacagtctgagcacttcaagacgacatcgcagaaggtggctcgaaaattctggtggaagaacgtgaagatgattgtccttatctgcgtgattgtttttatcatcatcctcttcattgtgctctttgccactggtgccttctcttaagtaacagggaacctctcccacctgcccttctcttcagggacaaccctccataaatgtgtgccaagagggtctcctttcctgtcttcctctacagagaatgctgctcggtcctcctacccctcttcccgaggccctgctgccatgttgtatgccccagaaggtaccttggtcccccggaaggagagaaaaaagagagatggactgtggctgcatttcttgggtccttagagtgggctggagagacctagagggcccagcatgtggctgggaaactgttggtggccagtgggtaataaagacctttcagtatccctatatgtgtgaggcactttctctcttcccattttgcctttggcttttctatttcttttcttcctgaggataccttctggctaaaattctctcatctgaggtccaagttgttggaagggcaaagagtatatgtttggagaagaaagttggagcccccaccctgtctttattcctcccagttccattcattgtcacaggtctcaagaacaagaattttctgggagtcttggcatatggaaagttcaaaaccttcatagcattttggggtggtatgcaagatttttaagtgttcccattgggtcctgccatggccctgtagtactcttcttctggaattgttagctgaggcatgaagctggttgaaatcctcctgcctcttccaccagagccatctctcttcaacgaccctgtagtctagagccgaggggtggaggaaatggactgctattcctttccttgtgcttctgcatgttttatttgtcttttctctgtccttgtcttctgggacttagcaaggcctctgggtctcagttgtcctgaggggg

SEQ ID NO: 12038 - DNA, 1132 bp, Homo sapiens
agctgactcccacacagccaccctgctggctggagcctgaggaaacctagttcaccacccgcctgtctgttcctttctgcccctcagaaggggcaggagcaccacagcgtctgggggaagctgacaggctcgctgggcagggccagggctggaggaaggcctcaactgtgctctcctcccccagtggccctgatctgcctcctgcgctacgggcagctcctggagcagagtcggcactcttgggttaacaccacggcactcatcacaggctgcaccaacgctgcgggcctcttggtggttggcaactttcaggtgcttccccttctcccctgcaaaccttaaactttacctaacaaggcctggctgcctgcagtgtggcacctcaaggttggggctggaaagagggagaggaaggaagagggagagaggagattcattgaaggaggggtggagaggtggggccatggccacatcaccaactggcccttctctgggcccaggtggatcatgccaggtctctgcactacgttggagctggcgtggccttccctgcggggctgctctttgtttgcctgcactgtgctctctcctaccaaggggccaccgccccgctggacctggctgtggcctatctgcgaagtgtgctggctgtcatcgcctttatcaccctggtcctcagtatcctttcaggacggggcagccaggaactcatcctctagctcaacctttctccctcccaagaggatggggggtggaggcctaacactgccatgtgggggagaggactaacacctctccctttggagaggtgaggcctgagactgcagaaggggtgttgccaggtttccgtatgtcctactgaacatttccttagcctcgttttaggtggagtcttctttgtccatgagagttctcagctgcaacatggggcagccctgtgtgagtgggtgtgtgtcatcgatatcctcattttctatggcaccttcagctacgagtttggggcagtctcctcagacacactggtggctgcactgcagcctacccctggccgggcctgcaagtcctccgggagcagcagcacctccacccacctcaactgtgcccccgagagcatcgctatgatctaaggtct

SEQ ID NO: 12039 - DNA, 1488 bp, Homo sapiens
ttagttttgcagaagtgtgcggtctggtttcgaggaggaagaacctagactcatcagggaggctggctagaagtcgaccacgaagtgctccccagagccccaggcagctttgtgaccccacagcgctttctacttgacgtttgttttagtgccggccatatcgctttgcctgtctgtcctctccattggattgacccatggagcacagagcatctctgtcttctctttatgtaactgccctagtacctggcaaaagaaggaagattgagacaaaagccatagctttgtaagaagaaagtgatacctctccttctagagataacttttttctcctcagtggctgtagccactgtagcagatttccaaatggggtatagcagatttgtaaatggggtgacaagttgtccatggcctggcacagaataggtatttgataagtgtctgttgactgaatgcctcctagacttcagtttgtgttttcatttcttacagatttggaagaggcgagataatgatgaaaccaaccagcagggggcttgaaggaggcgtctagggctttgctcccaagggctgtggctgatgatggtaaataagaacacagaagctgtagctgaacacaggctggctggtgggcttcctaggccagcccagcttgtatgggttctggctacaccagagcaccaagagcccacttgcctgggatggccccacactgtcactcagctgttctttgatcatttttttctagattgatgctcctttctcccatgcattgagctcccatctagcttcagcagggcagaacccttctccagatgtgtgtaacttatgtcttgagtatctgggagtagttgaagaacagataattccttccaaacatcaagccttgggattcttggagcaagcagaaagccagtaacttcgctctgttagaggtggaggattttcctatggttccccccatttcctgatttgtatttttagatggattaaatagtctcctgtttttaaaccagcctcttgttttatatcttttcctttggtggttggctgaggaaaatattttcctttttaatcttcacaaactctctaccctacagtctgacatctggtgcacatcacgctcgccctttcctgtcagcttgtgggtggtgtgtcagttaggatgcatttgtttctaagtaaaaaaatacctgagtcaaggggatacattattattgtgcttaactagagggccagaggtgggcagtttccagctgcagtgcaggaatgagtaagggaagaggaaaaaaaggaaataggaagcgcttctcactacagtgcaattctgaggtggtctcagccagtccagtgtggagccccagggcaaagattccgtcagacaattcagcagaaatggctcccatcaagctcagtcgtgggctctagcagcctagaagaagggtggccttggcatgagcactgtggcaggtccaaagatatgggaag

SEQ ID NO: 12040 - DNA, 1298 bp, Homo sapiens
tgctcatccttcgtctagatcaccactgtccagtggaaacataacctgagccacttgtccaattttatattttctagtaactacattttaaaaattgaaaagaaacaggtagatcaaagtttcaatttcccaaaaagtttccatttctaaactcttatgcacctaataacacagctgcacactatgtaaattattaatgagctgctttatattctgcttttcacagtaaattcactccctgcccccacaaatgaacccacatgctacaaaacatagatatgacaaaaagaaataagtgctttcctactcactttattctcatctattgtagacatgttatatatactaactaatgtaatgttcaccacagccctcagtgtttggtaccattgtcatccccattttataaaggagggtattgaggaacagaggttaagaagccatagggggcagagctgggttcagactcaggcagtctggcctagaggtggtaaatgaggctgtcgtatccatgtctttgtggtctgtagtgcattcccagcctgccccttggaacagctactggtgaaattggcgagggtgatcttaggggcctgagagatggctccatcctgtcaggtgagtgggctcctgggcagtgccgtcatcacttccctggagctccacagcagcctcttaactggtcctgcttcgtgagaggacttccccatctccagtccagcctcgagagaggtctccaaaatccaattccactttaaaccacctcaccactggttgctcccttttattcttagagtaaaattgcagccccctgtggcatggactgcttgcttttctagcgtctcagggtgctgtgccctcctgggtagaccctttaggcacactgcacttggcgttctttaggcacgctgcacttgacattctgccatccgtccccactgtccctgctcccgaggcacctgcctctcccatcccattccagttcctattcaggcctgggcagaaacgttctttcctctgggaaccctttcctaagacacacattgtattagtccgttttcacactgctgataaagagataccccagactgggcaatttacaaaagaaagaggtttaattggacttacagttccacgtggctggggaaggtctcacaatcatggtggagggcaaaaggcacttcttgcatggtggaggcaagagagaaggaagaagaagcaaaagcagaaacccctgataaacccatcagatctcatgagacttattcactatcatgagaataacatgggaaagaccg

SEQ ID NO: 12041 - DNA, 2294 bp, Homo sapiens
tctgctgactgctcccgtggtcactgcttaatccctcctaattttacctcccgtttgacaggcatcgcggtcgaccctcgccatctctccctggttgctgattatatgtgcttcgagggtgtttacaagccactgaatcgctttgggatccggtcaaactcttccccgctacagcagatgacatttgaaaccagcttccagtttctgaagcaagccaccatgctgggttagtgcgtgggcaggagccctggcctcccctctactgacgactctgggcacacgggctcacccatgggcatctttccatggttccttgcacaccagtgggatcttgggatctgaggggagcgggggcggctggagggggctgaacagcagacacgacagctgcctctacgctttgaaggaacaggaagagggccttcccctctcaagtgctagaggggggctgcctcgtgatcccatcagcttcagagactcaggacccacctgagtcccgagacttcagtgttcagccccataatcacctcatgacattcccaacttctacctcaacaccctgacacatgtttttgtgtctctgtcaggatcccacgatgagctgaggtctccttctgcctgccttgtggtcgggaaggtcgtcaggggcgggacaggcctgttcgagctcaagcagcctctgagatagcagctaccccggcaccatctgcccagctccaaggacccttggtgagggcgtggcccagcctgccttctgcatgagaggaccaggagactggaatccagggcagttccaagtgacagtacagagcacagcagcgaccttgggcctgaaagcagtgggcctctgagctgggccagcttcacctggaaagtgacagagttgctcatccttgcccctccctgtctctggatttttatcaaggtttaccaagtcttctgagtccccctgagatggctggggcctcacctgtgctgcaggaggcctctgtggcataacccctaaggagaagtcctgattcacgattcactgagaagaccaaggggaagccatgctttgctgctggggaccccaggcacctccagagtagggaagcggggttcttttgctgtgagtggccagggacaacagacaagattcctgggggctcccgatgagcaggaacgtggagcctgctgcccaaggcctgctccttccggctgctccagcccctgggggcagagtccacaaagagtccccatcaagacttcttccctgagtcaagtacagcgtagcatagtcctccacccacccaacctctctgcctggccagggtcctggccctgccactgtgtggcgaggtgtccttctagaccacatcagccccaaggctgggagcagtcgctccagggccgcagcagttcactcccacacatagaacccaggtcactgctggggcgattgaacaggttgcctggcttttctctgctgtcagtttggtgtggaggcctatgttctgccccatacaccccacaggccctgcttatgggaaggaacacaggcctccagcccagaggactgtgccgccctgttcttggccgtccacgtttcctctccctctagcaccagcaatacatttccctggcatggacagaaaagacagagaggacttatacaaaggctttgtaaaaccagaggctagcttctatctttgtctactgttatttcagctcagggcgggtaattaacatcattggaactagctattaggaaagaaaaaaaacttggttttttttacaacaattttttcccttggtttgcagtttctgcatttggatttgagaacccagggcggggattttcttggcacagtcaggtcttgggtccctcttcctgtgctttcttgtctgaggccttagggggaagagctcagcctctgcagcctcctccacctctgcccctggcctgcctctgctgtgacctccttccagagctagctgctggccctgtggccaggagaagcagaggggagaagcctttatgcagaagctgtgctagccttggtctggggtggggaggctgctgctgtgaccttaggggtagggttggggatcaagggaggctttgtcaagggagagtgaccatgttgctccctacatccatgcaataggacccagcctgcacctcctaggcctacactggggaaagcctgacagaaatcagtacctcctaacggggtctgccaggttcaccaaggcatgggcacagaggaatatgacagttttgaggcaggcaggaagggcccagcctgcag

SEQ ID NO: 12042 - DNA, 1096 bp, Homo sapiens
ttttatagcaggaggtttaaactgtctccaaattgtcataattgagaagaaagaatggataaaggaaaaagtgaataatgaacccagaaattctcctgcttagggggcttgtggtaacagtcccagagtggatatgtgacattctgggggcaaacatgaggagtccaagcatgaatgtctagagcttcagccacccagctgggatctgtgctgtgtaatttgaggacatctcagggtcactggtgggaatttgaagattagagggatcttttgcctaggaaaaacgagtccagaaagaggtagaggtttcagttttctggtttcgggcagcattgacagtctgtggtgtctgctcctgacccctgccacaacccccaccctgaccccccaccaccgtctctaggttgaggaccttgctgcagctgaagtggcagcgctcactgtgtgagccgggcgaggctgtgggcctgctggctgcccagagcatcggagagccctccacccagatgaccctcaacaccttccactttgcaggcagaggcgagatgaacgtcaccctgggcattccaaggtgtggggcacaagggagcacagggtggggtctgtcctagcctctcctggagaaggggccatttaatgagagggggtgagtgagtgtgtgtgaatgagagagtgtgtctgtgtgagagagggacagggtctcattaaagtggggatcagggttagaatttccagagcccagctggtttctttggtgcccaggcctggtaggatctccatttattcctctgccaactcctgcatccacgttcctggggatgcctgtgagactgcacactgctgggggaaggactcaggaacgtacattgttaacaagccccacacaaggtgcctggttgcccaactccaggggagccattcacatagaacgtgcccccacgtggccctgggccctggcccttcaggtaaatatatgtgctggacaaggggaatgagtgtggggtcagacccatctgcattcagtccctggccctgcctttttctagcagaaagactctggacaggtacctcactttccaaacctcagggggtcctt

SEQ ID NO: 12043 - DNA, 1194 bp, Homo sapiens
cacacctgggagctggaagcaggggatctctttgaagcagtcactttgggacagccttgagggcacagagcgtgtgaaagagcctggatccagaaataaccatggatccagcacagtgactgcatcctagctggcctgagacagtcgtggctttgcctcttgtcctagcctaatcataacagtctcctgtttcactctaaaagaagcccagtttgctcagtaaattacatgcttgccctccctgggcttgaatgggccaggatgaagagctgctaggcttatagtcaagcagggtgccctaggacaggttgaagtctctccccattttaaatggggagatggtttctcattgcaatcaggtttctttctgtctccctttattctcattggaagccaatgcttttgatccctcttatgctactgggtatccctcccacatagctgagacccatccttctgttcagatgctgaggatgtggtatgagttggatgaggaaagccgaaggaaataccagaagaaggcggccgcttgtcctgaccccagtctgtctgtctggcgtcctgacatctactttgcatcagtgtcagaaacatttgaaacaaaggttgatgactacagtcaagagtgggcagctcaaacagagaagagttatgagaaatcagagctttctctcgacaggtattgacagtgatttgttgcacaacatgtgcaggagaatctgcctcctagcccctgcctcctagcccctgccctactcactccggaagagggctgcctcctgggtttgagacttcagctagagggagggcagtaagacagccaggggcaacgcacaagccccaagggcccaggagtgaacaagtgcaagggaggcaggagtggacacccccatctgggccaagatagggatagtggtctgctgggaggcttgcaggaaagtctgctctcttgggtttggtgtggtgggtggggctgactgagagtcagggaatctggtcactgttcacctgctgccaaccgtgtgacccagggcaggtcattcatgcccagggacaccaggtcttaacttctcatgaggccttggatccgattactccagtaatcctttgagctttgggttcccatttgaaggcctcagcttggactaggacagacacacacacacacacacacacagacactgtagctcagcg

SEQ ID NO: 12044 - DNA, 1141 bp, Homo sapiens
catgactgatttacagaagagccaggccagaaacgtgtgaaaaatactaaagcataaaaccaaagtataaaaacaagaacacagctgacagcagccagaccaaatttaggcataaatgccaaaaatatgctggagtaactagaaccagatgggattaaacagagaaggccgggggaacgggatgagtttgaagcagtcttgatataggatagtgggcaaatggcaaacgtagaagccagtgctaaaccctggtcatgtgctttgggaagcagttggctcccaagcaagaacatagtgaggatgtgggcaagacaagacagggatataagaagggctcttgatagaaagtggcttccaggcaggcgattagggattagagtttgacttaagatttattttcattcttcttgtgttgtctgttttggcttataggatggccaaccattggcgggactgatccaggatcacatggtttcaggggcaagcatgactactcggggttgctttttcacccgggagcactatatggagctggtgtaccgaggactcacggacaaagtggggcgcgtgaagctcctttctccttccatcctgaagccctttccgctgtggacaggaaaacaggtaattgggagagaacagccagtgtatgtaacaaaaggaaataggccactcatgtaaaaggttttattctcagaagagtccagaccagagacagagaaatggctaagccagcaatagtctgactttctttcccctttgtttggggttcctgagtctgggtggcttcaagggagtgtctagcaagagtagactgcatagtagcctggtgcagtggctcacacctgtaatcccaacactttaggagactgaggcgggcagatcacctgaggtctggagtttgagaccagcctggctaacatggtgaaaccctatctctactaaaagtacaaaattagctgggcgtgggattagtgcctgtaatctcagctaccgggaggctgaggcaagagaatcgcctcagcctgaggcaagagaatcgcttgaacccaggaggtggaggttgtagtgagtcaggatcagccactgcactcctgcctgggcaacagagtgagactccgtctccacaaaaaaaaaaaaa

SEQ ID NO: 12045 - DNA, 1219 bp, Homo sapiens
gctcccatatccctacatctctctgcttcccaaagctcacagggaaacacacacttcttgttttcatagtagaacttgcacatagatgaggaagccagtgtgattgtgtaagtcaaaatattaaaatcctaaactaagacagtgtctttctccattagattgtgagcaccctgaaggtagagaatgcctttcgtctctgtatccccagtgccaagcttaatgtctggggtaaaatagtaggcattcagaaagtatttgaataagttagtgaatgaggtaaaatcagcataccttgggtagtattaaatgtttagatgatacacagcattagagatgaaaggtttagttcaattccctgtgaagacagtgatgttaaaatgatcagtagtatctggtgcaggaaacatgaattggagcagtgaagttttactttggtatgttggtgataaaagttttgtcctactcagttatccttccctcacctttacctgtttgtagtaactttagtcatcttgttttcctagtgtttaatgcctgagtactttgaacctcagatcaaagacataagtgaagccgccctgaaggaacgaattgagctcagaaaagtcaaagcctctgtggacatgtttgatcagcttttgcaagcaggtgactgagttcgattaaagcccctctaataacatgggctttgaagtgggcccaagttatatgattcatatattttgagtaagagttacaggtcctgctgtacttactctgctttgatggctgcgtgctttatatttttagtagtttatttcatttttagctttagtgttacttaagaattacaggcgaagtagaattgcagctttgttggtttattgtagcactggtagagaaattgtatcacccttctaccttagcttctgtttttaatgttaggtaggtatgcagtgctcccagatttcctgtacccttttccttttttttttttttgagatggagtcttgctctgtcgcccaggctggagtgcagtggcgcaatctcggctgactgcaagctccgcctcccaggttcatgccattctccctcctcagcctcctgagtagctgggactacatgcacccaccaccacgcccagctaacttttttgtgtttttaatagaggcggggtttcaccatgtagccaggatggtctcgatctcctgacctcgtgatccacccacctcggcctccg

SEQ ID NO: 12046 - DNA, 1601 bp, Homo sapiens
tttctttctcaactagtaaaggtaaaaatatgtggattagatatcatgcagatgtgaatgacttctgactttgatatgaagaggccagctaggaaaatacaccagaaataagtggtgggggtggggttgtaagaaagtctctctggcctcatcttgcacatgtgtagatgtagcttgttgaatgtgcatcagttctgtggatgtatgttgtcagatggagagaaaaatgtttggctttgcctttttttctttgtaggccatgcagttgctgaagaggaagccagaaaagcccaccaactctggctttcagtggaggcattaaagtacagcatgaagacctcatctgcagaaacacctactatcccgctgggtagtgcagttgaggccatcaaagccaactgttctgataatgaattcacccaagctttaaccgcagctatccctccagagtccctgacccgtggggtgtacagtgaagagacccttagagcccgtttctatgctgttcaaaaactggcccgaagggtagcaatgattgatgaaaccagaaatagcttgtaccagtacttcctctcctacctacagtccctgctcctattcccacctcagcaactgaagccgcccccagagctctgccctgaggatataaacacatttaaattactgtcatatgcttcctattgcattgagcatggtgatctggagctagcagcaaagtttgtcaatcagctgaagggggaatccagacgagtggcacaggactggctgaaggaagcccgaatgaccctagaaacgaaacagatagtggaaatcctgacagcatatgccagcgccgtaggaataggaaccactcaggtgcagccagagtgaggtttaggaagattttcataaagtcatatttcatgtcaaaggaaatcagcagtgatagatgaagggttcgcagcgagagtcccggacttgtctagaaatgagcaggtttacaagtactgttctaaatgttaacacctgttgcatttatattctttccatttgctatcatgtcagtgaacgccaggagtgctttctttgcaacttgtgtaacattttctgttttttcaggttttactgatgaggcttgtgaggccaatcaaaataatgtttgtgatctctactactgttgattttgccctcggagcaaactgaataaagcaacaagatgaaaactgagtatcttatcccttttcaaaaagtacagttctggccaggtgcagtagctcacgcctgtaatcccagcactttgggaggctgaggcgggtggatcacctgaggttgggagttcgagaccagcctgaccaacatggagaaacccatctctactaaaaatacaaaattaagctgggcgtggtggcgaatgcctgtaatcccagctactcgggaggctgaggcaggagaatcgcttgaacctgggaggtggaggttgcagtgagtcaggatcgcaccatcgcactccagcctgggcaacaagagcaaaactccgtctcaaaaaaaaaaaattctagtttgttgtatgtacagaaaatatccttgagaaacaacaacagcagaagtaggaacttctagct

SEQ ID NO: 12047 - DNA, 1249 bp, Homo sapiens
acatttttggattgagattttaaaaaaaaacaaacattggtttaagcctagatgagaatctttgggtgtattttaaaaagctttgcagtgattctgatggacagctctggttgctgtgttgggatttaatctagatcatatgtgtttaagaaaagtaaaaaaacttattaaggaaaagtctgagagaatttgaatttgatttttagttttagcagaaaagaatcttcaattggatgcctgttataactaatcagagttatgcctgaaagaaaatatagaagtgattgtatatataagttttgtctttaaaggcaaagttacagtaaatgagaaagtccatttataattagttcagattaaaagagggttcctggaaaacaactgattatctgaaggcctacctgaattttgccaggggttgaaaataccttattggacactagccaatttctgattgaactggggaatctaaatctcttttcatgttagctaagttttactttcgtttactgctcttaaattataatcagttgatgcagattaccttgtaatgaggtataatttcagtgacatcattaatattttaacatgctcttttgcttagctgacaagctctctactgatgatctgaactccctcattgctcatgcacatcgtcgtattgatcagctgaacagagagctggcagaacagaaggccaccgaaaagcagcacatcacgttagccttggagaaacaaaagctggaagaaaagcgggcatttgactctgcagtagcaaaagcattagaacatcacagaagtgaaatacaggctgaacaggacagaaaggtaagagaaatgagaattgttgcctaacatttaaagtgactctaacttgattgtttacttgtagaaataatactggctcagccgggtgcagtggttcatgcctgtaatcgcggcactttgggaggccaaggtgggtggatcccttgtggtcaggagttcgagaccagcctggccaatatggcgaaacccccgtctcttctaaaaatacaaaaattagctgggtgtggtggctcgcacctgtaatcccagctactcggaaggctgaggcaggagaaccacttgaaccagggaggcagaggttgcagtgagctaagatcgtgccactgcattccagcttgggcgatggagcaagactgtctcaaaaaaaaaaaaaaaatactgacagtcattggctttaggatattgaatataagtcatgcca

SEQ ID NO: 12048 - DNA, 1180 bp, Homo sapiens
cctcagagcaccttcgtttctcctctagaccagggacaggtgtagagataaggactggcaaccagagcctcagcatccaaagatggactgaagtgggatggctgacaggcacataacttacgggaaagggaatttcatacatacgatttttgttttgtgggtaggagggcttatcatcaacactgattttataatctgacaataaatgtctttcattaaagagtttacctaaatgatgttcgattatatgtataatttataaaatatttatgtatagtttgtttattcaggtatatgtataatttattgaacacctactatgtcccagcatatctacaaaactgggtacatacatactgtctaactgctaatccacatttccagtcttacaaaggacataatgattagttaagccctaatttagatttgaggaaactgaagctgagagagggttaagtaaattacccaaagtacagctaataagacccagaatctcagtctcactccttgggatcctgtgtatttccctgagtcttctaacatatgaaaattcatatctaaatcaacaagtgactgtaatctggtactataaatactaaataaacacttcttcataacactgtaccaattcagcttttaaattttattactttgctttcctgtcctttgccaactcttaacctagttaatcctagttctgttgacattggaccaggctcagtaaataaacgaatggatttccagcctttttttcccatctgttcctgcttttagtcctctgaatctgcttcttttcttactgctgctttattttacagtgattttgtcaaacatagaatacaggactaaaaatgcaaagaaattgggtctgtgtttaattttgatgtttcaaattttgagcttccaagtctttgtggccacccaatgaagtttgagtctgcctgttcagatgtgaaaggtaagggctgcagcaggtttaagggtggcccttcaccaccctgttgtcacctgcacaggcactcccccatttgcagatgaagaaatgttcagagaagaaaaatgatggaccaaacgtctgtttgcacaattgaaactctaccagtggactattctattttcacagctacctagtttctgccgatgatttttttaaatgtgaaataaacagtgatactttcag

SEQ ID NO: 12049 - DNA, 3780 bp, Homo sapiens
gcagaaacaagaaagatgtgtcattctgcacaaccgttcccttgggagattgaggagcataatttaagagggaggcatcagcctctcaaagggctcagcttcatgcgatatgtgggatgggactctgatgattgcttcctgttgcggagattcagggagaccccagccctagccagctgcatttggccaaaggagctggaagtctcaacacaatgccttccaggtgctgacctcaaaagatcccacatttacaccaaactgagggacacctttctgttttctctaccaggcaccgcctagaatccttcgatctcgcttcaggaagaaaagtacctcatcctcggccaccgaaaccacgtgagtgagatgagccaacagcaccggatccacagaatgtttcttctctgccttaaagagctattcactaataacatagaaatccgcaagctgggtgtgctttgagtgtgcagcctcacaaacatggccttttctctctccccttccacttttaaggatttatttttttcccccttttctttattttgctggggagaggctaaagggaaaggtagtaggggcgggggtggtgacctttaagtcttctgaggttggtaattttccacaattggattgtcattatagacagcagtgtgttttttagaaagataagagaatcacccctatgctgctgagatgtacatttgtaatttatctgttgcatacttagtttttagtcctgtaaatgcaaacacagcattttttacaactttctttgttcttggtacttatactttgaactatgatgtacatatttatggcttttggcttttaatataatggacttgcaagggctgccagaggttctgatatgtaagaaaactgcaaaaacaaatatagacaaatattttgattctagagaacgtctcagatgtgcttataaagcttccaaatacaactccagtaagacatccctttccctgcaggagtgtggtctatattctttagatagttgtttagtcaaaagaccagacaagttacaaactaagagaaacaatatttcacaacacagtaaagtgtgatgagaggtcaggggaacatcccagtaaaagagaagagtcacaggaagctcatctcctccctggattctggattaggagcttctgaatcttttccagggataggcaggtagctcactcttggtgcaatttcttgaggatgggaacatgtagagctgctggaaggagtaattctgtgcttgacaaaggacgatttctcctttatcgtgaccagtgctgccgatttcctgacagaggagcttacactctgagcaccttgttttagcgaactctagcaaaacttgtttagcttagcaaaaacaaacacacaaaaaactgagaactctgctgtttcagatatgccataacatacatctgaaacacatgtgtaacaatcaaaatggtgggctctagaatggttttggagctcgagatcttcatgggttagacttgctggtcagacccaggagcacctgtggctcacaccttctgttcccctcctggcctgtgcagaatgtaaacagcagactcatactcaatgggcactacaggccttatcagacgttttatacaagcctggattgcttagtaggggaataaggcattctctgagggggctttccacttagattgagaattttatttgaaaagaatctggtttaaatggcattgtggtccgaggtagctgctctccccactgagagctgagccgaaatataagaataatatatttgtgcttcgagttggtgtttctttcagtgtaatgcatgcagtggtcacaacccagttactcataatatttggattgtatttgttcgtagatatgcccagaagactagagaattagtgttatataccatatagaacttactgtcagtcaactataaacaggcccaattaaaaactgttccattactacgcaaacacatattagaggcctttgctgatgacacattagctggatcttagccaccccagaaagggtttgatttgaagctgattgttgccagatatgcatattggaatcccatctacccatagttcctctgaaggtgattttgtaatttgcaaaagggtataggaaaatatacctaaaagcgaatttgtggctgagaggataaacagaagctgtttgctcatgttctgtgccccacacccaccaatacctaaatctgttaaggaagacagaaaatgttttctttgtgctcattgagtagttccagacagaagaagaatatactctttaaaatgtatttacctgttagttggaagtacccagaattatcagaaacgaatgcaaaaaaaaaaaaaaaaaaaaaaagcttacacagcttcttagcaatttttttttttttgccgaaacaataaattgcctttagcagcagtttaaaatcctatcgtgaacaacctatattttcgccattttacaatggagagttgtgacaagtacaggttatcaagtttgcacttaactatgccaaaaaaagtttgaagcgctctattctcagacatgctgtattattacttctcattcaagattgaaaaatataaaggtatccaaactctgtcttaatgtaaatgtaactatttttccttcaagtgttgactagggagtcggtttctctcttaaagacactcactgtacaactgaaagcagctgtcatatttctggcaaaatgtgtttacgtatctgacaagttgtacatttgtgtatgaactgacataaaatgtgaaagcctgtaagtgtacatgtagtggtgtggtgttctgtctagaggatacaactgaatgtttttaatttgctgacttacagacacaggctgtttacaaaatgctagctggaaagtctgtaatgttcatgtcataacttttagttaattgccattgagcacctgttctgaggaggtgagatgtggacttgtgcttataaactggagagtttagtcataatccctcctggctttgtgtgaatagcttgctcactttgctggcctttgaaatgtgttctccgtgataagctatccatgtgtttgtgataagagtgcttgtcaaccatgaccatctttgagccttcctagtcctccacctggcacagtatttgaaatggcaaaggatgtgcttcatcctctaacagtgtacactcccagagctgatattctggattttgactgtgcacatttcctctagttcatgtctgtagtccctatagaatgatctgtaataaaatagtatactggactgtgcatcaaagggatgtaaaattacagtattccaaaggttgaagttctgctgttttgttataatgcctgatacacatcttgaataaagtcttaacatttttcttttaaaaaacatctttgtaatgttgggcttaaaaggaaacaggaaatactttttttcaaatatgggaggtagcaaggattagaagctgagtgttcagccaccgactggcctggtgacttggccccgtgcctgttgcataggatgttgagagggaaagaaaaccagatgatataaatgttttgaaaaccagttcatcacacaactacaaacctgaaagtatcactgtttatttcacatttaaaaaaatcatcggcagaaactaggtagctgtgaaaatagaatagtccactggtagagtttcaattgtgcaaacagacgtttggtccatcatttttcttctctgaacatttcttcatctgcaaatgggggagtgcctgtgcag

SEQ ID NO: 12050 - DNA, 1200 bp, Homo sapiens
attgccaaataatcattggctgtgattagccatggagattacagaaaactaggaaggactttgttgatttaaatagtaattacaagttgtggatgggcacggtggctcatgcctgtagtcccagcactttgggaggctgaggcaggcgtatcacctgaggtcaggagttcaagaccagcctggccaacatagcgaaaccccatttctactaaaaatacaaaaattaggcgggagtggtggcaggcgcctgtaatcccagctacgggggaagctgaggcagggagagttgcttgaatttgggaggcagaggttgcagtgagccgagatggcaccactgcactccagcctgggtgacagagcgagactccatcccaaaaaaaaaaaaaaagtaattacaagttgtaaataagttgtgtgtgtgtgtgtgtgtgtgtgtgtgtgtgtgtgtgtgtacattacatctttttttcccctgcttcccctaggttacaattcaacaaacatggtgtgttgcgggtagaaggcttcttaacaccaaacaagtatgacaatgaagcaattggcttgtggttacctttaaccaaaaacgttgtggggattgatttggacacagcaaagtacatcttggccaacattggagaccacttctgtcaaatggtgatttctgaaaaggaagctatgtcaactattgagccacacagtaagagcatctcttagggggtaggattttcgagcccaatttgatttttgttcctaagtgacacctaagtcctaattgcttgggttttttttcacccagaagtttagataactttggtataatgaggttgcatttttccttttgcaacaggtttgatcagagttagccacctatctttggggtttattttgggccaattaacagaggagtggaactccttttttgttaggaaaggtgaagtgagggtggaatttgcacagcctcaccagcagtgcaggcacactaaaaggggatgaggtctcagattggtttattttaaaacaaaggttcttaatcatgaatacatttcgaggaaaataagaatgggaaggctgactctcagacctaccgagttagagtctgcagggctgggtcccagacttgagaatgagaacaggttcagaatggaaatgattgttagagtcaaggtttgaagggaatacttggaggttctagatgtg

SEQ ID NO: 12051 - DNA, 1631 bp, Homo sapiens
cctgtcggggtcttgaacacagtgcttaaccttcagtgctgcagtgttctcatcactcttaggtagagcagaactgaatctctgagactcaaagaggtctgagggggtggtattttcaaaaggatttcagtaatgaattatgtaacataatttcatgtttggaaaataagggaaaaatgataaaagctgtaccttggaacttgcctctccctgtactcactgtgagtaggtctacgtggtatcaaaacctctaaaagggggaaaatgagttcttgaaatcatgggtttaaaatgtatgtgaaatactggtctgaaggagcccagggaccttttgcaatgttgacatttcatacgaatattgaattttaaattctgagagaaggtaataaaattagtaggaggaagcttattcttagtgacaggttttagatttaaatgtaaaatgcccatattttctcctactatttttaggtgaagaatgttatctaccatgcagtgaaagatgcagttgctatgctgaaagccagtgaatccagttttggcaaaccttaatctccctgcacattggaaatgaattacaggcagctgttcaaactcttcaggcaggattcctgtggactttgagattcatgttacctcatcttcttttttaaactgtacccaacttgtgagggtactctgtctaatgtatatttctagtgtttacagacagtaaatgtgtatatgtagtaactatttacagaacatgcatccttaaactgtgacttctcacctagtgcagaacttttaccaggctgtaaaagcaaaacctcgtatcagctctggaacaatacctgcagttattcttcagctgtttggacaacttagattgggtttataactattaggaatcactgcacagtttatttgggttgtgttttgtgtctgagtcccctccctcatcccttagggtccagaagagcaatggaggaagtgacagctaatgttgcagttcttattgtatggcataggactggcattatatagcagaaatcaactactgtacaatttcttggggttaaccatctttagttaaatggaattttaatttaaatgacgctttgctaattttaagtgttaagcattttgcattaaaatattcatataatattttggctcagtttattggcattatcctctcattgtggtttcaacacaactttcttcaaatgcaggtgtaatggattgctccaagaactcttcttaaaagcaaagaaatcagatgctatagtgattttcttagtgattattacaaagctaacatggaaatttctgctcagccaggtagaaaccctgtcacactttgtcaaggaaacaccaccaattaattaaatttagaaacaggaattaaccaagaaaccaaatagtgccaggctaaatggttctaaaaaggtaagtaatgaaacactttgttttatggcccttcataatgttaagtttatgaaggaaaatgaaattataagttctaggacagtactacctaaaatattcatctctgtgaaggaaaaaaattcacaaagaagcgcctttctttagcccactgattctcctaggccactctttcatttaatttctttaaaaaaaggaattaa

SEQ ID NO: 12052 - DNA, 1623 bp, Homo sapiens
ctgtactgtctcatttttgtatctggtcagattggtccaggaatgaaaggcagggaagattgaggggctgcttccttaagccaatgtggtgttcatctttgctctttcttttcaggggccttgggcaaagcacccagtaaagtgactgatgcccttccagagccagaacctccaggagcgatggctgcctcagaggatgaggaggaggaggaagaggctctggaggccatgcagtcccggctggccacactccgcagctaggggctgcctaccccgctgggtgtgcacacactcctctcaagagctgccattttatgtgtctcttgcactacacctctgttgtgaggactaccattttggagaaggttctgtttgtctcttttcattctctgcccaggttttgggatcgcaaagggattgttcttataaaagtggcataaataaatgcatcatttttaggagtatagacagatatatcttattgtggggaggggaaagaaatccatctgctcatgaagcacttctgaaaatataggtgattgcctgaatgtcgaagactctacttttgtctataaaacactatataaatgaattttaataaatttttgctttagcacttggccccattgtagattgccctgtgcagtaaactttcaaggtgtcggctgccccagattgcttcatttgctgggtgtggaaagagttgctatggccaggcatatgggatttggaagctcagcagaagtgacttctgctctgtggttgctgctccccggctttcacagacatggtatggcagccattcttttatctatttaaccaagaggatgctggggaattgtgctgcttgtcctgttggctggtggctgcattatgtcctggggtgtgcatgtgggtctatttagagcttctgtcccttccttcccattgcaagttgcacccagatgagacagctgtagtactaggtctctttcacctctcattgcctgtccctgcttcgagctggttgtcttgtgcgtgggacatgggccttcctatctgtgttttctcaaagtcaggagctgaccaggagcacactaaggtgtggtcatgcatcataaccaacattcactcatctgggacattcttaagatacatttataaatcatttcagcagtagtactttgtatgtgttgagagtttacagagctctttgacatacgcgatcttagtctttacaaataaggaaaacagctcagtttgggaagtatcagagatgggattcaaacccagatcctctggtccaagttgtatgtgcactgaactaatcaggcaggaaaaaagcccagccactgtctcacagattgttttttgtatattgtagcaaaatcctgaaacaatggggtccttccagtctcatcatacaaaatggcaatcttggctgggtgcggtggttcatgcctataatcccagtgctttacaaggctgaggcaggaggctctcttgagaataggagttcaagaccagcctgggcaacatagcaagatcctgtctctccaaaaaaaaaaaaaaaaaaaaaaaaaaatttcatttttgagtccagaggaccctcctattactcttgatttcatcttcagagtgtag

SEQ ID NO: 12053 - DNA, 1623 bp, Homo sapiens; identical to SEQ ID NO: 12052

SEQ ID NO: 12054 - DNA, 1285 bp, Homo sapiens
gattccctttctctttcttttccccagaattttgattctgacattagcagtgtgggaatagatggctgctggcaggcagacagccaaaggcttctcaatgaggtgatggtggagcacttctttcgacaaggaatgctggatgtggctgaggagctctgtcaggtaacagtgtgccaactgggaggatatgaaaaagaaacaagggaactccttggagtttatagtatttgcagggtggggttttgagtcttcctctagctatagatagatttttaatatttaaattatcagagatgacctcattttactaggagtattttggggaattttttaagtggcaaaaattatagttctagaacttgttatccagatcatttttttcttgttcctgtcccagaaggttagtcccagttcatgaatcaaagggcgcaaaagcgatattctttcttcatgtccatttttgatatagaaggttagtatagcagacaagaggaaagggacaaaaacattgatgtttgttcttctgttctagcccagcttaaacgattttatcaaatgaatttccagctaaaattttttacttcgcattagcagcatttgtcttttatttctatcacacatgagttagaactctacaacagtttaccaataccatgtagtcataatagtagtagctgccatatattgagtgcttaccttaagccaagccctgcctttattccttgctgcaatcccatgaagtaaaaattattgtttccattctacagatgaaaaatctaaggtctggagaagtaagttgcccgaggccttaacaggttctttgtgaaagaactgggattcagtccctgattcatatgtcttcacactccgttctaagccaccatgtgctgttgcatttttgtttggaaacatgaaggaccgaaagaattagtttaaaatcagtctgtaaaccaaacctctaatctaagccttttctattttaaacaattcagataaatgataactcggtttttctctgtaccttacagggattttgtgtatgtgtccatgtaatttcctgcagtaaactgtcattgaggattgtttgcttttaagtaacaaaagacccacaattacagtggcttaagcaaaagtgaaatttttttcttgcacagaaatcggtagtaagacgtccacagcatgtttggtagctctgcattgtgaaactcttagggacttagcaccttgtacctctgttattcccagggtgtctcctgtcttcagagtccaggatagcagccaaagc

SEQ ID NO: 12055 - DNA, 3842 bp, Homo sapiens
ttaataaaatgaaattctaaagttagaagtgttcttaagttgatatttactctcttggtcttggtagccctattatatcattgcagacacagtgttgtgcatgtgtgtattgtatatgtgcaccagcatcaaacattgtgtatctggaaggaaagcagcatgttccagttctaaaatgcagttaccagacccatcactttaaatccttaaagttagaagctagcaaattttctgtagtgcagaacgtttattgctgtttttgtgtttgaatagtataatgtttgatgcctctcttctgcaaagcgtatcatctcattgactgtgaatctgtatattattctgatggatacagataatgatcttttctcttgtgaggtatcttcatttatgcactgtccaaaaatagccatgtgtaagagtctttctgtatgacgaactacatggaaaagacttctgtggacataattctgaccgaaacccatgaagttacttcagtataagaagaacgttacacggaaatcaccaaatattttgcaactttatttcttctgacatggagtgaacatcaataggaatactttcaaagaaaatgaaaacacagaagcaaagagaaatgtggcacttcacattttaaactacagatggacttggtttgagggagggggaatcacagatttggtgctaagttaattagaaactggcagcgttttacagtagtacaccagcctggatgttttttctaaaatgtttacctgggagagctggggtttgtttgtgaggagaaagagtactgtggaaaacctctgcttgagtaccatgtggccaggcctatgtggatggctactccgtgctgtgcggcttcaccagcggttgggattggcccagcttggagtgcttgtgtggtccaacctcagtctggccccatagcgacttttgccccatgattctgcttcactgttggaatcctctttgaagttccccctctctttgctaaagcagtgaaggaagagaacagagacaaactctttggactgtgaaagagaaggtagagaattccaggcaacagtctgaccaagggtgtaaaccagtttattatatatatatttttcctttgaattaaaacctagagtgttgtatttttctttctttctttttttttttttttttttttaccctttttctccttaggccaagtttagcttattcttatctttccacccaaacacctacacaacgtttaggcttcctgtaaggtttgaatgagacagatgtactctgaaggctggtggtaaatgtgtttgatgaccagactcttcatacagtcggcttgggccactttaaaggacaaaagccagagctcagctttatccctctcccagtgctgggagccaaaaaactgttgacggttttttgtgcagctcaagaaaactttgaaaagaacatgctttaactgaagcattggactctgcagctttctgtgtaaggcccgtgtactcccactgggcagggtgaggaccaaaaatctgaaactcttatgaatctgacatattatatggaaattatatcttgtgaccgtcttcaagtgcatggacttaaaattcatgagagactaaatgtgagggagaggtggatttaaagaggccagaccttaaccaaagatgctgagatacagcattctgtcccccctgccctagaaactccataaatgctgtcacaaccctatcatcgctgatgctttctgcatgtcagcagtccaggaggatgctttttgtctctctttgcctccactttacaaaagataatatgatagaggcaacgtttataacagtcacatttaattataatgtacatcaaaggcagaatttcagaatggtttcttaaatttccttgggaaccgtttccacatatcagttatagacaaaggccatgggactatgctaaaccaataaaaccttattagcaaatctttagattctgacttagccagagcatctgagtgttcaagtacagttttacagtggctaaggttgtctcttgatcttttttctccgttgtgtgatcacagatgctatttctgttttattggtgattatacgagacttctaatacataaatgaacgggtattggtgcctctttattttaaaaaatttgaagaaaagagccacctcatattcatagggtgtgtattttttgagtgtgagcatttaattgaaaataagaaagctatgaagtaaatgttaacttctctgtagcagctaatgcatagagacactaaaacccacaccacattttgtgggaaatgaggatcctgatcctcttttgtcctctccaggtagtctcgcaggttatgcagcttaagttcagtcttctttatgctgcgattgatttccacctcagtggcttagcctttgggacagtggatactgcaacagccaagaactcttggttatccgcacaagctgctggtagactacattagccctctggttttccagctcaacctctgataaagtggactgagagccacgctgctcagtctgtttcgtcagccgactcaggttattttcagggaaggcatggaggcatagtttggttagtttcatcactaggatgtataaggtgacgacacaaaccaaatacctttctttcatcacttaactatacgtactttatctctggtaacactagaatgctgtggtcttgagggaatgttagcaaggaacacatagaagatttggtgtttcataagcctgtctaggtgtggcaggttttgtgtggtacactgatgtttaccataagcaggtacaagcttcatgaaccgttcttaatgaactataattgaatagataccaaaaatagaatgacaaatgtattttaatagcagatgaggcagttttaggatgaattttccactgttgattttacttcaagacatagcaagagaaacaaaattttgttttcaagacatttccactgcagtttcaagctgtagtgggcatatgcttcatttacttccaaagaggcaaaagcagctggaattggcttacagcacatgctttgtttcatgttatgggtgaggacctacatacactcttactttagcagtcacttaaccttctccagcaaggcagttgtggggttcactaggatttagtgcctgatcttttttttgggaaggggcgggaatgaatgtgttggggctgggagggaagcagaagaaaatgggagtgtgagtgagtgtgcatgtgtctgaagttcaccattgcccccacctgcacctagcaaggaacaggtgtttgatgtattttgctcatgactgcagtatgcatgtatttttttccttctctgtgttttctaaacttacactaaaggattcatcaaatcatcttgttcagatggctcaggattgtatttattttgcttaccccgtgctcttgggttctatagtatttctataattatgtaacgagaatagtgttgcactgtaatctatcatatagagctatatgtatggaaaattttgatcaattttttaagaaatgtatcctgtttgcaaaggcacagtaaagttgcatcttatagactataggcaataaagctaacaataaaccttatttaacacaaaccacatccatatcctctgttcatttgattttggaaaaagtagcatatccagtagtttcagggaattcattttaactttaagaattctgatatatttaatttataaatttcggactgatataatagagttttggaaaactataagaaatgctttgttaatgtgtgtattcctatgtaaaacacatggcttttcctgtgtatatttttaaaaattaaa

SEQ ID NO: 12056 - DNA, 2174 bp, Homo sapiens
cttctgagaagggtaaagttactggtacgtgacctgggaggtatctgaccatcctgatgctaccctttggcatataatgtcaagatactcagcttttatgctgaaataggttgtaatttgtttgagctgctttgtttttcaaagctctttttaagagcaaaggaggccaggtgcagtggctcatgcctgtaatcctggcactttgggaggctgaggtggatggatcacttgtggccaggagtttgagaccagcctggtcaacatggtgataccccatctctactaaaaatacaaaaattagctgggcgtggtggcacacacctgtaatcccagctactcgggaggctgaggcaggagaatcacttgaacccaagaggcagaggttgcagtgacccaagagcaaccccactgcactctagtctgggcgacagggcgagacgccatctcaagaaaaaaaaaaaaaaaaaaaagagcaaaggaaatgctcaggacaagatgatctggtaagaattttctcccttttttgcagaaaatcccgttttgtcaacctaatgaagcattcaaagaagacatatgactcttttcaagatgaacttgaagattatattaaagtacagaaagccagaggcttagagccaaagacttgtttcagaaagatgaaaggggactatttggaaacctgtgggtacaaaggagaggttaattccagacccacgtatagaatgtttgaccagagactcccatctgaaaccatccagacctacccaagatcatgcaatattccacaaacagtggaaaatcggttgcctcagtggttaccagcccatgacagcagattgagactagactctctgagctactgtcagttcacgagggactgtttctcagaaaaaccagtacccctgaactttaatcaacaagaatatatttgtggctcacatggtgtagaacatagagtttacaagcacttctcctcagataacagtaccagtactcatcaagccagtcacaaacagatacatcagaagaggaaaaggcacccagaggaaggcagagaaaaatcagaggaggagcggtctaagcataagagaaaaaaaagctgcgaggaaattgacttagacaaacacaagagcatccaaagaaagaaaacagaggtggaaatagaaaccgtacatgtcagtacagaaaagcttaagaatcgaaaggagaaaaaaagccgagatgtagtctctaagaaagaggaacgtaagcgtacaaaaaagaaaaaggaacaaggccaagaaaggacagaggaggaaatgctttgggaccagtctattcttggattttgaagctttcaaagttggttctcccaaagttaaattgaaaaaataggtgagagcttggttttatgatatccgtgttcataccacttttcttatgtgaataggttctttaacttctaacaaaggcctagtaaacaaagtgtttagcatgcttgctctccaacacagaaattgcttttcctcattttctaaaagcattattacattttttgaacatatagtgtaatttcctttaatgaaagtgactctgcttttattcatcaaattgctttgatggtggaaatattttctgttgggaggttatttattttaaattggaggattaatgacctttgcacaatctgtttcttgattgggtttgttatagttttgagttgggtattttatgttcattggtttttctctgtgaagcaatttttttctcctttattagatctaacttgcagtgtattttctaggctggaaagtggaaaatgaaatatattataatcttaggttacataaagtttctaaagtttcaaagagtcttgatacaaaatcagtttatattctgaaaatatttataataaagtattctaatttctacatgttgttgtgtgtcagtctgttcctatttaacaatgatttttctcttgggaggaggagagaataacttggcagttcatcatacttaacaggcaagatcttttgggtaggtcacactttgaagctgtaaaaattccttatctatcataccttgcttgctcacatttgaacctggtttttaaggtagaaatctatgactgactgttacaggaccccaccacttacccaaagttagcctttgggtcgggggtttcctcactatag

SEQ ID NO: 12057 - DNA, 1239 bp, Homo sapiens
taaaaatcatatttatgtttcagggatgtgattaaataatcctttataatgtgttagaaaatcaaattacccaaaaattgtccatgtttttttggaatgagggttggcaaactagtgcccacaggtcaaatccagcctgccacctatttttataataaagttctattggaacacagccatgcccattaatttacaaattgtctctggatgcttttgtgcattgacggcagagctgagtagttgtatcagagacttgaaaactcgaatatggctcaaaagcttaaaatatgtacagaaatattttgccagcactgattttaaaaactgtacagtgatcaaacctggccgttttatcacaaaacaatttttatattttcagtacgtgatggttcaagacatgctctctccatcccccatggaacgacctgaagctataaacatcattgaaaatgctgtatttgaggacttggactttccaggaaaaacagtgctcagacagaggtctcgctccttgagttcatcgggaacaaaacattcaagacagtccaacaactcccatagccctttgccaagcaattagccttaagttgtgctagcaaccctaataggtgatgcagataatagcctacttcttagaatatgcctgtccaaaattgcagacttgaaaagtttgttcttcgctcaatttttttgtggactactttttttatatcaaatttaagctggatttgggggcataacctaatttgagccaactcctgagttttgctatacttaaggaaagggctatctttgttctttgttagtctcttgaaactggctgctggccaagctttatagccctcaccatttgcctaaggaggtagcagcaatccctaatatatatatatagtgagaactaaaatggatatatttttataatgcagaagaaggaaagtccccctgtgtggtaactgtattgttctagaaatatgctttctagagatatgatgattttgaaactgatttctagaaaaagctgactccatttttgtccctggcgggtaaattaggaatctgcactattttggaggacaagtagcacaaactgtataacggtttatgtccgtagttttatagtcctatttgtagcattcaatagctttattccttagatggttctagggtgggtttacagctttttgtacttttacctccaataaagggaaaatgaagctttttatgtaaattggttgaaag

SEQ ID NO: 12058 - DNA, 1199 bp, Homo sapiens
cttgccacatcttgttcagtggagatccaagattggggctgaggtatcctggatcacattgcctttttgaggccatgttttagtatgaatttaagactggtgcattcatcttgacttttacactggtttgttagggcatattaattttgctgcacttaatgaaatgtatcctgcctttaattaagaggtaaggcagactgtgtgctacctcattttaaggtgacattgatgtgtttggggaaaatcactctgatgtagaagtacaaacatttgtaagtttttgagagaaaatctgtcccttagctgttgtaagggacacatcaagtcagtccacaaccctcaaaaccattgtgtctgaagggtcaggacaaagttcttgtgggccctcttgtggcataaatcagtagagcactcttttccagaaggttatgttgttagttttctcatcacataattttagtatttgcttcttcaatctagaagagttctatattattttgtccctttctttaaatgtaaatttctaaaacacacctttgtaaatttaaggtggaatttcagtgttggccactttgaacttcggtatattccagacatggaaacgagagccggatttattgaaagcacctttaagcccaatgagaacacagaagagtctaaaattatttcagatgtggaagaacaggaagctgccataatggacatagtgataaaggtttcggttgctgactggaaagttatggcattcagtaagaagggaggacatctggaatgggagtaccaggtacctaacaccactgaggatttaaaatacggttcttcctctcccagtctgaccaaacttattgattgggtggaacgaaattactactacttggggctctcagcttgttctctgtgcttttataaatttgtgattttaaatggtattttatgggttggaactatataactactgcttgaattatttaagaccttttttccatttttgtttagttttgtactccaattgcatctgcctggttacttaaggatgggaaagtcattcccatcagtctttttgatgatacaagttatacatctaatgatgatgttttagaagatgaagaagacattgtagaagctgccagaggagccacagaaaacagtgtttacttgggtgagtaaatgtatcttatctaacgatagtacacattgac

SEQ ID NO: 12059 - DNA, 1135 bp, Homo sapiens
gagtctactttgggatgcaggatggctcagtgaacatgagggagaagcctttctgttgaccctgcaaggagcagagtgtgttcaccttgagtctccagcccacagccaaggtggacgtacctctccaggagcctttgccttaatgtatctctgcctggacaacttgtggtggggggtggggggaagagtgggagggggagttaaatccagtcttatgaagtattgttattaaatgtctttttaaaaagagaaatataaacatatatttttactattaaaatattcagttttttaaatgaagtagaacttgagttcatgttttatatgaaatatttaccaaaaaaaaaaaatgaggtaaactgtatttaaaacctttgacttgagtctgctggtaaagcttctgaatattgagtttgctgagaaataaaaatcaaaacttctttaagctggtaaagtgaggggcccaccagcagtgatctcctgatgccttactggaaactttgtttacttgtctgctaccctctgatttgtttttagttagtttttattgtgagcacacatagtacctagttacatcttaagatcaggtttataaaactgtggagtggagcggtatggtatggaatgacttggaatgtaagctgtcagggagaaaatgttgttacacttttgctaagatctgggggtttcttcatattcctgctgttggaagcagttgaccagaaatgcttgccagtactgccaaagcactgctgtgaaatgtgaagtactttgtttttttatttttaatgattttctttttgttattaatatttttctctgttcctttgttattacttgcatggtttggcgtcagaagtccttacctctttatattgtttgcaggtttaaataaaacagtgtggtgccattttgactcttttgtctttattgtagaatttaaatttaaatggccacagaaggaaagccaagatgggagaggaatcagttttgcccacccagcgtacatcagatctgtgataaggggtagaattcactcaagaaatcttgaaccaaagaataggtaaatactttcattatttctgggagagctatcttccagatatgtcagttatctaaggaaatatgccatagc

SEQ ID NO: 12060 - DNA, 1105 bp, Homo sapiens
tgtgtgggccctacgatgagatccaggggaaggcccccagctcctggcctgctctcagcctgtgtgatgataaacaccactgctccgggtgtacgttcctcatccctggggtggagttgggatgtgtggctaggaagacttgctagatcatggagggaccaggctgctgggcctcaacctgaccagcatctccaccccccgccccactccagccagtgtagggagctctgcggtgatgagcacggccattatggcaacgctgctgctcttcaagcatcagaaggtagggggtgcaatgtggtggggacctgggcggtggggggggtggcgatgtgtggccctgctgcctagccctgctctgcccacccagggtgtgttcctgtcgcagctcctgggggagttctcctggctgacggaggagatactgttgcgtggctttgatgtaggcttctctgggcagctgcggagcctgctgcagcactcactgagcctgctgcgggcgcacgtggccctgctgcgcatccgtcagggtgacttgctggtggtgccgcagcctggcccaggcctcacacacctggcacaactgagtgctgagctgctgcccgtcttcctgagcgaggctgtgggcggtgagtcttgaggtgcacggggtaggtgggatgtgtgtgcagtggtgaagggaacggctccttcttcataatggaccctccgcccccagcctgtgcagtgcgggggctgctggcaggcagagtgccgccccaggggccctgggagctgcagggcatattgctgctgagccagaatgagctgtaccgccagatcctgctgctgatgcacctgctgccgcaagacctgctgctgctaaaggtcaggcctcccctacggcccacttggtcctaggccttcccctcttggtggtaggaatggcccatccctgcccatgctctacctctgaaacctcctgggtagtaggtgtggccttgcccggtctttggctaggcccctgcccatgtgcctggctctcctgaggccacatgggtgcctttttctcccagccctgccagtcttcctactgctactgtcaggaggtgctggaccggctcat

SEQ ID NO: 12061 - DNA, 1126 bp, Homo sapiens
atcggcttccttacccagcacccctccggtaggtgggtggccacgtggatgcctcgctggggcggtcttggaggcctggtctctgcctcgacgggagatccccgatcactggcattcaccccctgcaaaaatcggggcgacaatagctcactgcctacttgctgcagggagatgaaaggctttgcagaaagctttgagctctgtgggggaacacactagagaaccaaaaatgtgattatatggtgatataaaaatccctttcctctgtgtttaccaccacctgtcttcctgtagacttttgttctgtccctggggtgtgtgaattcctaccccgaactggaagccgggagtggcagacagaatcactatttcaagttaaaggatctctttgagaatgtgttcttctggctgcaaaggtctgagttattacgctacatgacaacgtttcgacatttcaccggcaacaccaagagggtttttagtggcttgggtctccccagtgggggataagtcttttgtcatcaaggaggcaaattgtctccccaagacagctcaaaatatccacacctcggcaacagtctaagatgagagcctgtgacaggtggcagcgcccccaggtggggtactggcatcagagcctggtgcgcccctaggggagcctcccactggagtgcccggccaggtctccaagccccaaatgagtccttgtgaaccacaactgatccccccaggtgggtgcttgtggactgcctcggacccagccacgctgctccccgcaatgctgatggggctgtgcattgaggacccctgcttcctggttctcagtcccaccccaaaacctggcacccagaacagttggaagtgtggaaaggaggtttatcggccttcccttggagagggcctggcttcaacattgggccagtaggcatcttagcttggcaggtgtcgggggaatgggccagatggacctgctagatttggaagggcaccgagggagttttctgggtgtagagagaatggaggggaccaaaaagagtccttcctggggtgtgggaggcttcccagcttggtcctcagtgggttgttgaggccagagtatcgccctgggatgtggtggggagctggg

SEQ ID NO: 12062 - DNA, 2555 bp, Homo sapiens
tcattttgagcctactgttggtttgtatgtcagcttaacctgattctcgtctcctgacaggcatgccagatttcctggagaagctgcacatggccactctgaaagccaagaatatggagattaaagtaaaggactacatctcagctaagcctctggaaatgagtagtgaagccaaggccaccagccagtcctctgagcgaaagaacgagggcagctgtggccctgctcggattgagtatgcttgacaggctttgggataagaagggacaaggtgcttctagccctgtctcagtccgttatcactctgctgtagaagggggacatgccacatgtattagaaggcatctgctgtaacttccagtgcaagataattcaataactgatgtcccatttcattcagagcccttattgctcttatcaaaacagaagaaggctacatttgtgggagtgttgtcatattctcaggccaactgttttgaaattcggtatctcactgagctaatctggaacaaacctctcacctcaggccagaaggggatgacctccatttgcttctctgagtagtttcctctgctgacattccaaatcccaccatcgattgtgcagcgctttggatttccttcagttctccaggtccacctggaaagtatagttggccagttgagtctctcaaatgaggggctactgggagtgctcttggtaacaatcatgatgtgaatgggtgtgaacgatacttggctatgttaagtgccttgtccgcaccttgcttttatctctagagacatgaagttattattaattttttttttttttaagtagagatggagtttcactctgtttcccaggctggtcttgaactcctgggccatgcctggccagggacatgaatttgtacaaagaaatttccctccctgcctgcacaatatcacccattgactcaccttatccaaagcaagtttcctgtgaatcggccagttcttctatattcattggatcattgcctccttcctaaccttccccatttaccaagaacactgggagactaatccttttagatagtagctttttgatgctcaaaacatcacatttaaatttagtttaaaaattttttaacttttgtgtcaaataggagttgaggaattgagcaggattctaccctagtccgattgtatagaaaacaccattttgattcaggtattatttttcatatttcaggtttgacttgttcttttcagaaggctaaagtcagaggaatgggggctgggccactcccttggagctctcagatctacagacaagctgtgtgaatgcatagatgtaatcttgtctcaaatactaatacagtggagatttggtttatgttaccattaagttcctctaaaaagtttttcttcctctcttcagagccaaaataaaagtgaactacactgttcagataaggtcacaatctgatgctgtcagtttgaccgagctggttttgcttatggtcatgctgcaatttgttagaataatagggatcaagttttaaatcctcctccttcccttttttctggagtcttgagggccagagtttttgtttttgtttttgtttttgttttcctgcttgctactgttttgtggtgttgaaaagtggtttaaacctgagactaacttaaacacttccttgaccttcttgttgcctgttcatttttgtgccaaggaagtagctgccccagtgtatgtcttgccttctccgcgtcattgttggaagaggagagatgcatcgagcagtcccagctgcttttcatttattacttcttctttccaggacctgacagaagtcagggaagagtccctgggttatgtccaaacttagcacctgcaattgttgggatgtggatggatgtgtgcataagagagagagagaatatgtgtgtgtgtgtgtgcgtctgcgagcgcacacacatgcacaagtgcgaaggagttgcggttgctccatgttctgacttagggcaatttgattctgcacttggggtctgtctgtacagttactcatgtcattgtaatgatttcactcctaactgtgacatttttatcaaatgtgtgaataaatacataaagattggtacaaaaaaaagtgtttgtctttggacaaatggtggtggaaaaatcttgcatattggacttaccatttctttctgatcacaaagttgaaaagaattttactctgagagttgggaggtggaagtggcagggcttgttcattcttggtagatagtggctgacacagtttgcctagaccacgagccctttccaagtgacctgcttggcaactgaaaataaaccacctatgtccacttccctagcttgatatactgacccatatcctttccctttaaaaaaagatcactttggagggagcagtgctagagcttagcagacggtagaaatcaggagggacagaagcaggcctgaggtctagggttgaggttgaggagagggtcaagtcagcgctcttggcggaggggcagtcctgctggcatgctctgagcataacatgagtttatgtgtaattt

SEQ ID NO: 12063 - DNA, 1237 bp, Homo sapiens
gttaggtcagatctctttcactgtctcagttttaattctgcaatggcggttatcactgggagcccccagcccccgcagagacatgcggagccccgcccccaccctgcactctaataaagaagggggccagcgtgccggcctcttaaaacaagttaacacctggcaggattctaacaggaacctggccaggtttctccgcggggcggggctgggacggccggaagatggcggcgacggcggcagccgggtccgagggtcactctccaatgcgcccttgacggctctcgccgccgagccacctaccttgctagcaggcggcctccgcgcatgcatgaaggggcaggagggggcggtgacgagcacttcacggcgccaatgagcacccaggagcccaggtcgcgcccaatcacggcccaggtggcggagaaaaagtagggtgcgcgcgcgccgcgcgtgtggcagtcgcggaaggcgcgggagcttgcgtgctgctgggcctgagctgtctgtctcgtttctgtccgcgcgccctgcatcccggccccgggcgcccgctggaggtcgccgaggagccacagggctgactggtctgctgcccgggcccaggagtgcctggtgtagcagtcgcggagccatcccggcgtctgctgccatgaccgactctcccctcagaggagactcttcctcagcggtggctgcagagacagatgagcggcggctcctggccgcgggaccgtgagacgggttcgtggccggccatttagggggacgctgcgaccaccgcctgcgcccctccggactggttccttgggccccggaagctcgcggcgggccctgcgggaggcggcatgctcccgcggaggctgctggccgcctggctggcggggacgcggggcgggggcctgctggcgcttctggccaatcagtgccgcttcgtcacgggcctgcgcgtgcggcgcgcgcagcagatcgcgcagctctacggccgcctctactccgagagctcacgccgcgttctcctcggccgcctctggcgccggctgcacggccgtcctggccatgcctctgccttgatggcggcgttagccggcgtcttcgtttgggacgaggagaggatccaggaggaggagttgcagaggtgggcgctgcggcgagctctttctgggccgtggggtgggggggcttgtgaaccctggggcctgccctgtggtcgttggcccttgtttacccggtggtc

SEQ ID NO: 12064 - DNA, 1150 bp, Homo sapiens
agattatgctttcctgggaaccgaaatttaggtctttcctatccagcctgtccgattttaggttggattaatgaggttttatttcatctggaaagcagtgaagaagaaatgtgtatgtaacagaaagtagtatttgacaccgtgtttagccaggggttttttgttttgttttgttttgttttgagacggagtctcactctgttgcctaggctggatcttggctccctgcaacctctacctcctgggttcaagcaattcccatgcctcagcctcccaagtagctgggattacaggcccatgccaccatgcccagcaaattttttgtattttagtagagacggagtttcaccatgttgcccaggctggtctcgaactcctgacctcaggcgatctgcctgcctcggcctcccaaagtgctgggtttgcagacataagccactacaccctctctctaaaaacatttttaaaaggagccaatgaggcctgcgcaagccccaacccattggtggtttgttgttgctatctgcctcataaagcagagtggagggtttgtcttttgggaagatgaagtgtcttctctaaaaaagcctcctacatagttggccttggcatctgccaggaatagaagggcagggcttgaggcttcctgagtctgggttttcagttgaggtggagagtgaatacagtgattgtaaccagaaaacccggagtggggtggagttacctccggaactcatcactgttaactcagcctggactttgtgacagttagagaagtggatttcttaataataataatttttttaaaggagcactttggccgggtgcggtggctcacgcctgtaatcccagcactttgggaggccaaggcgggcgaatcacctgaggtcaggagttcgagaccagcctggccaacatggtgaaaccccatctctactaaaaatacaaaagttagccaggtgtggtggtgcatgcctgtaatcccagctacttgggaggctgaggcaggagaattgcttgaacctgggaggcggacgttgcagtgagccgagatcatgccattgcactccagcctgggctacagagggagactctgtctcaaaaaaaaaaaaaaaaaaaaaggagtactttgtgggtttgattttatatg

SEQ ID NO: 12065 - DNA, 1218 bp, Homo sapiens
ggacttgtccacagaaaggcagagtgaagtgggcggccggctcggaaaagtcctgtgcccagaagggagccagttctgacctgagtgataatgaaaggcttcctggaggacgcagcttgagccacacttgatgtgggagtgaactgggatagggacactcctgctgagagaatggcaagagcaaaagcacactggtggccaggaggtggtaagagccgaggttagaaaggtgaggggtgctcatttaaggcactaacagcagaaggagcccaggaaggattttcagaagggaagggagggatgcaaccttattttaatgactggtgacagtaggaagggttctgcctggccttaagtgagggtgttgaaagtgggagacaggacctgccaaaggggaagagggcggtcacagtcaatcccagggcccagtgtctcagccaggtgctggagttgggaatgcgggagccccagtctctgcccacctgtcacgtggcagctggaaggtggcatcaactgcacaggcgaagaggggcccgcacacgagaagccatgggatgtgaagggccgcaaggagaggaccctgggacacaggaagaggtggtgcatctggggcagggcggctttcccaagatgactagagaatcttcagctggcatcttgcctgaaatatccacgctctcagccactacactaatggaacacagatgctatggggagacagaagggaactgacaaacttcatgcccctgttttcaaatagcctgcaatcttacctcttcctctgcattttttggggggagtgacattttaatgggaggcaggaggtttgtggagaagagaaaatgttttttttgtgggggtgggtagagacagtctcaccatgttgcccaggctggtctcaaactactggcttcaggcaatccttctgcctcccttcccaaagggttgggattacaggcttgagccactgcaccaagcctgaaaatgtcgttttgaatgagcccacctgaaacgaagacgcttcattagggttactggtttgagaattaagatcagttctggccgggtgcggtggctcacgcctattatcccagcactttgggaggccgaggtgggtggatcacaaggtcaggagatcgagaccattctggccaacatggtgaaaccccgtctctactaaaaatacaaaaattaaccaggcatggtggcaggtgcctg

SEQ ID NO: 12066 - DNA, 1942 bp, Homo sapiens
ccctggtgcctatcaaggaccagagtgaaggggactacatctcccagcccttcaccttttaaatatgagtggttttaaaaggaaaaaaatgaaaccaggcaacagcaacaatattctgtttttaaaatagggacaagactgttgtcactttttagacatgtatcccattccttttggctctgcaatatttggggctgtagctccttccaagcccatggtagtccctccccgagtctctcccagtagaatgcagcctcccttccctggccccttccctctcagtgacggtgactccctggggccttctcgtggaacccagaggggctgaggactgtggcctggctggcgggccagcgtggtgctcctcaggactgcagcactgagatggaacctggcctcagtttaggaacaggggccacaacagggcaggaacccaccaccctccacataggaatacaaccagtggggccacatcatgtgaggcatcagacccacactgtcagcccagcaggccgggctgtgtccttcagacccagtgctgccctagactctgactcgggactccagcttgccacgtgccctctcccctcttgaatgtactctggtcttgcagtgtgctgctgggactttcttgctcagccatcactctggtcaccttgtttgctctgggtctggctgaattttctgccctgagatctgggcataaagtggatgaaacttgaaagaccttcagtgtagatccagatggccaacctgtccttgttaagttacttgcttcttgggaatcagtgtcccctgctgagctgaaaaggaaatggattccaatctcttccaacctttaaggtgatagatagtttgagcaagactggagaatggacaacactatgaagctgtggctagaaagggactgtcatgtcccatcctttggccagattgactggggatgtccggacagatgcctgcatgggtggtgagggccacatctgcacacgagccagtggctgcttgcagttcactgctgtgatgccagagtgtgttcaaaggtgactctcctgctcttctggactcttctctcaggcaagaaaggctgcaggctgcctgctatgtgatgcctgagcacaaagccaaggaactgaactaagtctttctgttaagtcctgagtttgtcattggcaggtttacttgtggccagctctctctgcccttgggtgtctgagcaggcagaccagaagaccaggcactggacctgcatgccaaagggactggtcatctcctgaggacctgtaaatgaccctgtggactgttccgcacgatccggaacccactttttattcactccccatgtctttggccttcctcttctttctctttccctctgccatcctgacactgatagtttgtcatataaattccccgggttgtgtttttttttctagaaaaaaattaaaagggaaaacaaaaccaaaaaaaccagaaaccacgaataagaatggaaatgacaatggctgcctgtcatttttctgtcacgattttcctgatttggtttgttccctttgtctcagagaagcaggagatgttgatgaggctgtatttttttttctttttcttgtttttgagacaagagtctcgctctgtcacccgggctggagtgtaacgtggcatgatctcagctcactgcaacctctgcctcctgggttcaagcgattatcctgcctcagcctcctgagtagctgggattacaggcatgcgccactatgcccagataatttttttgtatttttagtagagacagggtttcaccatgttggccaggctggtctggaactcctaacctcaggttatccacccaccttggcctcccaaagtgctgggattataggcatgaaccaccgtgcctggccaaagatgtaatttaaaatagttagaagggacttggcatggg

SEQ ID NO: 12067 - DNA, 1283 bp, Homo sapiens
ccaagtgaggaaagtgcagttcataattgcatgtcgttttttaggataatcatagtaggggaaagaactagattgcagcatctgaagatataagtgggtgatatttgtgactccttattagttaaggaaacattttaataagaggtttttagctgaggcctgaagttagggaagagaacaggccaggaactatggaacaggtctctctggcctaattagtcaggtatacccactgatgtcactttccttccaggtgtcagctgacaggggctctggccacagcttgtggggatgacgcgatccgcgtgtttcaggaggatcccaactcggatccacagcagcccaccttctccctgacagcccacttgcatcaggcccattcccaggatgtcaactgtgtggcctggaaccccaaggagccagggctactggcctcctgcagtgatgatggggaggtggccttctggaagtatcagcggcctgaaggcctctgagctacctcgactttggacagagtaatgactccccagaaaacgtcatataagactttaccagcccctgagaggaccaggaggagcatccttgaccttcatttaacttggctcacttctcttcagacttgggtagaagtgcagagccacagaattgctttccttccccgcctttgacatgaggccttcagtaaagagctacagaacatgagtacattgttataccacagatttttcttgcattagggcacagtgttaaattttttggaggtaaatatactatttataatcactatatatagtaggagggggtatgtgtctcaggcttttctgaagttgcaagacttaaagaaataatccatctgcatcccaagtcctattttataaggatattcataaaaattccatggtgaatccttgtctgaaataggtcctcccttcccagtttctgtgtaagtctttgcatttaagacatccaatcaataatgaaggaaatttttttctgaatgtaggtttgagtgaggggcacctctgctttcccttagcaaccctcatatacctccctgcaccgttacgctgtgatggcaactggggatagaaaaaaaatggggaaagacaggaatcctaaaagggagagttattactggccacaagccctgtattctcaacagggatgcaaattggttcttcagtaaggataaaaaaaaatcacaagcagttgtttgtggccctcctaaggcccacagcacatatagtgtgtctgtgatattccattttcatggcagggagtga

SEQ ID NO: 12068 - DNA, 1219 bp, Homo sapiens
gtatctctaaggaactcaaagctcctaggccccaaagactagacctctaatagtagtaccttggacttagtggcaggtactaagtgggagaaggtaccttggcacaaggaaatgagccagaaccaacaaatgaattcatctacttaaaaaattaagtctgtttgagacaacttttgatagtattaaaatgttaaatctaattgtatttcgggaagaaactttggaaagctatctgatttttgttctctcttttgtaactgtaccattttcatggttgcctatggtcatcaagttttacatgctgaaattcttggttttggatcactgcagaaacgtgaagagggctggtgggtggtgattggagatgccaagtccaatagcctcatctccatcaagaggctgaccttgcagcagaaggccaaggtgagtgtgtccactggccctagcatttgttctggcatgggggaagggtgagaatgcttcctgtgtccatgctcatcttgatttctgcctgctctttctaggtgaagttggactttgtggccccagccactggtgcccacaactacactctgtacttcatgagtgacgcttacatgggatgtgaccaggagtacaaattcagcgtggatgtgaaagaagctgagacagacagtgattcagattgagtcctgaggcatttacttttgggtaaaggagagttgagcctgaattaggaatgtgtacattgtaggaatcctggttgtggggaccaggtctgtgggcctcaggtctggccagccagggctggtgctgtccccgcctacctccacttcctttcccttgctcactctggatccagtgacagcaggtgtcatgggtcaagcataaatcatatatagcattttcaggcatgttcctggtagttcttttgagtctgacattctaataaaataatttgtagaaaccatttgtctttgtagtgattccaaattaaaagttttctttctccaacctgagggcacggccaaaaagatctggttattttttagccaggaacgtgcttgttaatgagtatgtctggaggacagacctgctcattaggtgtgctgtcccctgtagcctcgtgagtcagcccagaggagggtacatgcgactgtggcctggcctcagtggtacccacacatcagcactaccacaagaaccaacactgagcctcggaagctagatcacaggttag

SEQ ID NO: 12069 - DNA, 1131 bp, Homo sapiens
cgtgacttgctgtacctctgttcccactgcgtattgtcaccagtgatgcactttctaaatgtgtggcttcttccattttggtattagttaggtctcacacagggaccatgccctgttgatttgcccttggccctctgtgaccgtgttgtcactaattctttattactccttctccctctccaacccacaggatttcttcaagaagttcttatatgagccattgccagtagaatctcacctggaccactgtatgcatgaccacttcaatgctgagatcgtcaccaagaccattgagaacaagcaggatgctgtggactacctcacctggacctttctgtaccgccgcatgacacagaaccccaattactacaacctgcagggtcagtgggcttgggagcacacgtgatcctttggtggttctcacagtctttgctgggcatcttcttgaggctccccactcacctctcgcctccataggcatctcccatcgtcacttgtcggaccacttgtcagagctggtggagcagaccctgagtgacctggagcagtccaagtgcatcagcatcgaggacgagatggacgtggcgcctctgaacctaggcatgatcgccgcctactattacatcaactacaccaccattggtgaggcccggcatggcccgtgtcctgtctgtgggagcctttttacacgggtcaggagcccactgggatgagaggtgcgcccgtgtttgtcagcgggatgacactgcaggggacagcaggggagcccgggcagttctgctccttctctgcctggttttagcttctctcacatttcctttttctgtcagagctcttcagcatgtccctcaatgccaagaccaaggtgcgagggcttatcgagatcatctccaatgcagcagagtatgagaacattcccatccggcaccatgaagacaatctcctgaggcaggtgaggacagcagacttcaggagagcatcctgggaacaacaaactcggcctgtgtgcccagagcacatggcatccctgccaccaacacgcccatacgcatcccccgacccccgccatatgtcctcccgctccatacctccctcaaacccatctccatcccattaccacccacatgcctc

SEQ ID NO: 12070 - DNA, 1177 bp, Homo sapiens
tgaaatttgcagggtcatttcctcagtttgtgtattaaagaaaagctgccccagccaagcgtggtggctcacgcctgtaatcccagcactttgggaggccgaggcgggcagatctccggagatcaggagttcgagaccagcctggccaacatggtgaaaccctgtctctactaaaaatacagaaattagctgggcgtggtggtgtgcgcctgtaatcccagctacttggaaggctgaggcaggagaatcgcttgaacccgggaggcggaggttgcagtgagccaagttcgcaccactgcactccagcctgggcaacaagagcgagacttcatctcaaaagaaaaaaaaaaaagaaaaagctgccccatcgcatcgcatagaggctgctatgggattagaacgtagcttgagatctgcaggtcaacaggtctgtttggcatctcaggttttcctcacataagtgaaagatgcctggtatggcctagtgttgttctgcctccctcctctgcccgccaggtatacatggactggtacgagaagttccaggacaggctcaacaagaaggtggtactcctgacaggcgagaccagcacagacctgaagctgctgggcaaagggaacattatcatcagcacccctgagaagtgggacatactttcccggcgatggaagcagcgcaagaacgtgcagaacatcaacctcttcgtggtggatgaggtccaccttatcgggggcgagaatggggtatggcgtgaccttgcagcacagatgagggactgggactgaccaagtggccttggcattggacctaatgtttgggtctgaggacggaggctcggggcttctccccagaggattctacctgctgccctattccaaagggacaatgttaacttttttggtagtactttaggaaaacagtattgtttagtggaggttggctgccgtggaggaggtagaaccaaacacatgagagctcctagttagaaggaagaatgaggtcattttgaggctgttgggctgttcacaaaggggacctccaggcagaggatgggagccttggcctgcagtgaccctccctccctccctctttccagcctgtcttagaagtgatctgctcccgaatgcgctacatctcctcccagattgagcggcccattcgcattgtggcactcag

SEQ ID NO: 12071 - DNA, 1205 bp, Homo sapiens
tcagatactgagtagcttgctgactcctggaaacttctggtttttgttagtatcataatgaaggcaaagagaactaggctgtcatctttcagcctctttgacttactctagatgttgggagcagtggttgccaggtgaaacctgggccctttgtctttttcaccatgctttgggcagtttctgtatccagagagtccgcaggttcagataagctgaagaagagtaatagaacagcaaaggaagtggcttgaaggatgtgctagtaagccctgtggtttgtgcttaggtctctgctctgctacccaaggaactggtggttcagctggagataaaaagaagaatttgccaagtcagagaagaaaccccaaccccggaaaatcctctgtctccagtctctggaggtgaagcagggacaataagctaaggtagtatcttggccatcccaggaaacttgtggcattaggacgatgaaggccatgcttcagtgttttcgtttctatttcatgagactttttgtcttcctgcttacaagtgggaagatgattgacagtgactctactatgcagggctgttggtaccaacctgagccctataggtggcagtccctggagaagtggtcacagaagatggagctctgatcccctgcttacctcttcacaacacttgtgtgcaaagatagttttagatttggtttagaagctatcctccagaacaggctcccatacttagaatgtttctagttaaggtaataaattaggcaacccaagtgtgactccactcaagtgtccttttctgtaggcaggaagggcccacaacatggcttaaaatgtagtccatggttctggcccacagtacagtgtgtatctataccaggtcacctgtgttcaatctgggagccttcctggccagtctgagtggcagccagaagggagctcatagtgtctaggagtctcaggcaaggtaggtcagggtactgtgggcaggggggatgtgtgtgataggagagggtaccctaaaccccataccttccctccctgacctgaaaagctgatctcaacagggattcacacagaattaggctgtgtttttgcattagctggtaggtgactttctcaaaattcttaaattcagaaagtatttagtaaacttgaggaaggtatgaaatctggaggaggcatccaggacccaggggtttgatagcttta

SEQ ID NO: 12072 - DNA, 1177 bp, Homo sapiens
atgactagtcttgacttgtactgtgtatattattgtgtgtatgtgtgtattattaatacaagtgtgtgctgtgacgatttgatttggtaggattgagaccagaagaatctaggtcttgtgttttaggtcagtggtcttagactaagctacttcgttttactgttccctagcagagacataaaactatggcataatcttctttatatggtgtacatacatggggagcgtccccagggtttgactataattcctcagagtttcccttataggactggctggacaatggcccagaacaagctattcaacaagatcctcaaagccctgcagtctgaccggcttgcccgcttggccaacgaaggggtaagacaccagcaatccgcccacagtgggctcttcgtagttcaggcctcactggctgactgacttgtccccctgcttgttaaccaggtagtcctcatgttttattacttccacttacatccttcaggcttgtaatgagccagtgctgcgccgtgttgctgtggacaagtgtgcaaggagagtgcggcaggctctggcaagtgtgagctgggataccaagctgatccagtggctgcacaccacccttgtggagaccttgagtctgcccatgctggcagcctacctggatgctttgcagacgctgaaggggaaggtaaggctgtgattggggtctgccctgtcctagggatagccatcctcccctgtgggttcaggatgtggggttaggcaaagtaattatctggtcggtctggagtgcatggccaaaactaatgggtttggtactaaaattgggagacagggtatcatttcacatttgtgtctggtgtaaacgttttcagccctgctggctccaggatgaggtatggggcctgaaaaccagagtatacatttagccttcctagccttgcagcttgtggtttgagtcatggctgaattgaattatcatgaaggagacgaagggtttaccagggaagagtttgttgagaaaggtgacagaagcagacccttggtgctcggagcactgggagattgcagagcaggaacgtgccgtgatgccttcaattctgctccccagggcatgagcctttagtagcaacacttagacttttataattcagtacaaacatatcattatagttccctgctttcttactta

SEQ ID NO: 12073 - DNA, 1382 bp, Homo sapiens
ctgtcactggagttttgaatgcagggaccccgcattcccatggttgtgcatggggacatctaactctggtctgggaagccacccaccccagggcaatgctgctgtgatgtgcctttccctgcagtccttccatgtgggagcagaggtgtgaagagaatttacgtggttgtgatgccaaaatcacagaacagaatttcatagcccaggctgccgtgttgtttgactcagaaggcccttctacttcagttttgaatccacaaagaattaaaaactggtaacaccacaggctttctgaccatccattcgttgggttttgcatttgacccaaccctctgcctacctgaggagctttctttggaaaccaggatggaaacttcttccctgccttaccttcctttcactccattcattgtcctctctgtgtgcaacctgagctgggaaaggcatttggatgcctctctgttggggcctggggctgcagaacacacctgcgtttcactggccttcattaggtggccctagggagatggctttctgctttggatcactgttccctagcatgggtcttgggtctattggcatgtccatggccttcccaatcaagtctcttcaggccctcagtgaagtttggctaaaggttggtgtaaaaatcaagagaagcctggaagacatcatggatgccatggattagctgtgcaactgaccagctccaggtttgatcaaaccaaaagcaacatttgtcatgtggtctgaccatgtggagatgtttctggacttgctagagcctgcttagctgcatgttttgtagttacgatttttggaatcccactttgagtgctgaaagtgtaaggaagctttcttcttacaccttgggcttggatattgcccagagaagaaatttggctttttttttcttaatggacaagagacagttgctgttctcatgttccaagtctgagagcaacagaccctcatcatctgtgcctggaagagttcactgtcattgagcagcacagcctgagtgctggcctctgtcaacccttattccactgccttatttgacaaggggttacatgctgctcaccttactgccctgggattaaatcagttacaggccagagtctccttggagggcctggaactctgagtcctcctatgaacctctgtagcctaaatgaaattcttaaaatcaccgatggaaccaaacatgagcttctgactgtgttctttcttctaggagtgggtttggggaaagttcaggcctttattctgagcaggccttttttttgagcttcaagcccatcaaccgttgttttgccttctcctgggttggaaaagccctcagctcagctcagaaggaaagggggtcaccttggctaggc

SEQ ID NO: 12074 - DNA, 1096 bp, Homo sapiens
cccatgggttctcaactgtaaggaaaaaagacaccagacttttgttccctagtgggggaaagcccttagtcttgtacaggagcagcttgctcccaagtccttttggaagctggcagagctatattcctgacagccctgactgccaggtagagcaaaagacattggtgggggtatgtgaagcaaaaggggcaggtgcacacacctccacagtgacctctgtgcacacggttaccaccaactggctggccctcctcctcttccctggcccattgatcatcccttctcacagagggtcatcattatttccaaatattgtttgtctgatgacttcctcttcccagtgcaatttttcccttcctatttcaacctctggttcctgggatgagccataccctggaactggcccacccactgtgtcttccacgtaagggagacctttgcaaagggcatccaaatgggtaggcaggtgacagccgccgtatttattttgcataatattttaatttgtatatttttgtgatttattttggcgttatgagtttgactctcggggagttttgttgttatgactcttgtgtcttttgtcacaaaacaatgatatttgctaaacgatatatggaatttatttttgattggtaataaaaaatcaaatatgtataaatcctggtgaatctacaacttgcctgtttgttctgtcagtattcagtatgttgttgagataaaagtggctgtggctggctgtctcttgtgatgggacaagggcaataaaggattctaggaccattcagcagtgaaatgcaatcagaaatggaatttctaaatatagtcaaggctgtcgtcacaggagtgagagggacgtggctgctggcagacatacaggacagatgtgctcagctgccataagcatgagtcctgtgaaacagatcccatagggcccttggcttgtgagtactggaagggcagtgggcttcagcaaattgcccctcctccctacccatgggactgaaagaagcttgatccaaaagtatgagtaatattgttttataacatgcagctgccttttcgtccacacctacaggctagtggtttcaaagtt

SEQ ID NO: 12075 - DNA, 1049 bp, Homo sapiens
actcgcagtgttgtcagttcccgtgttctgagaagaggtcatgcctgggaggaagggatcgtcatgctgcatcgaatcctctctccgccgtgtggcccccaggagagtagctgcctgttgcacctgctccacacctccccacagcctccctgcaggtgctgtgtggccgtgatgtgcagagagcagtgagggagggttcatgaaccaggtggatcctctttaaaaaaaaaaaagtttttgttatatctctagaacatttcaagtcttttcctttttttctgttcctagctatggggttttagagaagtgggaacaggaaggcatttgtctttttcttctagtttactacattttccttccgtagttcttcagctgtgtggaaacgggcatcacaaggacataggatcatagattgggtagggagggaggaggatttctggaacttttctcaaaggaatttggacccttataaatgggactgaaggtcaaaacaacagtgatatccttgcttagaaattgtcctcaaggaataaactctgagagcaagcccgggttggaaacagatgctttaaaatcctctctccagaacagtggttttttgtttgtttatttgagatggagtctcactctgtcacccaggctggagtgcagtggtgagatcttggctcactgcaacctccacctcccaggttcaagccattctcctgtctcagccccctgagtagctgggattacaggtgcccaccaccacacccggctaatttttgtatttttagtagagatggggtttcaccatgttggccaggctgatcttgaactcctgacctcaggtgatctgcctgccttggcctcccaaagtgctgggattataggtgtgagctaagatcagggattcttaaccttggctgcacaccagaatcacctggcaaattaaaaatacgtggacctgccaccagagcttgtgatttaatcagagtcggcatcagagttttcaattttttatttatttattattattattattattattattattattgagacaagat

SEQ ID NO: 12076 - DNA, 1174 bp, Homo sapiens
ctgaaccagatgagaaactttgggatcctgtcggttactactattcagatggctcccttaagatagtacctgggcatgcccggtgccagcccggtggggggcccccttcgccacctccaggcatcccaggccagcctctgccttctccaactcggcttcacctggggggtgggcggaactcaaatgccaatggttacgtgcgcttacaactaggaggggaggaccggggagggctcgggcaccccctgcctgagctcgcggatgaactgagacgcaaactgcagcaacgccagccactgcccgactccaaccccgaggagtcatcagtatgaggggaacccccaccgcgtcggcgggaagcgtgggaggtgtagctcctacttttgcacaggcaccagctacctcagggacatggcacgggcacctgctctgtctgggacagatactgcccagcacccacccggccatgaggacctgctctgctcagcacgggcactgccacttggtgtggctcaccagggcaccagcctcgcagaaggcatcttcctcctctctgtgaatcacagacacgcgggaccccagccgccaaaacttttcaaggcagaagtttcaagatgtgtgtttgtctgtatttgcacatgtgtttgtgtgtgtgtgtatgtgtgtgtgcacgcgcgtgcgcgcttgtggcatagccttcctgtttctgtcaagtcttcccttggcctgggtcctcctggtgagtcattggagctatgaaggggaaggggtcgtatcactttgtctctcctacccccactgccccgagtgtcgggcagcgatgtacatatggaggtggggtggacagggtgctgtgccccttcagagggagtgcagggcttggggtgggcctagtcctgctcctagggctgtgaatgttttcagggtggggggagggagatggagcctcctgtgtgtttggggggaagggtgggtggggcctcccacttggccccggggttcagtggtattttatacttgccttcttcctgtacagggctgggaaaggctgtgtgaggggagagaagggagagggtgggcctgctgtggacaatggcatactctcttccagccctaggaggagggctcctaacagtgtaacttattgtgtccccgcgtatttatttgttgtaaa

SEQ ID NO: 12077 - DNA, 1173 bp, Homo sapiens
tctctccagtttctggcgctgtgtgcccaggcccagccgggggcctacactgatgagaacctcatgggactgattgagctgctgtgccgcaccagcctggacgtggggctccgcctgctgcccaaagttgacctccagcagcttctcctcttgctcctggagaacatccgggagtggccagggaaggtactagacgcccagagcctggtcctcatacagcttcatcactagggaccaaggtggcccctagagtgccctgggtggggatggcactgcctggaggtcatcggaatgtccctgatctccgtgactgcccacttactcccctgtgcgggctgggtggcgagagcaaggggaaggcggtgtcctcctgtagcccatggggtgccgttctcctgcagctccaggaactgtgctgcaccctgagctgggtgtctgaccaccaccacaacctgctggccctcgtgcagttcttcccagacatgacctcccggagcaggtgcgtgctgctcccccgctgcctcctccctctcacacgcatctcttcggggtcttgtagggatccagagtcctccccatcagccccaacaaacctcccctgcccaatttctaatccccaggagggagaactaaaaatataactcactaatgagttctttacaaatgaaaaaaagcttaattttcttaacatggtcttattagcaaaacaattgccttgtgcaattagctcctgcctgcagggcccccactctcctttctttggggctccctccccagtcttcagctcctcctcgtcattcagacctcagctgaattctgtcccctgatcacccgactcccactcgcacactctcgattcatccttctgttttcttttctgcctagcatttacccatgccagaaattatgttactctttgtttccttgtttatggctgtggctttcctcgaagttacctctaccagaacagctaccttgtcagggtcactgccatattgtcccagatctagaacagtgcctagcgtgctgttcggcgctctgtaaattttttttttcttcttcttgagacagagtcttgctctgtcacccaggctggagtgcagtggtgcgatctcggctcgctgcaagctccaccttctgggttcacgccatactcctgcctcagcctcccga

SEQ ID NO: 12078 - DNA, 2246 bp, Homo sapiens
cgtgtgggaattgagcgccatgtcaggctgttgtgggtatccccctggcagggccagctaggcctgtggttccctgctccgactctcagggctgcctccctgagctccagggccagaatgcctggatgcctgggtagccagtttggggagtgggctgcaaggggcagccagcagctcccactggtgtgtcactgcatccattgccacctcctgttcgtgacctgacagggtgacacagcccctttcacactctgtcctcctatcttcctgggtagatgccctggtgtagggctgagtactgaatggtcttccatccccagcaagggggtgcagcccagggtcaggcccttcagagccagggcagaggatgcacggtggctagagccgctgcactatccttttcagagcacttcatccacttgctcctccctctaccctcggcaccctgggtgggaaagggttgatgctcatcatttattgaggggaagccacttaataaggagtcagacctaaaagggggtgggggacattttcttacctcacccaagaaagaggtcgtcacttttgctgtggccagggccccacctccctctctcagatatgtacaataatttaacacggttgcctgaaaaaaacttttgtaaatcattatagtaataattatggacaaggcccagtgtgtggctctgttttcttgtggctctctgtgctatcgtttgttcttccatccctggggactttcagagaaaggaccagagagaatgcagcaaggcactggctctagcttagcggcatgaaggtttcagtggttggcccgccaacgtggcacaaaaagcctcaggaggctgggctctcaccctgtagcataattccctcgcctgttacctcccctgctgcagtccaccaggggaagtagaaccaggctaccttctttgcccccggaccctggacaggcctatttgagcacctctgctcaccccattcagccagggctaaggctggtggacaccagcaatgatgcaagctcacgccttcagacaagtcaggatggggaaggcagggagaggcagagaggctgtgagcttagccaggccctagaggaataggcagaagagcagtgaggaattagggtttggagaatgtctgctctttactttcttaagtgtttgagaacctacagtgtttccaggatggtgccgtgtgtttggggccaatggtcaacaagttatatccttgccctaacaaatacacacgtcaagggagaaagacagatgagccattttagtacagagttgtgggggccgaggcgttagtcatctggcccgacaggtggggcaggccgacttgcaaggatccagaggttatccagggatggggaaggcattctatgcagatgtgagagcccaaagaagcacctgggaccagtgggtctggagaggaaggcagggacccaatgcccagtcagcagggaaaggtcagtggtctgtggtcattgtgtgagatgaacaaaaaaggtgggttgagctggcacatggaggattgttagctgtgtcctgggagatgggtggccagccatagaaagatggtgaccagagcagtgtgttgtaggcagttggggtttgtggggggtgagggcagccccaggactgaggagatgaggtaggagtgaggagagtactgaggcctgtctgccaaggcgttttgtgaggctttgtggtcacaaggcagttatgcttgcactggccctcaaagggaaagcagaatttgcacggagaactccatattagggcaccctccagaccagttcttcccacagtgctctgttcatggcaccactggctccctgcctcccaggttagagccttatccatcgacgctttcctcttccctgtctctcccactctgtcagtcaccaggttgtgtggttcttctgtagtacctttcccactggtccgttcttttccagcacagccactgccaccatagctatgaccacagctccattccctggccacccaatctatttgctcgtggatctaaagcccagataagattggttctgacacctcctactccaaagtgtcaagtggttctccactgcctcgtgacatgaaacaattgatgtgatgctggtaaaaccacctacgtgagccacatgttgtgtttgactcaggccccttgagatctgttccttccctgttttaggtttacccctcacatcctttgcctgctagccttcaggcatg

SEQ ID NO: 12079 - DNA, 1232 bp, Homo sapiens
ctgttttagatttttaaaacagctgtatagacattactttaaagggcacaggaatatactaggagcttaatagggatcagagctgcacatcccagtcacgccaatggagaggctttactgaacttggggattcagcccggaacactgcacctcccacagctgtaaacctgcgtgtaggcacaaggattttccaggtccccaggcagcggcctcagctgtccacccctggaggatgtggaagaccctcctcccctacctgaggtgggagaagtgaagacattgactgtccgccacacaacacagcagggaccgggcacgctcttgctcccctcaaatccccgagtgcagagagatgtggctgctttctctttaaaacctgttaaacagaacacatctaagagctttcgtttgttttctttgtagaagggcttgagttatgcatagtcttagagaacattcaaagtgatttggaagagcgctaatcaaaacaccacactaacgagcccgtttgtttttaatttccagctactgatagtctttataaactttctctgcaaaccctcaacgcagacattttcttaaaacaacgccagacctcaccgacacctgcttccccgtctcccccagctgccccctgcccctttgtggcccggggcagctacagcagcatcgtcaacagcagctccagcaggtaggcctgctgcttcctttccggttctcagcttgaaatgtgcctaaaacccgatgtcacaccctttaaatggaaacacttagcggccacaggccactgtctggtgttacttctgatggctgccagcttgtgtggacccttttacctggggtccacccccgcttcctgctgctgtgcccagctccaacagtaacccggttcccattctaatccattcattcttaccacctgtggaccgagaaatgcaccatttaactcactagagtgatattctcagtgagccaatgaacatttactaagccttacatgaagacctaaaggggattcctgtgagttgggagtatgggtttatgtgacactaattttggcctttggacaatttggcttaggacttagaagggcaggacctggtccaagaccgttgtgctgggtgaggtgctgcagtaggggatgtgtgcacccgggagggcagcctcctgaccacacagacaggatgcaggaagcatgctgttctccgaggcacggagcctcactcgtgtcc

SEQ ID NO: 12080 - DNA, 1196 bp, Homo sapiens
ttagaaattatgacccgtacagactgggttaaaatgtggcttgtgtgtcttctgcagcttgcacctgcctgcccgcccaggtgattttgcaggcacaatctgaggtgctagaacctggggctttctctgcctctgtctagtcctgctggattgtaagctccatgagggcaggagcttgcttgttgtttgctactatgttcccagcacacagaacactgctgggaaatatgttcggggctggttctcatttgtcttgatagcatccagatttttccaagtagttggctttccgtatgtccattttactctctgtccatatatatacacaacattacatagtactcatgcaccagttaccattcccagggattatgtaattcctcagtacagccctgtgtggtcttgtgtctccatcttacagatgagaggccatgatcaggcagctagtttgtagaaagctgccagggtttgcacccagccattatggctacactgctgggactcttagcgcccctaaagggaagcacttgagtggctcgttgtttatgtcaccatcaggcttccatctcccagcagatgtcagaggatctctggttttcacttctgtaacttttcaaagctctatcaccctttggagaatataagaacattctgagacagacatacagatttgtcaaaactgccgagtttgtccaaactcactgaactgtacccttaaaatgggtgtgttctattatatataagttgtatctcagtaaagttgatttttaaaattgttctcatcacaaagtcaaatggatttggaaagctttaattagagaagaaaaaaagaaaccttttttaatcagaagagtccagcctcttccaacaaaagttgtaattgctttgttttccaagctagctatttaaaaatcaggagttctggccaggcatggtggctcacgcctgtaatcccagcactttgggaggcccgaggcaggcagatcacgaggtcaggagattgagaccatcctggctaacacgacgaaaccccgtctctactaaaaaatacaaaaaattagctgggcatggtggcgggcgcctgtagtcccagctactcaggaggctgaggcaggagaatggtgtgaacccgggaggcggagcttgcagtgagccaagatctcgccactgcactccagcctgggtgacagagcaag

SEQ ID NO: 12081 - DNA, 1141 bp, Homo sapiens
tggtggctgtactgatgaagttgaagtttttttttaatattagattttgtaggttgctatttactgatctgcagttggtccctttttcagcttgaacacactcagctgtgaccccggtcacagtagggggttctgtggagcaggcggttcatcatcccgacccagtgccgggagtcataagcagtgtggcccatcggtccacccacacagcagtcacagcaatagaaactcagctgacgtggaaaacgtcagagccaaaaacagttcaagtacctctagtaggacttctgctcaagcagcttcttcacagtctgctaacaaaacaagcccccttgtcttagattcgaacacagtgactcaaggtcatacagcgggcagaaagtccaaaggggcaaagcagagccagcacggcagccagcaccatgcccacagcccgctggagcagcaccctcagcctcctctgccaccgccagtgcctcagccccaggagccgcagcctgaaaggctgtctcccgcccccctcgcacacccttcccacccagaacgtgccagcagcgcgaggcacagttccgaggactcggacatcaccagtctcatagaagccatggacaaagacttcgaccaccatgactccccagccctagaagtgtttacagagcagcctccatcgccattgccaaaaagcaaaggtaatcatctcccactgccggagatccgtgatgtgtgagggaaaagccagtgcgtgcttaaggagctattaagattatagttgtggtaaacaactaattcagtaggttcctctggctcagatttatctccagtgttggacttcaacttttccataaaaatgcaattagaggtatctgtcataaaagatatatttgtatttcttagattgtttaccaaaatcagaaattctgtggacatctgcttttcttttcagctgcctgagattgtgttattgtgatagatttagcttttgttttattgttaaaataattttgagcacaggagtaaaatggagatcatctgccttttaactccaaattaggatttctttactttagagcaggggttggcagactacagttagcgggccaaatcaccacctggttttataaataaagttttattggaatag

SEQ ID NO: 12082 - DNA, 1194 bp, Homo sapiens
gagaacttgagggtggcaggcaagcttccaggtccaggaagctccttacgctttaaaatcacggaagcattgttaaaagattgtacagatagtaagtcttcctaacagtttcaaggacactaatttcagcatttgctttcaacagtaaataatttcaaaaacaacattatttctgtatgtgcacctgtgtatattagttatgaatgcttaagagcttaaggaaattccatgttgtgtttagagttgtttgatttggatcttaaaagatttaaagtgtttgcactcattgcataccttagctgatttactctcagtatgaaatgtgaagtatagtcaacttttgccatctaaaatgatttatcaaagtagattacctcatgatgaaatctgaggaacagctgatctctctgacatgcagggatggtttataacctgtgacatatagtaattcatgaataatgtatttatcatttggactgggagcacatgatggcaagatttagtcttattcctgattttttatcctttaggtttaaaactaagagaaccaaatttcacattgaaaagaacatttaaggtagagaatacaggacaacttcaaattcacatagaaaccattgaaatcagtggatactcatgtgaaggatatggctttaaagttgttaattgtcaagagtttactctaagtgccaatgcttctagagatataatcatattgtaagtattttattttaaggtgtaatgaatcactaactttcctcaaactctgtgcaaagatatgttttcatatttaccaaaggtctttatccacaaatgcattcatttgtttttttttcacttaatctttggctaaggtatttcttcatatcttagttttcaaagttgtaaattttttttcacttaatctttggttaaggcatttcttcatatctcagttttcaaaagttataaaactttatctccgaagtggatcagataatcttagaaatcaatttcaaaattattttcagggttacgttaaagcaaaagatgttgatgtaaattcacagtccctcagcaacagagatttgtttcatacatgtacagttttttcacgttttgcagtatacggatatgtaatattttggtcagaagacagttttaatacctatctcagtaatagctgcagcatattttaacaattaattgataact

SEQ ID NO: 12083 - DNA, 1229 bp, Homo sapiens
agccaagtctgattaataaccatataccatgtcttatcagtggtccctgtctcccttcttgtacaatccagaggaatatttttatcaactattttgtaaatgcaagttttttagtagctctagaaacatttttaagaaggagggaatcccacctcatcccattttttaagtgtaaatgcttttttttaagaggtgaaatcatttgctggttgtttattttttggtacaaccagaaaatagtgtgggatattgaattatgggaggctctgattgtctcgggtgtcagcttaacattccatagatggggggttagtttttatatcctataatacaaagcatattaaatggcaatatggagtcagtcctgcatttaatgtcttgaacattttaaattacttctattaccatgttgttttttagtagaattgtttcctaaagaaaaccactctttgatcatggctctctctgccagaattgtgtgcactctgtaacatctttggttgtggtagtcctgttttcctaataactttgttactgtgctgtgaaagattacaaatttgaatatgtagtgtacgtgctattgagttgtgaactggtgggctgtatgtaacagctgaccaacatgtgaagatactggtacttgatagcctcttaaggaaaatttgcttccaaattttaagctggaaagtcactggaataactttaaaaaataattacaatacatggctttttagaatttcgttatgtatgttaagatttgtgtacaaattgaaatgtctgtacgatcctcaaccaatgaaatctcaattatgaaaaaaaaaaagtgtaacatatattatcctaacttctaatcttatggaaatcagacatagggtctgtgcccctcaaagctcaagtgtctcagcacagggccatacaactaacacccctacttatagggttagagatggccactgctacaggaaccagaatagcaggtttatctacatcattatcctactaccacaaactctcaaaggatttctcagacagtttgcaagaaataatgaaatctatccttactctacaatcccaaatagactctttggcagcagtgactctccaaaactgctgaggcctagacctcctcactgctgagaaaggaggactttgcaccttcttaggagaagagtgtttttttacactaaccagtcagggatactacagcgtttacaggaaaaggcttctga

SEQ ID NO: 12084 - DNA, 3437 bp, Homo sapiens
cactgtcattgctaactcctgtcagaatcacatggatgagtagtgggctgaatcccaaaaggaaaggggtttagagcaagtggaaacaacagatgttcactatagaaagcaagaatgaaaaccatgaagtggttgaagattagccttacagtaattttattctgatcacttaatacagtagagtcaaacaggaatccaagtttccaactttattatttttggcactgaagaattacaaagaactctagcgtctttatacctccgtggttcactggagttaaagcaatcggggcgttgtacagctcacttgagtttttaaaggttctactaaaaagtgagaattccacagcaatatgggtcattgttgcagaatatcacaaaggtctgttgtgtatactccttttcaccaggaaagggacaataatagtttttttcaatgtatatatatataagtgatctaactttttattaataaaagtaaacaactctaaaatgtatattataaagccctgtcatctttgttgagtaatagctttattgagctttatttggagaaatacacataccgtaaaattcacactgaaacttaccaattcagtgttttttattatatctacagagttgtgcaaccatcaccactaattccagaacatttgcatcactacaaagagcaacctgtacccattagcagtcacttcccttctccctcagcctctaaaaaccactaagacactttttatataacatgtagccttttgtgactggcttctttcacttttaccataatgttttcaaggctcatccacatgtagaatctatctgtacttcattaccttttgtgaataatattccatagtatagatgcaccacatttttttatccattcatcagttggcagactggtttgtttacacatttgggctattatgactaatgctatgaacaatagtgaacaaattttgcatggacatatgcttctgtaagagtggaattacagggtcatataattccaaccttttttttttttttttttttttgagacagggtctctgctgttgcccagagtgcagtggcatgattacagctcactgcagcctcacccaggctcctcctaactcagcctcctgagtagctgggaccacagtcacgtgacaccatgcccagctaattttttttgtatttttgtggagacagggtctccccatgttgcccaggctggcctcaaactcttgggctcaggtgatcctcccacctcggcctcccaaagtgctgggattacaggcgtgggccactgttcctggcccaactttaacattttgatgaactgccaaaattttccacagtagctgtaccattttacatttccaccaacaatctttgagggttccagtttctccacatcaccagcagttataattcatgtttgattacagccattctactgggtatgaagtggtatctacttgagattttgactttcatttctctaacgactaatgatgtctgagcatgttttcatgtgcttattggccatttgtatgtctttagagaaatgtctattcaagtccttagtccagttttcagttcggttctttttattgttgtaacagttttttgtatgttgtagatacaagtcacctaaagataagtgattcacagattctcccaatttgtggtttgtctcttcactttcttgatggtatcctttgaagtataatttctaattttggtgaattacaatttatttttttcttttggtgtatctaagaaaccattgcctaatctaagcttaatggaaatttattgttttatcttcatttaagagttttacatttttacctcttacatgtgagtctgattcattttaaaaataatttttcaggcttttatttgcaatatatttttaaaattttaaatgtaagatacatataaaatttactatcttaaccatttttaagtgtacagttcaacagtgttgagtgcactcacaattatgcaaccaatctccagaactccccttcacccccaccacccctccaactctccaccttgacagtcaccattctactttatgtctacagtaagtgcctcgtgtggaatcataccacatttgtctttgactggcatatttcacttagcatatgttctcaaggttcatccatgttgtagtatgtatcaaaatttccttccttttttaaggccaaataatattcagttgtatgtatatagcacattttgtttacctatctgtcagtggacacttgggttgcttgtgcctttgggtaactgtgaataatgctgctgtgaatatgggtatacagatacctctgtgaccctgctttcagttcttgtgggtatatacccataagtggaattgctggagcacacagttattctaattttttcaggatcagccgtactgttttccacagcagccatactagtctacagtaacagcacacaaggatttcaacttttccacattcttgcctatacttgttattttttatttttttttaaatagtggccatcctaataggtgtgaagtatctcagtgtggttttaatttgcatcttcctaatgattagtggtgaacataatttcatgtacttgttggccatttgtatatctctttggagagatgtctcaagtcattttgaatgagttaaatcattcaaatgggttaaatcccttaaaatggttaaggtggtagatgggtattaaaaaaataggttgtttgctcttttattgttgaagttccttgtatattctagatgttaacctcttatcagatgcatgatttgcaaatattttctcccattctgtaggctgcctttttttttttttttaaatgcacaggggttttgcattttggtgtagtctagtttgtttttacttttgttgcctgtgcttttggtgtcatacccaagtcaccgctgactccaatgaagtttctcctgtgttttcttctaggagttagagttttagcttttaaattatgtctttgatctattttgagttaacttttgtatatggtgtgagtgtccagcttttttgcctaaggatagctggttttcccaacaccatttgttgaaaagatgttctttccccattgaatggtcttggcatcctgtggaaaatcatttgaccatatatgccagggtttatttctgggcatgctattctattctgcacttctgtctgtacatatttatgccagtgccacattattttgattactgtagctctgtaataataagctttgaaatcaggaagtatgcgacctccagctttgttctttttcaagattgttttggctacctggggttccttgagattcgatgtaaatcttaggatggatttttctatttccacacacaaaaaaatcagttgggaatttgatggggggggggtacattgaatctgtagctcacttt

SEQ ID NO: 12085 - DNA, 1184 bp, Homo sapiens
acacccagctaatttttgtgttttttagtagagatggggtttcaccacgttggccaggctgctctcaaactcttgaccttgtgatccgcccacctcatcatcccaaagtgctgggattacaggcatgagccactgtgccctgccaatgccatctttgttactgtggtttttcttggtagttctgatgtcatcacctttttgattttgctaataactggtttatttctctcatgcggtgatacccttaccaaagtaaggggtgtttaattaattacattgtaccaaatttgatttaattgtatatttattttcagttggataacagggcaagattcagaggaagaaaaggatattgatgcattatgttgaagccaacatggaaaacaacaaatattttccctggtcattaacacaaagaagccaaaacaggaaacatactttttactacatctgtttggttggaccagatttcccctccgtggaacactgaagaaagtggatgagttgttttcgaatatgtataaagtaaatgattctcttgatccaagttatttttagaagaaaaacctaattgaacaggtatgggttgggagcataataaatgtgttttgagaattgttctaaagcacagaaaatggaaagactgttatttgcaaacttgactcttcaattgaattacccaattagtacaggccactgatttgactgacacagtcgataacatgcagcctatccagaaggtgtctgttgggaaagtttaggataaaactttttctttagttcagtcttttcctgtctagttctaaaatgaattgtgtttgattccttagagaagaaatacttcatttgtgctctgattcactgaagtaataacctcagcactttaatagcgtccacaggcatagctgatgctaggccccagattgtgttgcccaggctctttaccatcatcttcggactgtttttgtttcctggttacattttcagtctggcccgctctacataatgggccagtgtcagctccaagtccacatccttattatccatgattcaaaagggagagagagaacttcctttttcagggtccacaaatcaaatctataaaaggactctggtcttcccaggatcacctgcccttgcattggaccagtccctgtggaagaggggatgggggcctgtgatct

SEQ ID NO: 12086 - DNA, 1212 bp, Homo sapiens
aaagtgtgtatcttctcaaatcagtggttgcactagtcaataattagaaggtgttgttatttttaaaactataagcaaaattatgaaggcctttaaaaaatctatcataataatgaaaaagaggttgtctcccaacagtgctgtccctcaaagaaaagactggttatgtggaaacagcacgtttggagagattattctagtgaataacagtgtatatttgtggtaggcaaatttctaagaatgacccctactgacacccccaccaatgaccttgtataatatcctcccactttgagcatgggtggaacctgtttgatccatgattatatcatgttatgtagcaaaaggaagactgtctgggggtggctaatcaaatcttgtgactcctttaaaagcagagagttttctcgggctggtggcagaagtcaagagacaaagcagaaggacctcaggcaccattgctgttttaaggtagagggggctgcatgagaaggaatgcacatggctttgaggagctgagagaggccttggctaacagcaaaggagctgggaactgcagtcctacagccacgggaactgaattcagcccataagctcattcataggcttggaaaggcattcatctccagtctccagataagacccagcctggccaacactttgaatccagccttgtgagaccctaagccgagaactcacttaagcctgcttggacttctgacctacagaactatgagataataaatcagtggtgttttaagctgctaaatttgtggcaatttgttatgtaggaataggaaatgaatacagtattttaaaagaggtaaagaggaaatcttcatacttgattccctgtagtatgctggatatttcttggtaaatgcatgaataaagtctttagtagcaagtcatgtacctggaccttgttggggatgttctcgccagagatctcaattagtcttcattggacgtttgttggcaaagttgcagcatcttactgagtagcgtttggtaaaggaactgctagaatgagactataggaataggactgaaacagtgtgtaagggatcttttttatttctagaagaggtgttactttatactgatttagactgctctgagcctgtcagaagtaaattcaagaatgattaacagtggtattttagatacattaagagcaaaaataacctttgccttgtagagatcagataa

SEQ ID NO: 12087 - DNA, 1148 bp, Homo sapiens
attttccaaaatgattttattgtagtatgaactgataagtgagtcccgtgtccaagagactgtatttattactcttaaacacgctattccaaatgatattactactataaacaaagaatattaccggtctcagcaatcagtgatctttataaaagtacttttaaaaaatgatgaattatcaccaggcgctgtggctcacgcctgtaatcccagcactttgggaggccgaggcgggcggatcacgaggtcaggagatcaagaccatcctggctaacacggtgaaaccctgtctctactaaaaatacaaaaaattagccaggcgtggtggcaggtgcctgtaatcccagctacttgggaggctgaggcaggagaatggcgtgaacccaggaggcagagctggcagtgagctgagatcgcaccactgcactccagcctgggcgacacagctagactccgtctcaaaaaaaaaaaaagatgaagtatcaacatcagttcccagccagtctgcttggacacactggggtgccacaagtgggttgcaggttggttgcagacgggcagagatggattctgctgagctttcagagtgaccactggctggggcctagcgctggggcaaggttccagctggctgcctctagcctggaggagcttcatctagttacccaatgtgctgaaccaacagcatgaaatagcatcatttcctgtgctgtgttacaaagtgcaaacgtttggaaacactgatacagtacaattatttccatcactccatgttgttataatttttagttacttttcttgattgaaaagtcaatcacattgccaaaaatgatttttatgtcagttaaaggccagttgaaatttttttattaggatgttttaaatttacttttcactttcttgaatttttttcttctcaaatttccttggcccagtgcccatgagcaaatttcattcaaaaacaggaataaccttttgtcataaaattttggcaccagcttggtatactaaattactgcaaagataactgagtaccagaagtaaaaatctctgcaggtgggcttaggagtactcttgggtccctggttcctcagttgccaactctggtttcatgaagaaagaccatgctctgaaaatctagggaggag

SEQ ID NO: 12088 - DNA, 1189 bp, Homo sapiens
agatctgttgtaatgttacttccattcatttatgtccttttgtccagaaagtcaagcatttatgacgttatttgaatacaacagggtatgcatttactctttaacacttttgatcaatgtggtaaatttactttaaaatgtacttttgggatatatttgaagtcagaattgctttaaaattggaccacataaattttcccaatgctgagaaccacctcttgcatgtcagatttctatagaatatttcagatgactgccctgcgattcgtatcaccacttacttaataatctgctcaaacttggactacagtcatagttgtaagaccttaagaaaggagatattttctcatttagtatttttttgttaaaatgcctttggattttaatgaaaatactgacaactgtactttgctggttaactcactgtttctaaagccatttatatggaaaagggagtagtgatactttcagagttttatggcaaaaggattgttctgtaaagaagctttcatgtctgactttcttaaactttgaacttttccccattgtttctagtttgatagagagaatgtacggattccaggaatgctaattattgatactcctgggcatgaatctttcaggtaagagcaatttgagtcttttctcatcaagcaatctacttgaaaccattaagtctaaaagttcagcagagtcattaacctttgagtagtaatttgatctctataactaccactccacctttgtacctcattgatttagtaatgttttctttgaatacttgttttttatagagggaagtctttactgctttaaaagagcacccccttaatgtggaatgcagaaaacatgctaatacatgccaggcctatctcctgtaaaacccgttacaagtggaatattatgctgttgtctcttgtccatattctttaacacagaaaacttggtcagtaaaattattagaaatattagttggttctaaaactagctcattccacttgaggtcaattcaagtgattggtagatgagcctttggcaagttaagggctaatagtacttgaacaatttaatacatatactctattttgtttgggttttacagagaagtttaaaagtttaagaaaagtattaatttcaagattttctacttatagatcttttccttcttttcaacagtaatctgagaaat

SEQ ID NO: 12089 - DNA, 1066 bp, Homo sapiens
atacagttaatgcttataggatatacatgatcatttttagtgtttatgaggagtttcaaaatgatgagccatttgctcatccggcttctagtgaggcacacctattccagatacgttttctttacagcctggcattttggatgatttttgctcctagggtttgaatgctgctttgttttatgagaataaagatccccgcacttttgtgtctttggtacctacctctgcacatactggtgatggcatgggaagtctgatctaccttcttgtagagttaactcagaccatgttgagcaagagacttgcacactgtgaagagctgagagcacaggtgatggaggtaatgatcaacttttcagtttattgttttttttttttttaaaaatagcaagttccttgagtggaggatatttactacttttagatttaatgaacatggtgcattgtatgtatgtctttctctttgcattaatgccttttaggttaaagctctcccggggatgggcaccactatagatgtcatcttgatcaatgggcgtttgaaggaaggagatacaatcattgttcctggagtagaagggcccattgtaactcagattcgaggcctcctgttacctcctcctatgaaggaattacgagtgaaggtatgctgaggtgggaagcattgacacgtggggacttgtacagtgtttagaagttctgctgagatggtttcctcactttgaaagctgtttgacttaatacagaacacatacatccctcgctctcccttttattttagttgtcatcatacaggaaggcctgtctgtcagagtagagatgtgtgaaagtacctgcttaccagactgggcctttgccagattctaaactacactgttatggttctacactgctaaatacggttgactcttgaacaacatgagggctaggggcactgactccctggccagttgaaaatccacatatattttttgactccccaaaaacttaactcctaatagcctaccattgaccagaagccttaccaatcacatacacagtcgactaacatgttttgtatgtttta

SEQ ID NO: 12090 - DNA, 1183 bp, Homo sapiens
ctttaagcaacagggaatcactcttcttgggtcacctgtacctgtagctccttgggcttcagtttgattgtagaatctgatgggactggatcccccattagggcttgacctctagctgggccttgtctgttgaggaagttgctctatcaggaaagcagcaccaacagagaaagctaggacttttaggtcccctcgtgcctgacatgcaaaccagatgtgattttggaattctactcccttaggcaggcaagccctgttttttatttctgcttaagctttttagtacagtgagagcgggcatctggggccacagctttctttggcacgtttgttatgttctgtttaccctgtttgtgcctcgggcattgcagatcagccggcagtccattgatgcactcaaagactggttcagagatgaaatgcagaagagtgactggcagcttattgtggagctgaagaaagtatttgaaatcatctaattttttcacatggagcaggaactggagtaaatgcaatactgtgttgtaatatcccaacaaaaatcagacaaaaaatggaacagacgtatttggacactgatggacttaagtatggaaggaagaaaaataggtgtataaaatgttttccatgagaaaccaagaaacttacactggtttgacagtggtcagttacatgtccccacagttccaatgtgcctgttcactcacctctcccttccccaacccttctctacttggctgctgttttaaagtttgcccttccccaaatttggatttttattacagatctaaagctctttcgattttatactgattaaatcagtactgcagtatttgattaaccaagcttctgcagattttgtgattcttgggacttttttgacgtaagaaatacttctttatttatgcatattcttcccacagtgatttttccagcattcttctgccatatgcctttagggcttttataaaatagaaaattaggcattctgatatttctttagctgctttgtgtgaaaccatggtgtaaaagcacagctggctgctttttactgcttgtgtagtcacgagtccattgtaatcatcacaattctaaaccaaactaccaataaagaaaacagacatccaccagtaagcaagctctgttaggcttccatgttagtgtagcttctctcccacaagtt

SEQ ID NO: 12091 - DNA, 1149 bp, Homo sapiens
gtaagttagagaaaattcagcttctagaaaccctttcttccagtgtgctgctctcagagtagaattatttgtatttttgggcagtctctcatctgaaaggtgaacttttgacccaggactgttacctgtccagaattttaacatgtgcctcaggccttcacccctccctggggtgggatctaatttgagcttcaccaaggctattcatatctgttggccccaattgcaggacattctgtgagtatatttggacttacctggtcatgtgatagtggctggtagtatatatacacttctttccagactacacatagtacttcaggcttcaatgacaaaaggccaagacgttccaaaaatgtgctgatttggaggtggctttcctagcttgatggtctgtaccttacattgattatccacagtattcaaattgaaatttaaagtggcgtgttaactcccaaacacctcatctctgagcatgctttaacttcctactcatatgtttggcattttatagctggatcagtctgttttagaagcacttccacctgatctccgggaacaagtagagcaagtctgtgctgtccagcaagcagagtcacatggcgacaaaaagaaagaaccagtaaatggctgtaatacaggaattttgccacaaccagttgggacagtcttgttgcaaataccagaacctcaagaatcgaacagtgacgcaggaataaatttaatagcccttccagcattttcacaggtaagttaaatatgggaaccctctgctgtagtttcaatattctcacccccctgctccaacttaggacctgtctcacttccctttctcctctgtatctgacaccacatccactggggaggggaggggaggggaggggagagtgggcttgtctccatctcctgcatctgcaggatgtagacacagagcagcctcccgctgaagcagcagggaagagacgggggagggcatgctaagacagaaacacactgatctggggcaaacacatcaatggccacacttgaatacaacagagcggagatgtataatcctgcatgggggacagtaacaacctgagtccctgtttcaatgttttgcttcccattttctactagtgcattttgcccaggttctgctgttgtagt

SEQ ID NO: 12092 - DNA, 1160 bp, Homo sapiens
aagtactcattactttcactttgttgggaaggtgggtatttgtatttaatagttgagggtataccaaacagtttttgttgttgtagttttacttttttgagacggagtctccctctgtcgcccaggctggaatgcagtggcatgatctcagctcactgcaacctccgtctcctgggttcaagcgattctcctacctcagcctcctgagtagctgcgattacaggcacccgccaccacgccaggctaatttttgcatttttagtagagatgaggtttcaccacgttggccaggctggtctcgaactcctgacctcagacgaatccaccagcctcggcctctcaaagtgctgggattacaggtgtgagccaccgcgcctggccacgtttctttttaatagatgctgagcgtgatagtgagtaaccaacatgtttaatattcaaagttaaaatacttgagaacaattattaggtatataggaaagtggaatggtagtttctccacgtttgtctttccatagccaaaagaggcagaagcttttcttctgagtctttcagaagaaattcaaagaagactagaagccactggcatgaagggtaaacgtctaactctcaaaatcatggtacgaaagcctggggctcctgtagaaactgcaaaatttggaggccatggaatttgtgataacattgccaggtaagctcacctcagaaatgatattggtaattatatttcagtacaggttgttgtaagtaatagaaaatgaagaaaaccaaggaggagtttgaataaagacctgtaaacccgttaatctggtattctgtagaagcaggcatcagcccaaggcattcagcttaggttaatgcacttggtttcagcgaggcccacacacaggaggttggtttgacggcattgctgaccttggcagcctttgcttggcatctttgggctgttaactttactgcatggacagaaagaaagggcaaggctgcagaccaaagggactgctatagtttcgggacttggtgaaacttttttcctgaggaaaatttcaatgtagttcttaaaaacaatgatacaggccaggtgtggtggctcatacctgtaatcccagcactttgggaggctgaggcagctggatcacttgaggccaggaatttgagac

SEQ ID NO: 12093 - DNA, 1268 bp, Homo sapiens
ttttgtgaattcttgttctgtttttcactgaaaaaatgtggctgataccactgtgagatttggtgatgaccgaaatcataatagatcccttacatttcgtgagttggttagtatgtctgtaagtcacactatagacttgtttaaatgacagttgattccttagttgattttgtgactaagatacatatcttggtattattcactaataaagaaagtgacatttttgataacttgagttatacatattttaaaagtttctggttcatctatatgtggagtccaaattgagaagtagagtctagaaatacatctactagcatgattttgcaccaaaaaattcttcagcctgtggatgcttcagttatgttgcctaaagactttaaagattattttaaactagttgttttgtgcataaatggtgggtattttgtgttaataaacttgttattagtagcttattctgcatacttaactatattccctttcctaggagttggacattcaatggaatctaagttggcatctttgggaattaaaacttgtggagacttgcagtatatgaccatggcaaaactccaaaaagaatttggtcccaaaacaggtcagatgctttataggttctgccgtggcttggatgatagaccagttcgaactgaaaaggaaagaaaatctgtttcagctgagatcaactatggaataaggtttactcaggtactgatcattgaacagattttgccatctgttgctctttatatttttacatagtcctacctctacaactaaaccattagaccctcaatgcttgaaattaagtcttaaaactgttgtatccccagagccttaagaaggccttttaaggcactgtgtggtaaggtgtagccccagataagactgagactgaggaaacttagctcttggggaaatatactaaaagattatgctttggaggccagttattagagaacttgagattataattattctaattaacagtgaaaaaataaaaaagatgagaaaaatatttttaatgttgaaatattttttaagctgtagttaaaattaagtttcagcaaacccctccttatgcaagcttttggaaagctgcagcacagatggctgagtagtttccattttccttcagattatggatttggatatgtttttttttttttttttttttttttgagatggagtctcactttgttgcccagggtggagtctcactttgttgcccagggtggagtgcagtggcgcagtctcggctcact

SEQ ID NO: 12094 - DNA, 1205 bp, Homo sapiens
aactattctcagacaagcagttgggatgactggccactttttccttctgtattctaggcctgctacagtgagtggaatttaactgtgatattttggttttaggagagtagcaattactgatttgtctaatttttctgttccttaaaggattctcataaaccattagattaaatgttttgacagttcaaattcacccaccggttttcaactcttcaaaggtttatagaagtattgtcagtatagagaaactgaaataataatttatgctgtgtttttgtttttttgtgtttaaattttttttgttggttattttactcctcaaacattttcctatccaatatgctgtattttggtagttaataaggagaaagagaacacactaattaactttgcagttaaaagttgggtgactaaaatggtacttcagccaattcatttaaaatgctttgtgaggaaatagaaaaaagagaggataagaagactattttgcaacattgggtctaccagatggtggctgtggctgtgattcgttgcctttgctctgtgttgatagctacactcataacattgaagctgtcagttgtgatgaagcgctggtagacattaccgaaatccttgcagagaccaaacttactcctgatgaatttgcaaatgctgttcgtatggaaatcaaagaccagacgaaatgtgctgcctctgttggaattggttagtatctagcttatcttgtactcaaaagagttgctttgagattcttgaatatcagttaattttatggagtttttctttttattagcttcctctcacttgtaaaaccgtttttagcattgcttacaattgtgtgacacacgagataagtgctggaaatataagtaaatggttgataatcttcgcaataaataagttagaatatttcttacttattcttaaaaaattgggaaggtttcattcaacatttgtaaacagttttttttttcccaaaagtgaacggaaaccgtatttaaagctaggtggtggtatgggtttagagttgcgtgttaagtctgagtcttgttactctctgcacttcagcctcccggcacatggagctattcctgtcttcactcagttctagaagtcaccctgactccaagtgctctcagtaactgtccagtctctcctccatctccatccatgctgtctttaaaccttgtactttgtttcca

SEQ ID NO: 12095 - DNA, 1616 bp, Homo sapiens
aattcaagtaaggtttttaaatccatttttatgaaagttatttgtagtatattaattcagcagatatttattgaccatgtagtaaatgccaagcactgtgcttcagaactgggtatttacagcttatagattccaattaattttttatgggaaaaataactgaaaagttttttgggtttttcttcagccatgagaaatgttctattttatttcttctttgggactatctgaagtgaaaataaaaaacaaacaaaaaacacctaaagggctgttaatattctagaatttttctagttatcttgctacttttgcaaagaatgatcttttgtcaaatcagaatataaagtttgtggtttaagtttcagggtttttttttttcattgtcaatattcaatataagaattttctgtttttaaagggggaaataccaaactgtgtaccactaagaaaatgatgaaatgaaaaaattgttttaacctaaaagtcagatattattaactcaaaaattttttcctgctttagaaatcacatcgttaagaagattgaaacggaaaatgaagtcaaagtcaatggcatgaacagttggaatgaagaagatgaaaataatgattttagttttgtggatctggagcagacctctccgggaaggaaacagaatggaattccgcatcccagagggagcactgccatttttaatggacacactcctagctctaatggtgccttaaagacacaggattgcttggtgcccatggtcaacagtgttgccagcaggctttctccagccttttcccaggaggaggataaggctgagaagagcagcactgatttcagagactgcactctgcagcagttgcagcaaagcaccagaaacacagatgctttgcggaatccacacagaactaattctttctcattatcacctttgcacagtaacactaaaatcaatggtgctcaccactccactgttcaggggccttcaagcacaaaaagcacttcttcagtatctacgtttagcaaggcagcaccttcagtgccatccaaaccttcagactgcaattttatttcaaacttctattctcattcaagactgcatcacatatcaatgtggaagtgtgaattgactgagtttgtcaataccctacaaagacaaagtaatggtatctttccaggaagggaaaagttaaaaaaaatgaaaacaggcaggtctgcacttgttgtaactgacacaggtagatacttattaaaattgtcttcttaagaaacagtcatgcttgatcattttgctcttatgctattattggtatttctggtcaatatgaagttctcataaaagtctctaagtatgtcaaatcatgtaagttacagtaagcataacatagaaagctaatttattaaaatatttttaaaacaattagatataattgtggctgactgaaaattttcagagaatttaaacagtaagatggttgggattctgagcattcattcctcacgtagaccttatcagttggtgaagttttgaactgtgttaatataacatctatccagtgcttaaactcctgtaagaatgaaattggtttgataagagtaattgttaatttctagaagcttgc

SEQ ID NO: 12096 - DNA, 1145 bp, Homo sapiens
atttttataattaatgagagactttcagctttactgttccggtcccttgtaccacagcagggaatttattaaaaggaaaaaggggagaaaatggaaaaagaactacatgttggggaggcagttttatcagctcgaatggagtcaacctcagtgtcctcagaagcagagtgtgctgtttacttggactcagtggtgcagaggaaaagggaaatgggttcccggggctggagccataggtgttttgagacctgtctcttaggcaacttggtgaggtattaggttttacattttgagagttcacctgcagtgaccacattgccttccatgttggggtgacgtgtatttactttcaggtatcgaggcttttttaaagccctgggaagttgtcacatcctctgtggggaagaaattcctgcacacagtctgaatgtgatactgactgtctttagagttctctgcagcagaagccctactcttactatctcaagggtgacattttaattgtcactgcattagataagaagatatctcggtttgtagttagacataattgaggataaggcagagttcgggagaagcagtcagtggcacttgagtcacatctttttcaccatgaacaccagctgctctgcatccataccctgatttgacgtagacattcatgtcatcagaggaaactcacttggttcctgagacatttacatgtctgcagcccatttttgtattctaatttgctttgcatgctaacctgtccacaaaccagatttaacactacctggaatggcagagagacactggccagggtcttaaaggagaatctgagctgcctttgggtgtggctgtgtcttaagtagccaggtcacaccaagctccatcctacgggccccaaagcatttggacagcactatgcctccaaaggcacaaaacatctcatcgagggtgggaactatggagaaacaagcagtgcaaacaactgaaatataatattctgtgtttgccatcacttgagacatcatcagataaatgcattctgggaatttggccagaacctatcagaaaaagtaaaagctggaaacataaaatacagaatttgagattttccctaattatagtgaaatttccataattatttccctaataaacag

SEQ ID NO: 12097 - DNA, 1207 bp, Homo sapiens
cctttgaggacgcccggggtctcccacaggcctgtgagttgcctcggcatatgacgcagaaccccaactgttacaacttagtttggatgtaagatgctctgaggaccctgcccacacccctgcgtgcattaggatgtcgctggcctttgctcacctcagaggggagaaaaggctaaagatttgcagtttgacagcccagcagggaggaagcatcacacagcgttaggagccgtttccttcaggtgttaaggaaggggatgcccctgaggttctcctggctagtcagggtggcttcacccatcactggtgggttgcaggaacagcacccaggactctgaggagggacagagaagcaagggggctgctgaaatcgcagagacttttgcagcatcagatctgaggagtaaaacggcacctctggccttcatcttggtgctgcgacaattgtggaggcaaagcattctttctgtgactattttgttcctgtagacagtcagcgatggccagagggtggtgtggtgtccaggggtccatctttccagaatccatgcctgtgtaatgctggtccatgcttctgaacctgtgtctgccaagcgcctatttcattcagcacaagacatacgattttagaaggtgaggggaggggaggctttttctacctgagaaggggagtgtctttgagggccttaaaaggaccatggcccaggaatgggggcgctggttgggcttggagctcaggctgctgtggatcccggcgcatcagttctgacttgccttacctgggtggacagcagtgaatctccacctgtcttctccagggagctcccatgttggggctgaagacgagcaggggcaacctgccagcatcacagaattcagtgtagtttatacatttcgattcctttcatctcagcaaaatgggcactgccagagccatttctgatcacaccaccatcctggaccatgtgactggaaggtgggtaaccaagttcaccagcaataaaacccagcgcccaggtagcctccagcagtgcggcttcctggcaacaaggtaggccctggtgcagggcaagccgcagcgaccatttcagataccgtccacagccaggaccgctgagaactgggacagtttcctgggatgagtgccagcctgagcctgcatggtgccgccgagcccggggtggaggagggagccaggcttcgcttc

SEQ ID NO: 12098 - DNA, 1466 bp, Homo sapiens
atagtggtaactaagaataggatgtgtgagggcatagtatttcattttttcatcaaaagacttcacccgtttaggagtcgtgcccttttgctgttgagtggccatgctcaagtgcagcatgggcagatcacggccaggctttcctcacttctgcaaagcgaatagattgttctctggcatcatgctggcatagtgttctttcattgtcttgtttgcattctgactgaaaccctgacttcctgtgtcattcctgcttctgattttgaagtatgagagttctagtcacatcatccttattaagagatttctttgcatactttattaagtgaaatgtgtgagatgtgtagagatgttagcttcctgataggagcaactatcacggctctcattacaggccattttcgaccagagtttattcgtccaccgcctccactccacatttgtgaggatgaacttgcttggctaaaccccacggagcctgaccacgcgatccagtgggataaatcgatgtgtgttaagaatagcactggtgtggagatcaaacgaataatggccaaagccttcaaaagccccttatcctctccccaacaaacacaggtgtgtattgattgtaagcattttcttatctttttttttaaatttatttttaattaaaaaaatttgtttttgagacagagtctcactcggctgcccagggtggagtgcagtggcacgatctcggctcactgcagcctctgcctcccgggttcaagtgatactcgtgcctcagcgcccccagcagctgagactacaggcatgcaccaccatgcccggctaatttttgtatttttatgagatggggttttgccattgttggccaggctggtctggtggcttcaagtgatctgccaaccttggccttccaaagtgctgggattacaggtgtgagccactgtacccagccattgtgagcattttcttatctttaatccaacaagagtttattttttttttggaaagtggtaagcaataaactaatcctgtcactgtgagtgagcagtaggaagttgcaaaggtttttgggtctctgaagctttgttctactctttggtaattttgctgtggtggggcaagaagtctgatggcaaaaatgttctaacttttctttgtgatgtttgtccctgggagaggtggggtagtgggggtgtcactgctgtgtacagtgggacactacacaatggttacgtttgagctgatggtaacgcttctgatggaaagtggagttactgacaggctgtagggaggaaaacaaggctgggaaggggaacccgcccccatcacacagctggatcgtggtgtatttgagattaaagtagcccccactgcccgagtgtgagactggatgactctcctcaggaaaggcaaggccactcttctattggttggtgaattttatccagtttgcacacttttgagttagaactttt

SEQ ID NO: 12099 - DNA, 1188 bp, Homo sapiens
catcacagacaccttggttgcagttaccatctcagaggggcccaccgtttagatctctgagccaacatgggccttttgttccatgtctgtgctgttagccccctccttggaagttagacacatgaagacatggatcagagatttccaccacagggcgggagaaacttttgatcatttttagtttctccttttatattcacatcacccacattcatgttcactttggttttcttcatgtagttactttcccttgttcctcactcaatttgatggcaccgaggggagacagaagagagggtgatggtggtgacagcagccatcccaggagtgtgatttcctgggctcttgctgactttgtgccacctccaggaagattctcttcctgatcactctcccacaccatcagttagccctcatcaccggagcagagttcctgactgcctttcacagagaaagagtcatttcctgtgtttctctgcaagcagggatttctccttggttttgaggttgaagtctctttgacccgtttataagagcccaaccctacccccccgcaaaaggaaaagcagatgataggtaaaaatgatgcaattgcagctggtaggatgtctgatgccaatccaggaaatgggagccatttcttttgtactagatttaatgatttagtgactttgaactgtgctgtaattttttttcttttttttggtagagataggggtttcaccatgttgcccaggctggtctcagactcctgagactcaagtgatctgcccacctgggcctcccaaagtgctgggattacaggcatgagcagtcatgccaggcctgtgctttaaataaataataagcctggacctttaaaaaaaaaacatggctttacatgcacaggtacaggctgagctcacacttaccatcctttttaatttcacctattatatggatatactgcggttgactaagtcattcccctgttgttgttctgcaaattatttccaagcttttcttactacaaatagcagcaatctgcacattttaatactgattgtttttctctaacttctagatatttcctgaaagtttcctggttaaagagtatgagttatctcacggctttttttttttttttttttttttgacacagggtctggctctgttgtccaggctggagtgcagtggcatgatctcagc

SEQ ID NO: 12100 - DNA, 1208 bp, Homo sapiens
tcctataactagtaaataaaaacattaaatattaaaccttagcgctttgaagtttttaataataaaagttgaagtaaaataaaaatgtgtctctcaaaaccttttttatgagtctaaagaagactttgtcatgtagggagatctccttacaacaaagtccaagagtctgtgtatatacatttgttgatctagaattttacctcatattaaaaaacaacagtaatactatcagcttaacataagcagatcttttttttattgtcatgggatttgaactgtatatgacatctttgacttttttttggtgtcttctattttttttttttaatctctctcttgactttatttggtcttttctatcaaaagccataggagctcactttctcatgaaactgggtaactataaaagtcttacaaaactgacattgtggcaatttatggttaaagaacttctcatcttctcctgtccctgctcctgcttgccttactctctcttttctgtcctttgctttaggatctgaccgcactggccaaagagcttcgagcagtggaagatgtacggccacctcacaaagtaacggactactcctcatccagtgaggagtcggggacgacggatgaggaggacgacgatgtggagcaggaaggggctgacgagtccacctcaggaccagaggacaccagagcagcgtcagtccccggtctcttttagagcggatgagagtattctctcagagcctgctttccactgggacctagttgttcctagactattccgtgaccccatgagcacttactatgtagttctcgtggattcagcagcaggtcgccttgtgtttccccttctcttcgttggtgtgtgcatatgtcagtgcttcccccagcaccccagcgtgtactttattttttccttttgatttgaggatatatgatccaggggaaatttcagtttggtataactactttaattagccataattattcattctaagtttttgctcagaaacaaatggcactggaaagaaattctttgttaaagggagaaagctaagcagttgcttttttggaggaggctttatatcggtagcctcatctcatgttttgattttgagaaggcgaaaagcctaaacaggatctccttgactccagagattaaggcctttcacgtctggattttttctccataggtcatctctgaatttgagcaa

SEQ ID NO: 12101 - DNA, 1193 bp, Homo sapiens
agggaagttatttgcacagaatgctagagccataactacaaacagccttgtgcatacttttctagtttgcattcagtaataaagaccgatatttgacattttcatgggtttctattccaaaactattttggttttattgtaattaggtcactgtctctgatcactcatgatttctcttccctgccgtctctcatgactggattgataaaaatctgtgcactaaactctaaactcagtgggtaatttttctagataggcgtgaaaggcctaaggaaaatgaaatagatcaaccactgatgcaagtaactacttcacaggataggcaaggtggttacaaaggcagagttccttgaaaacaaatccttaaatgctaggcatttaaattttaaattttaaaaagatttagaagtataaaaatatatttttattaagtaagcaacatcttttcagggctgtttcctcatctttaacggtttgcaatttttccctccccaaaagcatatattcgatccaatcagacaatgggctggggagagaaggccatagagatccgatctgtggaaactggtcacttggatggtgtgttcatgcacaaaagggctcaaagactaaaattcttgtgtgaacgcaatgacaaggtaatagttcccttatggattctttttagttgctctatcttttaataatggcttgttttccatggagtttgatgattaatttccttggagttttgataaaaataatcaaggaactttttaaacgttgctttttagtcatgtttgtgaggattggggaatgttttgctttttgctatgaggggatagagatatttttctctgtagaaattaacatatttgggttttgctttgtatatgtatttttaactctattagatgaccagtctaggctataattagagatagggaagataaaagctgccagttcagttggctggaattcttttgtgagtggaaggaaccgccgtgccatttgggtacatcaaaaggttcctctgacctaatgtgtgtcaagaagatgccccttgttagtctgtgagtggtgaaattgcttcctaggtttgcatgacagaaatgttgcacagtaaaaatcatcttatgcagacataacatacctcctgcaccagagaccccatggcatgacaccccctttgcttttcaaaactggccatatca

SEQ ID NO: 12102 - DNA, 1258 bp, Homo sapiens
aaaaaaaaaaagaaaaagaaaacgtgtgcattttgtataatggccagaactttgtcgtgtgacagtattagcactgcctcagttaaaggtttaatttttgtttaaacctagacgtgcaacaaaagttttaccacagtctgcacttgcagaagaaagaaaaaaattcaaaccacatgtttattttttttttgcctacctcattgttcttaatgcattgagaggtgatttagtttatatgtttttggaagaaaccattaatgtttaatttaatcttaataccaaaacgaccagattgaagtttgacttttattgtcacaaatcagcaggcacaagaactgtccatgaagatgggaaatagccttaaggctgatgcagtttacttacaagtttagaaaccagaatgctttgtttttaccagattcaccattagaggttgatggggcaactgcagcccatgacacaagatctcattgttctcgatgtagaggggttggtagcagacaggtggttacattagaatagtcacacaaactgttcagtgttgcaggaaccttttcttgggggtgggggagtttcccttttctaaaaatgcaatgcactaaaactattttaagaatgtagttaattctgcttattcataaagtgggcatcttctgtgttttaggtgtaatatcgaagtcctggcttttctcgttttctcacttgctctcttgttctctgtttttttaaaccaattttactttatgaatatattcatgacatttgtaataaatgtcttgagaaagaatttgtttcatggcttcatggtcatcactcaagctcccgtaaggatattaccgtctcaggaaaggatcaggactccatgtcacagtcctgccatcttactttcctcttgtcgagttctgagtggaaataactgcattatggctgctttaacctcagtcatcaaaagaaacttgctgttttttaggcttgatctttttcctttgtggttaattttcctgtatattgtgaaaatgggggattttccctctgctcccacccacctaaacacagcagccatttgtacctgtttgcttcccatcccacttggcacccactctgacctcttgtcagtttcctgttcctggttccatctttttgaaaaaggccctcctttgagctacaaacatctggtaagacaagtacatccactcatgaatgcagacacagcagctggtggttttgtgtatacctgtaaagacaagctgagaagctt

SEQ ID NO: 12103 - DNA, 1149 bp, Homo sapiens
aaggtttttttttttttttaaggatagaggacaatttgttgtgctgtgctgttctaggtgttgcaaaatgtctagtagccccaacttctgcctggtagatgcacacccaaccaaaaatactcccgcttgtatttaaaactcacttaggttatagctaattcccaggcactgtctgtagagattctgctcaggtagggctctagaatgtccaagaggctgcacagctaggcatgggaaccacggattcaagccatccctctctctgactcaccagatccctctgacatatcttgggccagtggctgtccagcctgggttttaaggagctgggtttcagtgaagaatgtcagtaggttcagttctcttcccagcccttttaatgcagaggcccccttgtcagcctagaaggctgttctaagctcctgtgcaaacccctcttgtgaacccttgggtgtggccatcctggagatggttgactggtgatccagatttcagcctctcccttctctgctttgcccagtgtcatgttcaggcccccggctttgtcaaaagagagaaacacttttccctgggtctcaatcctttgaagttccattgggtgagtcagctccccacttagcttcagaaggatccaggacaggttgtcctaaaattaatacctgcacattcatggacagtgcatggtgagaggaggcaaagatggcagagacaactataactggttgtggaaaagagttgagggagagaagagaaaatattattaaatggaagagattgaaaaatactgaaatcaagtgcaagaacctttaatgggcagagttaaatgacacatttattcatccaataaatatataaaatgcatctaccacctactaggcttcattcaagacaatgataatacggcagtgtataaaacagaccaaaacctaccctcatgaagcttacattctagagggggtagacagttaattaacaagaacaagaagtaatatatatagtaagtcagatggtgacacatgctaggaaaccccagtagggacttcaggtaagacagagatgtgtgtgtgtgactgtgtgtgtgtgtgtgtgtgtgtgtgtgtgtgtgtgtgtatccatgcaacatccaatgatctgggatacctatttggc

SEQ ID NO: 12104 - DNA, 1239 bp, Homo sapiens
aatacataaagaactcctacaattcaacaacaacaaaaaaaaaaattaaataacctgtttagaaataggcaaaggagaggctttcgtggaggcagctagcctgagtctggggagcactgagctgcgcgttgtgccctgcactgctcagactagtgagcaatacggtcaggatggctaaaggtgaccccaagaaaccaaaggacaagatgtctgtatatgccttttttgtgcagacgtgcagagaagaacataagaagaaaaacccagaggaccctgtcaattttgcaacatattccaagaagtgctctgagaggtggaagacaatgtccgtgcaagagaaatctaaatttgatgaaatggtagaggcagataaagtgcgctgattgggaaatgaaggattgtggaccagctaagggaggcaagaagaagaagaatcctaatgccttccaaaggccacagtctggattcttcctgttctcttcagaattccgccccaagatcaaatccacaaaccctggcatctctattggagacatggcaaaaaagctaggtgagatgtggaataacttaaatgacagtgaaaagcagcctagctacatcactaaggcggcaaagctgaaggagaagtaggagaaggatgttgctgactataagttgaaaggaaagtttgatggagcaaagcgtcctgctaaagttgcccagaaaaaggtgaaagaggaagatgaagaagacaaggaggaagaggaggaggaggaagaggaggaggaggaggaataaagaaactgtttatctgtctccttgtgaataacttagagtaggggagcatcgtaattgacacatctcttatttgagaagtacctgttgccctcattaggtttaattacaaaatttgatcacaatcatattgtagtttctcaaagtgctctagaaattgtcagtggtttctgtcaaatggccatgggtgtctggagcaccctgaaactgtatcaaagttgtacatatttccaaacagtttttaaatgaaaaggcactctcgtgatctcactctgtgcactttgctgttggggtgacaaggcatttaaagatgtttctggcaattttttttatttataaggtggggttaactatatggttattggctagaaaacctgagttatcaactatatatatctatagtttgtgaaaagaacaaaacaaccaagacaaactcttgatgctccttgctcggcattgaggctg

SEQ ID NO: 12105 - DNA, 1102 bp, Homo sapiens
gtgagttagtttctcagcctcagtcccctcatcaggaaaatgctgtgttagcactttctgtgaagaatgatcaaaggagtggagattatggagattataaacacacttgacacagtaagtgtttaagaactggtagctgatttttacaaagttatgggtcatagaaggcagtttagagaaaagggcaggctttggagtagctcagttgtattataaccttggcttctttactcacctaggacatacattctctctttagctgtagcttcctcccttctgagatggaaattataagccatctcacagtgttgtgaggattggagctcaagtgtgtaaaatgcctcctctgtgggctctccttggagagttcttgtatcctattgattgtcatcaaaggaaaaaagtggcaggatgatggcataagtgggaagaaccttgagtttaatagtctgaaaaagtggttacaggttcttgctatgcttttcctctctgtggttttctgaacccatcgcctaacctgaagccttaaacttcatctgcaaaaatgttttgtggcaggtaagatgtcttttttttcttccagtacttcccagtttaaaactaagagtacttccttgcttataactaattctattaatattattctaggtgactctgaagcagaactcttgagatggaaggattgtcatctgaggaaaaaaaatcaagattaagagaggaggaactagaatgagattcacataccgtctctcctccaagggaaggagagagtggtgatgcctgcccactccttcctgggcagaacatttgtagcatggaacattggagaatttgcagtctgctgactttctgatttaggaggttgatggggaggccttataatttgcatttctaacaagttctgaggtgatgcttcaagtatgtccaggcagaagggctgcctcacagagaattctgccataccacatgggaattgaagtcacagacatctctaaccctcaagcctgaaaccaaaagactgaaaaccaacactacagtggacaaagaacatctctgaacttgtgtggggaccagtgacacaaggacctaaggtctctctctt

SEQ ID NO: 12106 - DNA, 1194 bp, Homo sapiens
agattacaatttttggtaaattatccaggaagatcttagtgaaaaatgacattttagtagagagacctgtaggaagaagaaaacaagctaggattccaggcagaatacaagaggctggatctggaatgtgcccatcatataccaggaacaacaaagcagctatcagggctggatggagaagtaggaagaacgagttgtactgggggcaaacgggagagattgtcagatcatgtaaagctttgtaagtcattgtaaggactttggctgtactcagatgagaagccactagaaggttttaagcagagtggtgacatcattagatgtacattttgacaagatgactctggctgctgtcctaagaagtgatttaaggtgtgtggggaggggaagcggtgtgtataagactggaagcagggaaacaaattagaagcctgtactgtaatccaggcaatagatggcagcagctttgactacaatagtaaatttggtgggttggagcatgcatgtattttgaagatagagccaataggatttcctgaattttgaggaaaaagtcaagtcaggtaaaactctaaggtctttgaataatacacaaatgaagggcctgttaactagcttaagttatgctatttaaaattatttaatttcaaaaacagttttataaaaccacaagcaagtgattttttcttttttaaagaaaattacatttgattaatcagtgttgttgattggttaataagtacaaagtgtcctaagatccttaagtgaactcttctgtgtctattatatctcaagtggatactattgatcaattaatttttttttagggccttctatttgtaaggcaccgtcataggcaatccactagaagcagtgagagaagacagagtaggagggtaggggtaaaggggagtatgttcctctgagttttaatctctgttttacaaagaaaaatttaatgattgagattattctccaattatgaagaatagtcgaagaatacatgtctgctcattgtcttttggaaaatacacacacagtctgacctttgatcaagaatgcattttagattgaccattttagcttgatggttactttacttactagtacagactatgtagtggtgttaactttcataaatatgggttacactgcatatggcttttaatttacttttgctgttattcagccagt

SEQ ID NO: 12107 - DNA, 1616 bp, Homo sapiens
cgattttaagtcagtgggaacttatttttagttactcaataaaattaatattttatttgtattttaacttacagagtaggttggtaataacagctgaactgtgtaacattgttgcttcaaattgaagtttatattatgaacattcagaatcaatgctcatgtagcagcatattattgagctattttgagtttgaaatgtggagaaacgctaaaccatgtactatgtgttaacataatcccaccttcttagagctttgttccttctgaaggtgtatagatacagcttgtcttgaaatgtctttctccacataatgaagcatgctgaatgctgggaatctggagcagcagccctgggagccctgagttttgaagtgttttggtttgcttcaaaggttagaagaacttgatatgtatggcaaacaactttagaatactagttactcactaacatgaggcgggtaatgttgctctagattctatattccagtaaagccagcttttcttattattggagtaggcaaatgaatggcattagaattagtgggtggcttgtaagttgtagttataggcactttaccacttcctgccattagcaggcatccttgttttttcttttccctctttgttccttcttttccctttctccttatacattttctttctctactttaattctccttcctccttactgtagatcccaagcttctagcttaggtttgcaagtcatattgcttggccctccacattcactgagaggtgaagataggctgaccccctgtcctcttacatttgagggatcatagactgctgtgtgaattctggaaagtctcaggtccctaccagggcactgaatggcttctcaatggctgtagagacagtacagttttccaaagcagcctaattcatctggacagctaccaggcactttggaaagttggttcagttactactatgaggccataatatatttgctggtattaaaattcttcagaattggaattactatttgaaataatattttggttgacttaagttttgagagacaattctaaaattgatctagagactcattcaatagcaatgtgaccttttaaatacttacattaagtaaaactgccagtagattaaatcatatatatatatatatatatatatatatatgtaagagcttcctctatttactactgttgaacttcagtaatttttagaggctaaataatggtcagaatgtttttaagtgtgctcttttattacatgcttgtgcaggttttgtaattcagtacagaaaagtttaaccttgtacatttttgtatgtaaaaagtcttttaagtagtcttatccttatttaaataaacagaataaaattaccttgagtaggtctgttattcttattaaaatggaaaaatgctctgtaatgacttgatctgtttttatttgagtgaacaattttggaaagtattctttatagtacaactttctatacctggattgattaagatcagatgtgattcgagtagtccagccatatcttgtagcccttctttgaatgagagggtggctggagtggtctggtgctgggatatcacggtgctacagagcctgacatgttgactgtc

SEQ ID NO: 12108 - DNA, 1110 bp, Homo sapiens
cacccaggctggagtgcaatggcacgatcttggctcatcacaacctcccccctcctgggttcaagtgattctcctgcgtcagcctcccgagtagctgggattacaggcatacaccaccatgcccggctgattttgtatttttagtagagatggggtttcttcatgttggtcaggttggtcttgaactcctgacctcgggtgatctgcctgcctcggcctcccagagtgctgggattacaagtgtgagccaccgcgcctggccccattctgaactttattaatggctcatgtaaatctgaacttcaacaatcttgattcttacgaggaatagagatgagtctccttttcctttgctactaatttggctaaaattgcatagcgaagttttaaactctcctgacctctgttttgtcttctgtgaaactaggggttgcctgtaatgtactttcacaaccttttatagccccaactttcgctgtgttaaaattgagatgggacaggtccttgattattagggatttttttttcttcaaagtggcatgggatgaactgatctatgtgtaaattgatgttgctgttgcttttctctgagtgtagttaggagggctggaagtatatgggtgcagagatgtagaaaggctacgttgttcatcctgccaccgacaggtcagactgttctcctggctatgttttcactcagttgtgtacctgcagttcatacctacataggaccagccatgggccaggcactgtgctgggtgccgtgggaaaaccacagcaaaccagacaaacaccagcctttggggagcctgtaaaccagtgtggagatcttacaagctcacagtccactgtaatcttaattaacaagtatggaaaataactttcgccatctctgggtgggggaagcacatatgggaagtccccctctaacctctaacccaacccccaaggccaggcagaattcatttgaagcattctggaggataatattttcttcaagatcctcagaagctcttcagtgcacaggcaactcccagatactggaattgtcacctgagctgagacattccacatgccagttgtaagccaggtctccaccacagctggggt

SEQ ID NO: 12109 - DNA, 1182 bp, Homo sapiens
tcacatgtgcatgtacacacacacacacacacacacacacacacacacacacacacacacggttccctgcaaatggatgactttagatgcagttaacaccatccaaataatactagaaagaataacactggaataacaccatccaaataacacgagtaccttcaactaaaaagcggtcaccagagccctccccagcaggaggcctcttggtagctggtgtcagggccgcaggctccctcagccagcatcagtgctccctgacctccctgctgaggagtatgtggcttccaccctgaagccaaacagaaagctcatgcagtagaaaagcctaaaccaagtcccccaaactaatctcacaagcgttttcccagcaaatgggccgtgataattatttctcctcgagtgcctaaagtgtgctaggtacctgccaggtgcccgaatatgtttttatttcatcttcacagtaagcctactagggaaatcataatagcctcattttgcatgtgagaaaactgatactcagaagttaagtgaggtgcccaagaacacacagtacgtgctgggactgacatttgagcccagtgtggcctgactctgcctcttgtgattgctgttcagtctcaggaattgggggtgctgattggtgtgggagggagatgcagttcctgctaggcatcaatactggcgactcccacccacacgactgttgaggttatttgctgcccttgcgctagcccccaaaatgctaagggaacagttccccagttctgcctggaccctagggattcacgtctttgtaacttttcctggttccttaatgttgaggtgagcaagagccattaatcaaaataactgagaagctgagtgtcataggagtatactccttttccgtaattgagtttaatctgggagcagttttgtcagcacacatgtgccgctgccgcatgagtcatcttcagcatctttgtcatcagtttctttgtatggcacagttttctgcaaacagatattcctcagaatcataatctctgaaatgcctgagttttataaaactattaatcagttgtcttcactcttaaagacagagatattattattattattattattattatttgagacagagtttcattcttgttgcccaggctgaagtgcaatggcaatatcttggctcaccgcaac

SEQ ID NO: 12110 - DNA, 1166 bp, Homo sapiens
ggaaatcccggtaggctagggagtgtggtggtgcccaagtgccctgcgccactgagccttgctgtgtctccacaggcctcggcaagacgcgcaggaagaccagcgcgcgggatgcgtcccccacgcccagcacggacgccgagtaccccgccaatggcagcggcgccgaccgcatctacgacctcaacatcccggccttcgtcaagttcgcctatgtggccgagcgggaggatgagttgtccctggtgaaggggtcgcgcgtcaccgtcatggagaagtgcagcgacggttggtggcggggcagctacaacgggcagatcggctggttcccctccaactacgtcttggaggaggtggacgaggcggctgcggagtccccaagcttcctgagcctgcgcaagggcgcctcgctgagcaatggccagggctcccgcgtgctgcatgtggtccagacgctgtaccccttcagctcagtcaccgaggaggagctcaacttcgagaagggggagaccatggaggtgattgagaagccggagaacgaccccgagtggtggaaatgcaaaaatgcccggggccaggtgggcctcgtccccaaaaactacgtggtggtcctcagtgacgggcctgccctgcaccctgcgcacgccccacagataagctacaccgggccctcgtccagcgggcgcttcgcgggcagagagtggtactacgggaacgtgacgcggcaccaggccgagtgcgccctcaacgagcggggcgtggagggcgacttcctcattagggacagcgagtcctcggtaagtgcgctgcgcccacagctccggctgcaggcagtaaatgcgccttgcgcggtgggtctgtgtgccgcgcccttttcacattgtgtgagtacactagaaagagcgggagacgcagatgaatgcaatttagtataatgtttgctactccgtgatttacttgcatctgttttggggatagtgggtgtccatttctggaggtgggagattaactaaaaagatgtttttagctcacagaggtggttctgcttctctcccaagattccccctcttgtatttcacaggctcaaacatcattttctctcctggttgcccattctgtgtacgtagaaggcccgagtgatttactttgtttctattcggtctgtg

SEQ ID NO: 12111 - DNA, 2192 bp, Homo sapiens
taaagaaaggacggactcgccacagctgaactcctcacttttaggacacaagactaccattgtacacttgatgggatgtatttttggcttttttttgttgtcgtttaaagaaagactttaacaggtgtcatgaagaacaaactggaatttcattctgaagcttgctttaatgaaatggatgtgcctaaaagctcccctcaaaaaactgcagattttgccttgcactttttgaatctctctttttatgtaaaatagcgtagatgcatctctgcgtattttcaagtttttttatcttgctgtgagagcatatgttgtgactgtcgttgacagttttatttactggtttctttgtgaagctgaaaaggaacattaagcgggacaaaaaatgccgattttatttatgaaagtgggtacttaataaatgagtcgttatactatgcataaagaaaaatcctagcagtattgtcaggtggtggtgcgccggcattgattttagggcagataaaagaattctgtgtgagagctttatgtttctcttttaattcagagtttttccaaggtctacttttgagttgcaaacttgactttgaaatattcctgttggtcatgatcaaggatatttgaaatcactactgtgttttgctgcgtatctggggcgggggcaggttggggggcacaaagttaacatattcttggttaaccatggttaaatatgctattttaataaattattgaaactcaccagtcatggacttccagttttaaaggttgtctttctgcttcggcatggcacttgttggagtgctaaggaaaatattggagaatttattttaaaagaaaattctgaaaacattcaggtttgtgcactatataatttgatatgtagctattgaaagcatttatatgctacttgggctgagtgtatgcatataattttcactgccatgtaaagttttcagatcttagccagggttagaatcagttttgtgcccttccttggcaacacagaccagatggagaaaaaaaaggtgcaaattgtcccctctggagagatctgtgaactaggcttattgagtgaaaactctgagagcttttgttttcaataagaaccctttcaaggtttagtgttagcattttgtttttcctcttaataaatggaagaacaatgcggtaagttaaagctccacattttccaagtagattggctccgcgtgacaacacaaacctgagcaggcgctgaagattggctccgcgtgacaacaacacaaacctgagcaggcgctgagaggataaagatttctatgtatcagaagcatttaaaaatgagagatcctaagatacctaaccagtgtaagctagacttgcctgtgcttgtacaaccaccttgggattcttcttaattggacatatttttggaatcccagtcttgggcagggcagaggacgatgtggttttgtttctttgtcatgctaaattctccagaacattctggaactagggtcaatgctagattggttgtggtgtgagagagaaagaggaatcaaagatggtttcttatttataattttaattattttgaccagaagtaagtgatataccatgtaccgagatgggattaacagagctgcaagctcatttgggaactactaatggtaaccaagacattgaaaaaggagtgtagacagggaaagctgagaatttgcggggactaagttctgcagtgcaatttgggagaacataaaggccccagggtccagaattctctttcctagttacttgctagttagtatctggaattcttccatgggattcattctttggttttcttgtctgtgatattcataaaatattttcaggggagagaggaggaagggaaagaggagttctatctaattcatcctaaagaaagaagtaatgcatcaaggatgtagtgtaaggttaatttccatgaatgtcctgggaagagagggaagtggagttgaggggcttggaaagggatgaatgggtagacagagcatggttactgtggtctgaatgtttgtgtccccctataatgcatgagttaaaacctaatccccagtgcaatagcattaagagttggggtgcttaagaggattaggccatgagggcagagccctttagtgcctacaaaaggggcccaagggagcttttttgcatctttgccatgtttt

SEQ ID NO: 12112 - DNA, 2459 bp, Homo sapiens
gaaggaggggtgttttagtgtctgttttaggtcaaaattagtgattctatttttatcaaaagttttatcctgaagtttcaggaccactcttccttaataaacttgttaatggaaagcgagctttatgaacatttaaaaatgttgctgctgctttgttgcttaaaaagaaagttgccaagagagacttcttagggaaaatatttgggttttttttccaaaaattgctgaaatattgttttgccatttttaaaaagtctcaggttattaccactctgccattaaatatttgtatgcctgcatttttaaaaattctgtgcatgtactttatggagtacattctatttttgttttcagataccctacaaccaattttttttagtaatcttttagaattgaaattatcataaatgatcgagaataatcatcacatagtttaagattgtatatgttgagtagtttaaaacaatctttgcattttacagtaagaatcaaagtcccttcagtgtgcctttgtcagctaatatgtgaccagcaatgacaaccttgggagtatttattaaatattatgctatgaatataggcaacacagaacagggtttgcagtatagcgtcttgatgctaaattctcatatacctctacacgagaaatatggaggagaaaaacaagcatttacatatattcttcgtcactttgaagatgcatggcctgaactcgactgcttgtgtttgtttacatatcaggcatacccaggcatctcctgcagccagaggttccattgctgtctttgctcagtcctcttttaaaatatgaattagtggacaggcacggtgcctcacacctgtaatcccagcactttgggaggtcgaggcaggtggatcacgaggtcaggagatcaagaccatcctggctaccactgaaaccccatctctactacaaaaaaattagccgggcgtggtggcgggcacctgcagtcccagctactcgggaggctgaggcaggagaatggtgggaacccgggaggcagagcttgcagtgagccaagatcacgccactgcactccagcctgggcaacagagcaagactctgtctcaaaaaaaataaataaataaattatgaatgagtattttctagaaattcaacttgctaagcctgtaatacttaagggtagtttatctagatacagtactttcttccctgataagtagtatcattggagcccttaggtataggagaagaggaagaagtttaaaaagtgtaagtgggccgggcgtggtggctcatgcctgtaatcccagcactttgggaggccgaggggggcggatcacgaggtcaggagatccagactatcctggctaacaaggtgaaaccccgtctctactaaaaatacaaaaaaaaacattagccaggcgtggtggcgggcgcttgtagtcccagctactcgggaggctgaggtaggagaatggcttgaacccaggaggcggagcttgcagtgagccgagattgcaccactgcactccagcctgggcgacagagcaagactccgtctcaaaaaaaaaaaaaaagtgtaagtggattaaaagagaaacttggtctagttcataatatttttaatagggctttccctggctgctggaaaacttaggccagtaagcatctctttgtttaaagtcctacaagacaatttgaaataattcattgttcatgccaaaattctaagtactgtttttcttagcaagtgtaacataatcaggaacaatgggtacaagtaaaacattctttggatgatattcaaagccttattagcactgcacctgaataataggtcattttgcctcactcatttgccaaagtagccatttctaagttaaggaagtttttagataggctcatagccttgtatttcgttttagattgtaagctcaatggcagggatactatattggtaattatgttttcatatagcaaccaccacagtatattcttggtgcttaataaatgtttataattgttaacaataacctgttgtatattgtttattttgaatggtatatatgtgaaatacatatgaaaattgaagtattcatgaatatataatagaaacaagtaaatgaataaaatgacctggttactatagataagccaaattttgaaccatctagaacaatggtgtagtcttccctctactcaatgtaaatgctgggttttttaattattattattattaagaaggagatacagtccaggcacagtggctcacacctgtaatcccagcactttgggaggccgaggccagtggatcacttgaggtcaggagtttgagaccagcctggccaacacagtgaaacctcatctctattaaaaatacaaaaattaatagggcgtggtggtgtgcacctgtagtcccagctacttgggaggctgaggcagtagaatcacttgaatccagggggcagaggtt

SEQ ID NO: 12113 - DNA, 2094 bp, Homo sapiens
gtattgcttgtcagaatccaggtaaacaaaatcaaactacttctgcagtttcaacacctgcctcttcagagacaagcaaggctccaaagagcggatttgagggaatgttcactaagaaggaaggacagtgggattgcagtgtgtgcttagtaagaaatgaagccagtgctaccaaatgtattgcttgtcagtgtccaagtaaacaaaatcaaacaactgcaatttcaacacctgcctcttcggagataagcaaggctccaaagagtggatttgaaggaatgttcatcaggaaaggacagtgggattgtagtgtttgctgtgtacaaaatgagagttcttccttaaaatgtgtggcttgtgatgcctctaaaccaactcataaacctattgcagaagctccttcagctttcacactgggctcagaaatgaagttgcatgactcttctggaagtcaggtgggaacaggatttaaaagtaatttctcagaaaaagcttctaagtttggcaatacagagcaaggattcaaatttgggcatgtggatcaagaaaattcaccttcatttatgtttcagggttcttctaatacagaatttaagtcaaccaaagaaggattttccatccctgtgtctgctgatggatttaaatttggcatttcggaaccaggaaatcaagaaaagaaaagtgaaaagcctcttgaaaatggtactggcttccaggctcaggatattagtggccagaagaatggccgtggtgtgatttttggccaaacaagtagcacttttacatttgcagatcttgcaaaatcaacttcaggagaaggatttcagtttggcaaaaaagaccccaatttcaagggattttcaggtgctggagaaaaattattctcatcacaatacggtaaaatggccaataaagcaaacacttccggtgactttgagaaagatgatgatgcctataagactgaggacagcgatgacatccattttgaaccagtagttcaaatgcccgaaaaagtagaacttgtaacaggagaagaagatgaaaaagttctgtattcacagcgggtaaaactatttagatttgatgctgaggtaagtcagtggaaagaaaggggcttggggaacttaaaaattctcaaaaacgaggtcaatggcaaactaagaatgctgatgcgaagagaacaagtactaaaagtgtgtgctaatcattggataacgactacgatgaacctgaagcctctctctggatcagatagagcatggatgtggttagccagtgatttctctgatggtgatgccaaactagagcagttggcagcaaaatttaaaacaccagagctggctgaagaattcaagcagaaatttgaggaatgccagcggcttctgttagacataccacttcaaactccccataaacttgtagatactggcagagctgccaagttaatacagagagctgaagaaatgaagagtggactgaaagatttcaaaacatttttgacaaatgatcaaacaaaagtcactgaggaagaaaataagggttcaggtacaggtgcggccggtgcctcagacacaacaataaaacccaatcctgaaaacactgggcccacattagaatgggataactatgatttaagggaagatgctttggatgatagtgtcagtagtagctcagtacatgcttctccattggcaagtagccctgtgagaaaaaatcttttccgttttggtgagtcaacaacaggatttaacttcagttttaaatctgctttgagtccatctaagtctcctgccaagttgaatcagagtgggacttcagttggcactgatgaagaatctgatgttactcaagaagaagagagagatggacagtactttgaacctgttgttcctttacctgatctagttgaagtatccagtggtgaggaaaatgaacaagttgtttttagtcacagggcaaaactctacagatatgataaagatgttggtcaatggaaagaaaggggcattggtgatataaagattttacagaattatgataataagcaagttcgtatagtgatgagaagggaccaagtattaaaactttgtgcca

SEQ ID NO: 12114 - DNA, 1483 bp, Homo sapiens
aactataaatttattactgcttttcaacatgctttggattttaaagctaatggatcttttattaataccttttttcctttcatcttaacccagtgttactaaaattagatttcccattttttcccctatatgaaagataatttacatttaccttgtaaaaattatcaccctgctccacttgagaaccctgctgttgtttgcaaaatcaggaccaagcccatattttttgagagctctctagaagaatttatcttcaagaaaatatggtttggtgtttttggttttttcttttctttttcaaagtcccatggccagatatcctataatatactagatgcatgtttgctaatttttacttgaattttttttaaattgtaccaatcaaaaggttctttttctttccagctccaattttttgtaaaacagaagttccagagcacagaaggtcatcatcacaagcaaactttattaaaaaaaaactagaagtgtgctttgattttgctgttatttgttttatcacttctatatttggtgaacagccacagttactgatatttatggaaaagtactttcaagtacaaggtcaatacataagccagagtgaatgatactacaagttgagcatctctaattcaaaaatctgaaatccagaagcttcaaaatctgaatctttttgagcactgacttgaccccacaagtggaaaattccccacccgacacctttgctttctgatggttcagtttaaacagattttgtttcttgcacaaaatttttgtataaattactttcaggctatatgtataaggtggatgtgaaacatgaattatgtaattagagtcgggtcccgttgtgtatatgcagatattccaaacctgaaatccaaaacacttctggtccctagcattttggataagggatactcagcttgtacctatatattcatatatattcactgttgttagaaatgtttaagttgctgttctgtgatgaatctaaatcttttctcttgctaccaagctattgtcactgcagtgcattataccaaagagcgaagtcagtgccactgaaaatacagaacccattaatatcgtggctatctgattacatttatattccaagatgaaccttttttatatatgctaaaaattttggggaatatgttttgggatgtattatggagctaaaactctaacctcttaatagttttatagaacttaaaaattttttatacaattacccaattggtgatatgatcttaagcttttgtgtcagattatttaatatgatgacttcatgctttattatgccttattatggctgacgtattactgtggtgaaacaaaatatctttaaaagttaaaacatccagatatataagctattttttcctaaggataaagtacctttgagcatgagtgtatcacagctttcattaggaaaacttttcattacatacttgtttaaactctgtcttccagggta

SEQ ID NO: 12115 - DNA, 1211 bp, Homo sapiens
aggatcatgtaagtgtgttcactaattttgaatagtgtctaacacaggatcataaatgtgttctataaaaagaatttgataattatagcagggaaggatagtattcttgagtttgcagaatttactactttgaagttttagtgaactaatattacatactctttaaacattatgtgaaatgtcttcaggatagtttgtaaactgctaacaaaatattagtgtgaaataactagaacacttggttaacaataagttgtgtcttttttggtatttcctggtgattcattggctactaaatttaaagtaaatctggtctgttaattcacattgcctatgatacagtatttatactgcaagagtttcttccttggttacatgtataaaataatcgtagctgttaatcaaactgatcatttgctatttgttgtttcacatgttttcatttatttgttcattcagcaaacacttagttgtgtgccaggaattaaaatccagtgttgttcttttcttatttttttttggctagtggaaaatgaaaaccactgtgactttgtaaagctgcgggaaatgctcatttgtacaaatatggaggacctgcgagagcagacccataccaggcactatgagctttacaggcgctgcaaactggaggaaatgggctttacagatgtgggcccagaaaacaagccagtcaggtagggtggggttcttgggaagccaaccaaagaggaagttagagaggattgcatatttttatatatccaggatgatggggcatgtgttctttagaatctcccaaaaccatgatatagaatcatttggtaatgactaattattgtgcttcttgaatcacttgactccttcttgcttttgaagagtcttgctttttaagtccttgtctgactcaaaaagagttaaatatgatgaagaatgtatggcagaggccccctgtttcagttcatgctgacatgagtaactgaaggaaaataccctcattatttgatttctttttgtatttatctgagacgatgatatatttaactgttgtcataaaggtaagttggaacacaaatcattttcttagttttatttatttattttttgtagagacagggtcttactatgttgcccaggctggtctcaaactcctggcctcaagtgatcctcctacctcagcctcgcaaagctttgggattacaaatgtgagcctc

SEQ ID NO: 12116 - DNA, 1191 bp, Homo sapiens
ttatttttttccctttttcaagccctatctcatataccaatctaagggtattttaatgggaggaaaaccgtaatgagcttttgataacactgatttgtcgaccttttcccaaaattaagtaaagagaaataagataatacttaaatgctgatacaactatagagacttgttatttcagtggttagaaattataagctgctgatggtgtctgtggttcagaagctacaaagcatccattttgtagagtggtctttttgttgttgactgtacatttcagaatgcttgaagaaggagtatggggaaacttcaaggaaaaaggaatccattgaagacagatgccatgctttgagaagatgtaatgcctgattagtagtattctggacttcatggttttgtttttgttgtttgtttgtttaatatgaaaggttaatccagcacgtatggggccaagtgtaggctcccagcaggaactgagagcgccatgtcttccagtaacctatcagcagacaccagtgaacatggaaaagaacccaagagaggcacctcctgttgttcctcctttggcaaatgctatttctgcagctttggtgtccccagccaccagccagagcattgctcctcctgttcctttgaaagcccagacagtaacagactccatgtttgcagtggccagcaaagatgctgggtaagctgaaggtagtcctagagatcacagtgatgtgagtggcacctgtcaccttctttacatgacctgcattatcaggaacagtatgtaaaagatgaatgatgtctgccttttatttttagataggtatgttgttgaaaaagcaagtggcaaaacattgctcccaatcctttaggcttacttattccatgcttcttttagaatatttattttatactttcgtgaattaaaaattttcagtacctgaaagtcaacagtcactttgtaactgaagaatatacagctgttaggctaaaattccctttgctcactggctttgattgaatacctacagggatcataactgtctagacaattacttgacatgtgttctcatattccttctgtcttcccatagagagcagtttgggattaatacacatgattctgtctctcaaaatgtacctctgcactggaagtttttaccccaattttgagggatttttccagatttcagaaattatagt

SEQ ID NO: 12117 - DNA, 1104 bp, Homo sapiens
ggctgcctctcagcgcccacgagcaccccacagatatccacgctagtgtacaaaggttcccaagtggtggccttttcctgcttccaagggctgcccgggttcccccctctctgaaatagattggttgcttctcattacgtcacaagctgcagaaaaaaaatttaaataaaaagcctctacagctgtgtccttaactcttacctgtggataaggatggacttgcctgcccaacatcctctatcttatgtctttgggtgaaagggaagctggaatgggcagtaggggctgcttggggcagtcaggaccttcaggcttcaggcaaggagacccactgatcagacacctgcatcaaatgttggtgctgacagatcccttagatggcaccggtcctgcccctcctacagtgagatccctgtggctcagggagggaggttgactgccccaaagcacccatcacaaccctaatgaagctgactttcaaccacacttcctatactccaccctgaaccgggtccagtactgcctgcattcccagtccagcagactcttaggagaaagcagtgattaaatgtaagttaaaaggacttggcaccaggaagagtttatgaacacatttgagaagcagacatactaactcttctttacacctttggaaaagcaaaggctttgtgtaattggaatttgattaactgaattaatctatgtgttgctttcttggtcacattataacaaccaccttaatctacatttttttctcatagctaaaaagatttattcctatttcatatggtacattattacatgaaatcttaaaataagttattgattgattgaagcagagtctccctctgttgcccaggctggtgtcagtgacatgaccatagctcactccagctcactgcaggctcaactttctgggttcaagcgatcctcctgcctcagcctcctgagtaaatgggactacaggtgcataccaccacacccagctaaatttttaaaatttttgtagagatgaagtattgctatggtgccgtctggtctcagactcctggcctcaggtgattctcctgccttggcctcccaaagtgctaggattacaggtat

SEQ ID NO: 12118 - DNA, 1286 bp, Homo sapiens
caaacatcaaagctaaagcaatgtttataaagttttatggtataactagggggaaatgagctgcacaaacctcaatgtattttaaatctgttgctgtcatcattaacggtatatgacatataaaagcaagttaaaatttacttttgtaaataaagtttttggtttgtttccaaaactcttgatgattgctttagttttggacttagagaatagagcaggggttgctggagtgaatattgatttttaaagtctttgaactgtggtggtataggtgaagtgactatgcccaaaaatgccaagttttaaaagaagctatgtcataaagttttactttctgtggcaaaagagcgctttagcatttcctcagatgtcacagttgtcctgtctaaaataagtttgtacttctggtgacaatgccagacactcttatgatgtgatcaccttaaacaggagaaggagatttttgccctcagttgctcaacatgaagtactgtggactgaattgtgtcctcccagaattatatattgaggccctaatccctgtgtgactgtattaggcaatagggcatataggagattactaaggttaagtgaggtcatcataagggtggggccttaattcagtagaattggtggcctcctaagcagaggaagagagatttttctttctctctctgccatgtgaagacagtgaggagtcggccgtctgcaagccaagaagagcccttatcaggaacagacttggctagcaccttcatcgtggacctccagcctccagaattgcaagaaaatacatttccgtcgttgaaaccacccagtctgtggtattttgttatggcagcccaggcagactaatacgtgaagcctgctctaaatagataaaataagaaattactacagagggctctttagaaattgtatttaaaaacaagacaatccatatttacctaagatttacagaatgtatgtctataaaaggagggatttctggactagatgatgatgaaaaatgttcatataaaggcacctccagcttcgagttgccaacacaggaggaagaatgctccctgctgttcagatgctgatatgtgtcctgtgcttcctggatggccagtgggatcataagctggtagaagcaagaccttcatccactgacttcatatttcttccacatcctgaactgtggtgtttgactttaaaaataaattaaagcaaatagaaatgtttccattgagattttggcaaaaacccacatgacatttgcgtctgcagagtagacttggaag

SEQ ID NO: 12119 - DNA, 1287 bp, Homo sapiens
tccatttcatttggaaaaaatatgtgtaggtaaaggaaaaattcagagaaaaagccaaaacgttaacaccagttatctttgggtgtgacattccaagtgattgttatgtcttgatattcaatatttgaaattatctctgttgaacttatatttcataatcagggaaaatatttgtatttacagattttttttttctctgagacagcgtctcgctctgtctcccaggctggagtgcagtggcgcgatctcggctcactgcgagctccgcaccccgggttcacgccattcttctgcctcagcctcccgagcagctgggaccacaggcgcccgccaccacgcccggctaactttttgtattttttagtagagacggggtttcaccatgttagccgggatggtctcgatctcctgacctcgtgatccgcccgccttggcctcccaaagtgctgggattacaggcgtgagccacagtgcccagcccagatttttttttaagttacaaacttttgtagtcttctaatgatggctaagctagttctgataataaagaaatgtaacacaacagttacagtgatgtcatctcttcacctgacagacaggtcctcataacctagaaacttgtctgagcgtggtgctgctgtctctcgccatggtcatggctggctcaggaaacctaaaggttttgcagctttgtcgcttcttacacatgaaaacgggtggtgaaatgaactatggttttcacttagcccaccacatggcccttggacttctatttttgggaggaggaaggtaagtgaatatgtatttttccaatgaaaagatctcattggtgagatctataagggtgacttacgttgatcttgaagataacatgaaaaatttaaattctgactagctcttagcttaactagcagcattattcgacttgatgggcttctttgtagtttaaccgtcaacttatggtctactcagtagaattaccatcctctctgacacactgagcatcactgtatttctcagaatagtctgtgctcggttcttcagtgcatcactgcttgtgcccacctggttaaaaattttaccattccactaagctactttctcagaaaggtcacaaacaaaatcgtttaccagatcctgtgacattttcttagttttcagctttcttgatctttttccaacatgtgccattcctgactacatcctttataagactgccctggctttagatgaaccaaaaaccatgtacagaaaagtgtataaatcataggtgcacaggtcaaagag

SEQ ID NO: 12120 - DNA, 1147 bp, Homo sapiens
gtgtttttttcagtagagttgtttaaaaacatgtcttaagctatccctcccgaaatactgtctttcatcaatcatcaagtctgttttttttttcaaatgagttctaggaatcctgcaagtagaaagttaaattatttcattactctccaattatctttttaaatcatcctcaccatgttggccaggctggtctggaacccctggcctcgggtgatccgcccacctcggcctcccaaagtgctgggattacagagtgtgagccaccacacccggccagcaatatagtactttttagaaagatttgtagattagagtcccagtatacattgcggctccaacccatgcctgctttggaaaacatattttctctgtgctagtatagtcaagacacatcagcctatatatcctcatgttcagcaagtgcatgttaactgcttttgaaattattattacaataaagtctgttactcaggtgctctcatcagatgttccttcaggaacagaaactgaggaggaagatgacggcatgaatgacatgaatcacgaggtcatgtcattaatatggagtgaagatttaagggtgcaggatgtgcgaaggcttcttcagagtgcgcatcctgtccgtgtcaacgtagtgcagtacccagagctcagtgaccacgagttcatcgaggaaaaggaaaacaggtgaaagaaaacacgtgcactatctcttgtcatgtttcattgttacatttgtgtcttgtgtatatttgtttttccttcaagtttttagcatttaaaaccctaaagagatttaaaagatactttcaagtgaaaatatgccctgtgttttaagttttcatccaacttcaacaaaccacgtgtgttagcaaaatgtctttggcttttgaggacgtaattgttgtatttcatatcgtcctcctcttgaaatacatataacactttactctttagaaaaggtgaatgtaaaactattttgcctgatagttaccttaagaatttacaaacaaagaaaacactggacttgtttttctgtgtcttgatcaggaatagattttgaggttagtggggtttttagtgtagtttaaacttgtatgagtattttttttttttggatatgatagatgatactccaaataaaaat

SEQ ID NO: 12121 - DNA, 1320 bp, Homo sapiens
agcttccagagagaacagaagcagatcacttatgaatgaatcagaattacatcctgcttctctagagcaacccagaactcaaaggaaatatatcagtgacttcaaagttaaaacaaaaaatattttcctttcgaactctgtacccagccaaactacctcaaggtgaaggtaggaaaaagaatggcattttcaggcatgcaagtcccaggaagttagtgacggataagctccttgccaaagtaaaagagtaaaagccaaagagagtgagaagcggggagcatgttccaatgaaagctgacggctcttgactaccacaaccccgccggtttcaactgcaaagatgaaacagaatttagaaacttcactgtttggcttgaagaccagaaaatcagatactacaagactgaagacagaggtaatttaagaaacatccacagcagtgactggcccgagttctttcaaaagtatctcagagatgttaactgtcgtttaaagattcaagatcgacaagaagctattgactggcttcttggtttagctgttagatttgaatatggagataatgctgaaaaatacaaggacttagtacctgataatgcaaaaactgctgacaatgcaactaaaaatgcagaaccattgataaatttggacgtaaataatcctgattttaagcctggtgtaatggctttggctaacctgcttcaggttcaatgtcatgatgattgcctggtaatgcttaaggcaattcaaattttggttcaggagcacctgacacaggatgcagttgctaaagcaaatcaaacaaaagagggcttgcctgttgctttagacaaacatattcttggttttgacacaggagatgcagttcttaatgaagctactcaaattctgtgactgctgtatacagaagagctcagacagctacagacaaaaattaatgaagccatagcagctgttcaggcaattattgctgatgcaaggacagaccacaggctgggaaaagttggaagatgaacactttaggacttcagcttttcacctatttagtctatttagtacaattgggaaccatgtatacttccggcatgtttggaaatcaatatatcacattctcgggggaggaatcccagaaaattgagtaagttctagaggtttaccaccattacttttttctttaataaagtttaggaaagtagaaaaaaaaaagagtagaagccaagaaagaggacctgggctctaggaaacaggagctggaccacaggaggcatagaggatcctcagaatagtagtaaagatagctggaccccagacccagaggga

SEQ ID NO: 12122 - DNA, 1655 bp, Homo sapiens
gtgtatcaaaatgaagaattcagatggtaggaggttctatagtccttttaaagctgactcttgagtgtcagttgaatatccattaaattggatttggaaataacctgaggaaagtattatgataaagatctgcacagatgcctcttagctgataggtggcaggcctgtgggtttgggttctccctcttttctctggaacatatgacaattccagattaaagaaaaatgttttttaataaatacccttggtctttcttctagtcacctttgaggtagatattgtgattttctggagtatagtatatccgtgtctctgtgtcttaggtttactagatgcaataatacttctctttgacatttgtactgaagtgatttgatattaagtaaaacagttaatgtttgaatataggcatatttataggttttttccgctcccccccaacccaccctttttaaaaaatctatacaaagcccttgtttgagtctcatcatgcacatcaaatcatggagttaggtcttctctgagctcaggggaacacaagtgcacagagagagatgtcttgagggtcactaccaaagaattaccctcattgtccctcactcaggccatgtgtacatgcgatgctgctgagtgtgctggggtgggtggtggccacgtggctcccccagagcacttcctaactggcaagctgggagacccattactggtgaactttgtggaaattagaactgtatcttttacataatcttggcatattacatttcataataaaaacatacatttagttgcatgctacatcactattgattttataattaatttcttaagcttcaaccatgttttataccttatttcgttacatcatatatttgtaatgtgtaatatgaaatcttttgctttaatgtctttttttaaaatgtagaatgttctaaacttgaaaggcaattgaatgtagtatgatgaaaatgtgaatgttttgctgctttcatgaccaaagatacagggctagtggacatttagaataataattaaagctagagtcttgtatgtcttttctttgaaggagttctaaccttgtaaattgagaatgacttcagagaattttgattaagaaaacattaaaatcttaaccggcacaaacactccaatttttttcactgtgaagccgcaagcaattttttttctttttctttcaaaagcctaccttctgaatttatttcttgtttactcatttcagagagggtagtaaagaagatctatttctggtagtcatatcgcttgaaaggtattggtaaatgtgttttcagtcgtgaccatgtggaaagtgaacagtgttggcaaacattaccgagaaaatcatgcttttcaagatgcccttgctttgggatatccttcctagggagaaaaaaaaaaagtagtttaacaattgtgaattccatttcttatttcagtttctgctgcagtaatgggttcccacccactataattcccagcatttatgttctgttgtattctccccttagcccagtaacatttttatctaataccccattccccaagttttgagacagattgaccccctactcattatgtggctctagttgaattttaaaatgtggaatattgggcttgcaggcagtaggagctgcaaatc

SEQ ID NO: 12123 - DNA, 1100 bp, Homo sapiens
tcatccctgtttctgcacagtttcctgaaactggccatcagggcctctgaggcactcaaatcagtttacttttagcatgcccccatcagggtgggtctcactgttagtgaggatacgggtctggtttgatgtttttctaggcaaaatgcttaagtgttctggttatgccattcattcatacgatgtgtgaaatttgcttaaaagggaattttcatgatttgatttagattagtatttaaatatctgctttagatagcaattaattttattgtaaaaataaggaaaaatatgtgaatatgtgaattttttaagcctgagagatgatagaatgttcccatatttttcttgtaaagaaaataatattttaacttacacatcctgtagaaaataccaccttttccccttgtattacagtacaatgtttacattactatactgtcaagctgaaagtataaaaaatgtacatatacattttgagttatgtatcctttttttaaaaaaaagttcgagtctgttgcactaggctgtacatgactaaagttgacagatgctatgctagatttataatcactagttctggtacttgtgtctttgtatgatcaaagcatgcaataagcaatacaaaataccaagccttatacttaaaagaagtttaacatattggttaatatactggttaatatactggttaaacatattgaatgtatataagtggcaaaactagatttttaaggaagtgtacattataatattggagctcagtactgcatgaagagacttcattaaaactaagaaaacatttatttggggagaaattttaggcatttaagaacttgtatttttctattttaaaaagttaaattattccgtaatttggaagaagtttcgttgaatgtaggacataaccgtttgaagggttttcatttgaaaaattgatgtattttgtgccttaatattttgttcttttaataaaaatgctctgaatttgaatgattgattcttgatagtatttattggtgctagattatataaatctgtaggacatatagacatatatagactccaatagatggcaggacataaaattcttaaaacaggag

SEQ ID NO: 12124 - DNA, 1123 bp, Homo sapiens
tgcactggcctctcggcaaaggtggtttccctcatcaccttcctgatggtgtttggtcagtcacctgtcagggtttgtgcgggttgggccccaaaacagcatatgctgctctaagtctgctctctgcatgttttagaaacaaagtggcaagtctgccctgaacctgtaagcatcaaataagcatgagagagaaaaaaacatgatatattgctttacttaataggttgaatatggtaggtctttgaaaatatgatgattcaattttctcaattttctttgctttaaccaaaattctaaatgcagttttgcctagttccctttttttttctttttttacttttttttaaacgtttgtaaaaacctctttgaggatgaggagtcagtaaaattccactccccaagtggccctgccccagacaaaggttgctttccccctttttgttctttttatgcccccaagcactttctgcagtagctagagggacaggtttccttccaggaaggattcgagttcctgtgcctgtgggtattaggagagtatatatcctgcctgaatggggaagtcttctaaaatgggaaagaagtggtttcatctccacacagtgtcttgtaaatctcaacaaatgtgtactgttagaagtggcttccgcttactggattaactaatactttataggcttttcaggaggccacatcactagcagtagggagaacaagatgtcatttgtgttcagtgtaagctgagtaaacaggcccttcctagagtgtcctggaaatcacagcaacccattgaaaactgccctccccaccagaacgtgctacgttctttcttcatgcctatgtgtgctccattcctcatttctacttggctcaagaaaacatttctgcagtcaggtgagacttttacaaaagaggagaaaatcaatgcctccttgaacatgatgagatgtgagaacttacaatgaaaaaggcaataatgatagaaattatttcttaggtacagcaatagttgataggatgtgagggtgttaccttggggtgaagtggagaaggtcccaggtgaattggctctcatggaaatttggaattacaaaataaacgtcctgggggttacccagaatac

SEQ ID NO: 12125 - DNA, 1158 bp, Homo sapiens
gaatgattggttcagaactgttcctttcccttccatgatgtccttgacacagaaggttatgcctggctcccagtcaggcttcatacttttggtccatgtaagtgctacccgttgctgggggaggagtcatggtttatttggaaatgtcagttgcaatcatggttctgtcatttgactgcacagtatcagaggagcctgttaacctctctgtgccttagtttcttagcccatgaaagagatcattgcctgacccagggactacctcaagggcttttgatgaggacaagtgacagtaggaagatgcaagagcctttagtaccaaggttctcaacactgactacatgctggaatgactgtgaagcttttaaaaaatgttagtgcccactcttcccctgtacccccggacagttaaatcagaacctcagacagcaatatgccttgagatgccttgaaccatgcttgagaaggaaggacaaacacattattatcttggaagaattgcataaggcttatgacttaaaaaaaaaaattctttttggaaacacaagcatttctttaaggatgaccggatgttgccgtatgtatttatggcacaagcaggtgttgtctaagcagtttctctgtttgcttgtcatagcagcatttggaaactcaaacatgctttcatttacataaatagtttatgaagctttgacaacaaatgtaaacagacacgaaattataaatctgctaaatatgtattaagggtattaattattgaaagtccctttccccaaaactcaactcctatggcaattatgaactccattttaccaagaacatttaagtgcctcagcatctgtatgatatagtggagcaggtgctgacataggtaccagctgacatgatgtgtcactagctctgtgggatgattgccacatacatggaacacctgggagtgctggaaatgtactgtgatcgaagtgacaaagtgtgttttcattcacagtggaggctacatcaagcaaggggaggtccagccctcttgcaagtgtggtgagaggctctactagcaaagacatgggcaccggagtaggtcccgtgtagcatgcgggtgctgtagagaaaattcagtgacgtacatggctctggttctggacacaaaatctgtactggaga

SEQ ID NO: 12126 - DNA, 1100 bp, Homo sapiens
gccctttctgtaggctgcttgaggcaactgtcttcctccatatagttagctgagagaacagagagcagaagatgcagaaggaaaaagctgcagtgccctttgtgatctagccctgggagtctcccattatctttttcaccacattctcttggtcaagcaggccagccttgattcggcatgggaggaaactacacgtttgtgaacaccaggagatgaggaccctggaggcaattgtgctgtctggctatcatacaaagaatgctttattttagagagtttactttgattcagcaatagcagagtgctaattttccttgggtattaaaaaaatgagagaagataattattagtgaatagataaagtattttagttattagtgagcaattaaaccttttattttctattctaggcacttgtcagcttttctgattatcagatctttcaggagctcatcaaaggaaaagaggatgattctttccttaggaactctgtttctcagatgttaaggattgtaatggaagagggttgttcgacacaaaaacaggtccttaactacctaggtgaatgcttcagagtaaaactcaatgttcctgactggtacccaaatgagcaagctgcggagttcctgtttaagtatgtgtgctttgtctaaactgtttttggaggggcggagggctgtcagtggttctttgtattggttgcagtttgggcgggcgagtcatttgggaatgagaatgaatcttggggtagaatcctggtccttgctagccgggggctacctttgtttttgcggccctcctcacttgtatttttttagtagtcgtgttttattttatagtactttttaacttttattttgaaataatttcagacttccagaataatgtccaaatagtacattggattctaattgtgaacatttcattcatttacatttacttttttactttctgtgtacacagatgtacatttttctttctgtacaatccctgaaagttgcagggattgtatcactttatttctccaaagcaaggactttgtcttatataaccactgtataattactaaagaagccagctccatactggtgctgtccagt

SEQ ID NO: 12127 - DNA, 1151 bp, Homo sapiens
aaaataaaacaaacccattttttttgctcatcctctaagaagcaattcctcatccattcagtctgattatgggattgcagcaattcactcatagcttcaggctctacttctaattctagtggtcttgctatttctaccacatctacaagtccagtagtaacatcagagatcactaatcacagatcaccataacagatataataataataatatttgaaatattgcaagaattaccaaaatgccagcacagagacacaaagggaacacttgtcgttggaaaaatggcattgataagcctgcttgaaatatctgaagtgcagttaaaagaaataatgcctgtacctgttttagagacaaggataatttgatatctgaactgatacagcagctgttgaccccatctggagggaatctggaatgttggatgaagcattctgatgtgattgtgctgtttgtttcctttaccaggggtcactcccattgatggagctccccaccgatcatacagtgagtgctaccctgtcctgctggacggtgtcatggttggctgggtggataaggatcttgctccaggcatcgcagattctcttcgtcattttaaggtgggcttgaggctttgtgaattgtcctatcccttgaccttaggtttttcagttcctttctagttttggggttaacccctgggcggtctagagtgatcaagtggtcagggggtcacaatgtccagaatgcctgtgcattccctctggtgacagaggcttgccttatactggcctcattggttggggtcagtgacagatatttgacccatatacattctttggcagtttcattgaggcacctcagtctgcttatctaactaattttaacttttttcccccttcttaatactagtggcatagaagggatctcaaaatacagatatttcagtaatattcaaaatatgcaaggtagaagttataccccattgcctcctaggttttgaaaatatatttttaaaaagtagaatgacattctttgaataacttacctttgggatttcctcctagtgaagagtatttgttgctttgataatggccattgaaagaattatcctttggcaacaggctgtttgtggtttatattctgttctgtgtttttatttttaaaaa

SEQ ID NO: 12128 - DNA, 1584 bp, Homo sapiens
ggctggcagcgcaggggctgggctgggcgcgcgcgggccgcggaggacccggagccacgtgcctctccttctcgcgcgtcctactggggatgggggtctggagtagccggcagaggctattgcgggaccccgggcgcgtgggtagagcggggtgccccactggccccccaggggcacgcagctattgttatttcccccctcccccgcaggatgaacttgcgtcctttctcttctccgccatggaattctgctccgtgcttttagccctcctgagccaaagaaaccccagacaacagatgcccatacgcagcgtatagcagtaactccccagctcggtttctgtgccgtagtttacagtatttaattttatataatatatattatttattatagcatttttgatacctcatattctgtttacacatcttgaaaggcgctcagtagttctcttactaaacaaccactactccagagaatggcaacgctgattaccagtactacagctgctaccgccgcttctggtcctttggtggactacctatggatgctcatcctgggcttcattattgcatttgtcttggcattctccgtgggagccaatgatgtagcaaattcttttggtacagctgtgggctcaggtgtagtgaccctgaagcaagcctgcatcctagctagcatctttgaaacagtgggctctgtcttactgggggccaaagtgagcgaaaccatccggaagggcttgattgacgtggagatgtacaactcgactcaagggctgctgatggccggctcagtcagtgctatgtttggtaagttctttttatgttttgtcctcttcgtggtgggtgagcaaatttgtatcatgggtggttccatttttgtgcataacctttccgattaacctttctgaatgtgccacttacataatggaattttgatatttacttaataaaactttactatgtttcaggttctgctgtgtggcaactcgtggcttcgtttttgaagctccctatttctggaacccattgtattgttggtgcaactattggtttctccctcgtggcaaaggggcaggagggtgtcaagtggtctgaactgataaaaattggtatgtttaattccaaacggcttcttaattttcgttttcgtcatatgttaccatggcattaggtatgggaggatgtgttctaacgtcgagggacagacccaagaattttgaactcttaaacatttaaagtggtttttggtttctgattttcattatttgatattttttcttaatgtgttctattccagtgatgtcttggttcgtgtccccactgctttctggaattatgtctggaattttattcttcctggttcgtgcattcatcctccataaggtaacctttctcccccgtatgaagacctttcatggagcacacccaatcgatttcaaacccagtggtacttttgcagatgtgattggtgtataggtatgcggccttggaaaattttaaaaagctctttgttctgtgcatttcttgtatgttgtggagttctctgaaagcgagtttttaatactcaagagggcagtcagga

SEQ ID NO: 12129 - DNA, 1099 bp, Homo sapiens
tggcatctttgtcagatgtttagataagatggttggcgtacgcatagtctgcatgttgtatttttagtctttgaagatatgaagtcaggtaagcaacatcctaacatagtctatttcttgacatctcttacaaacgtagagtatagcctatcctcaggtgtgtgctgaagtttatattagggcttttgggtaccttagaatgtgggtattgcaatctttattcaggatgttatcagtcactggtacagttagtcttgttattaaaagaaaaaagaaaaaaaaacaggtagaagttggaattagccttcgtaggaagaattccagatgcaaatgcaggaaaaactctgttgtccttggaaactactctggagagagttattggcactataattcccaaacctaccctgttaaaagattctgtggaaatgggttaacctttataccttttaagatattgatcttaatgatgttttacaggcagatccagttcctaatggtttgcgagctttgccagttttctatgcctgcacagttggaataaacctcttttccatcatgtatactggagcaccgtgtaagtacctatcaaaatatttaaatgtgaatttaaagttgtttacaaaacttgcattaaatgcccaatttacccctttttgctttacagggctgaaatctcctagaaggtggctggcctgcgcccatttcagaaggctgcaggctagtgtacgctgagttaacctagatagtttttcaaccaaagagacctgctcagattctaaatcactacagacctttcctctttagtcttcacaggatccactgataatatgatcatctccttccctttctcctgtctatgctaaaaatgctggaattaatactgacctcaactactgaagtcattagttatatctgatcttcagtaatcagtcatttaggactggtttgctggatattctcatttttctctcccaaatggagatactattgtttctaagtactaaacttccatgaatctgcttgaatgagaagagttgggatgtttaccacctgctctaagtgcacttggaagaagaaattcatgcagctaagaggaaaa

SEQ ID NO: 12130 - DNA, 1403 bp, Homo sapiens
catttttatggcctggtttgtcacagtccccatttctggagttatcagtgctgccatcatggcaatcttcagatatgtcatcctcagaatgtgaagctgtttgagattaaaatttgtgtcaatgtttgggaccatcttaggtattcctgctcccctgaagaatgattacagtgttaacagaagactgacaagagtctttttatttgggagccagaggagggaagtgttacttgtgctataactgcttttgtgctaaatatgaattgtctcaaaattagctgtgtaaaatagcccgggttccactggctcctgctgaggtcccctttccttctgggctgtgaattcctgtacatatttctctactttttgtatcaggcttcaattccattatgttttaatgttgtctctgaagatgacttgtgatttttttttcttttttttaaaccatgaagagccgtttgacagagcatgctctgcgttgttggtttcaccagcttctgccctcacatgcacagggatttaacaacaaaaatataactacaacttcccttgtagtctcttatataagtagagtccttggtactctgccctcctgtcagtagtggcaggatctattggcatattcgggagcttcttagagggatgaggttctttgaacacagtgaaaatttaaattagtaacttttttgcaagcagtttattgactgttattgctaagaagaagtaagaaagaaaaagcctgttggcaatcttggttatttctttaagatttctggcagtgtgggatggatgaatgaagtggaatgtgaactttgggcaagttaagtgggacagccttccatgttcatttgtctacctcttaactgaataaaaaagcctacagtttttagaaaatttgttctcatggttttctttcatactcgaatcacctgggctcctgatcagttagcctaatatcattcttaggtgatgtgaatatcttaacaagtgagagctactgtccaacttaaagctcccaacccctccctgtatgcttcttgtgtgcccagaatatgcaagacattactccatagggactgtggtggcaacttggcattttcccttttagtagcacagcctgtacactttcatgttagcacacgggtgttttttttgttttgtttttccagttttttcttttgatactttttgtttttttttttgagacggagtctcgctgtgtcaccaggctggagtgcagtggtgtgatctcggctcactgcaacctccacctcctgggttcaagcaattctcctgcctcagcctcctgagtagctgggactacaggcgcccaccaccacatctggctaatttttagtagagacaagctttcagcatgttggccaggctggtctcaaactcct

SEQ ID NO: 12131 - DNA, 1500 bp, Homo sapiens
caggtgtgtgccaccatgcccagctaatttttatattttttggtaaagatagtgtgttgctatgttgcccaggctggtctcgaactcctagaaaaagccatctgaagatgaaagctgctctagacatatctcttgtatcaccctatgttaaaatgtcttccctgttttattattgaataagaaacaaaaaataataaagataatttttttaaatgataaggtttttaatgcatctcttgctgtctctcagaataaatgggatgccggaagtgcaagacatgaaatttatcactcctgtacggcgttcgtcgaggattgagcgagcagtgtcccgctacccagaaatgctgcaggaacacgatttagtagtggcttctcttgatgaactgttagaagtggaagaaacaaaatgttttatattccgtagaaatgaggcgctgcctgtaacattggggtttcaaacccctgaatcataatttcttgatgctttttttaaaaaaggtgtttcagaaccaacataagacaagaaatattcttgtccaagtgacctggaaaaaaagagaggcatcatggatgcagattatggacgctcaggacttaagtaattcactgggcttactctcaaattttctctccccatgggaaaatctttgctttatgtgtttaagaccagtttgccagttttacagtatacataaatttcaaacttttgaatatttaccctacaactatgataaatatttatactttattgatctactttaatcccaacatagttttttatatcagaaggttggtcccacaatataatgggacttttctttctgcatccaccttagcagagggcaagttctttcatcgtggaagatctgaactttgacgctagcttgacaggctgaatggaccttgacagatggccaagtcaaaacccctcattttacagatgagtttatgctagctgtgcctttgctcagagatcataaatttatgtgtgatctttgactttcatcacagtatccttgtaaatgagagagaattcttgttttttctatgccaggtctcctcagatgaaacacaatcctgaattggcatggtcgtctagcttttatattcaaacctagttttgcatttgttactcagaaacacttcaagtaacaaaaggggggcaggggagaggggtggggagtggacacttgcttcttcagttctttgctcagctagggtatagctggcctgagaaggcagtgcaagccccagagactgttgtaggttgctttttcttcctcctgggcaactatttgtggaaaggttttaccttagtcattatgtaaatataattgtgtagaaaaacctagtcaacacattttaaattttagctttcttaatatttaagtattatcttaaaacaacattaaatttctattagttcctgcttgtttatcttatttattatagaaaaccatgataatggctttgcatagagaattaggagtttgtcta

SEQ ID NO: 12132 - DNA, 1126 bp, Homo sapiens
taatttttcttttctgtttttttttttttttttttttttttttaaagacaagacagggtttcaccacgttggtcaggctggtctcaaactcctgacctcaggtgatccacctgccttggcctcccaaagtgccgggattacaggcgtgagctaccgtatgcagcctaaatctactattaaaggaaaaagatttgtcaccttttaagataacaagaagaatccaatttattttctaaagatagcttgttttttctttccattcatataacaagtatcgtaagcaattataatgtcactcgtgtttggcacaatatatgtctcatagaagagtcttctaaaggttatgaccactgacagtgatggtcatccaattgaagagattcctgagatagctatttttaaagcgtaacacaaatttagatgagtatgttggtgggtttattatgattaaacatgtaacttaaggcatttctcctttctgcctcagtctcttccagcaaagagctgtttgtcttctgccatctaggattccaaggaagtgggacactccagtctaggctgttttggtggaaacaacctttgttcagtattgagtagtgcatttacttgtaataatacaaataagtcagctgatgacaatggctgaaagggccaggtcatggaaaccaagaagtgagaagcatttcaggggatgattcttttcttctttttcctatatgtcctggatgatttttactggtacagctagagaagatgaatttaaattcaaaaataatagtaccttctgtggttctgtttgagtcttgcaagatattaagaacaactttccgcaactcttgtattggctggaaggaaggaagaaaacatacaaaatcttaaaaacattcatgcaaaaaatttgctaaggaactttaacttcaaatacatgttttataataaaagtttccttttaaaatctcgtctaactataaatcttttgtctagcttgacagttttatagcttcatgagaaaagtaaaggaacagagaaaattctgattaagtgttggcacactcgacttaatgaacagatgtatttaaagttgtccataatgtaatttgtctacatcaaattctattttcctatt

SEQ ID NO: 12133 - DNA, 1147 bp, Homo sapiens
tgaatggagttccgtatttgtgaaactcagagaagctattttctggtagttaactgttcttaaatgtgccgtatgttgtatattactccccctccctgcccgccccgtatcgcgtatctctctaagtataatctgaagcgtgcagtggataccatgaaagtactgagaaaggtggcaagtatgtttaacacattttggtccttttcattgatttgctttgagtttgaagatgaagagtaaaaaacgatgtgatgaatcttaccttgagttattcacgttttcatagcataatttcatggttgtttttaggggtgctgagttcttcacctccttttagactgagatctgccaagttttccggcattgctcttgaggatctcagaagggctcttaagacaaggtagattccacgtttatcctctatgtaactttcacactgaacattagctaacaaaagtcaaatgtttctgttatactaatgttctcatttttaatggttgtttttctaaaatcatctctaatgtgatctgtattttctaaaaaacagactgcaaatggtgtgtgtatttgtcatgaaccgaatgaattcccagaacagtggtttcactcagcgcaggcgaatggctcttgggattgttattcttctgcttgttgatgtgatatgggttgcttcctctgaacttacttcggtatgtacctttggtccaggaatgatgttacattacagccacaatgttaactcttaacctgtagtaactctagccgttacaatctcctgctttctaaaagcagtatcttaaatactattgaatttttaaaaaacgttgaattattgccacttgaagttaaaactgaaaggatgatcctttttattgtttcatacagttttcttgtatcttttagggagggttacttagagagactatgcatattttcttacatttgaaagtgtaactcgtggctttttttctaaattcaaattctttctgtaaatattattttctagtgaaataactgtcaggatgcaaaacaatgtcaccatttagtagaaggttcagagtgcttttggacaaatgagtaaaaataatgagttttcatgtataggtcactgttacaatgcccatgagtggttgcatccacatttatg

SEQ ID NO: 12134 - DNA, 1222 bp, Homo sapiens
tcggctcattgcaagctccgcctcccgggttcacgccattctcctgcctcagcctcctgagtagctgggactacaggcgcccgccaccgcacctggctaagtttttgtattttttagtagagacggggtttccccgtgttagccaggaaggtctcgatctcctgacctcgtgatctgcccgcctcggcctcccaaagtgctgggattacagacagttagttctgtactgtttaatgcaatcttccacatttttagctttaggacagaaatagcctttataaaatatgtaaatcttacaaatcatgctcctaaaagcaaatgtaaacctctaagtttgtcttaataaaatgtagggagtgagctattttattgcataatacaaaattaattttatgtattttctttccacagatactacatttaaaattgaataaagtactccagggaactagttttttttttttcgattaactctttgtttttttgttttttttttttgtttttttgcctttcttctttctttgtgctcaaggctgttcttgccttagctgcatcttggacctcaagacaagtaggagaacggacgttgaccggtacggtaatagacagtggagatggtgtcactcatgtcattcctgtggtaaggctattttacagttactgaacagaacatgaaataacacatctggcaaagttaaattatacgaattaatgttacttttaaaaaactttaaatgctgcactataatttggccatttgtccagttatagctatgttttgctcaccgtttaaaacttttataaacaattcaaaatgtttcttttactgtaggtttgtactgcaattaagaaaattacaaattgcaatatctggaatggaagtatattaatggctttcattctgttttccagttggatgtgtgttagccatttgatgacctcttttattcataattaacagatttcagactggtgtacagggtaactgtataacagttagttttaagtacctgaactttagtagatgctttatggtttgtacttaataaagcatattaagaaaaatgcatcaaattagattgtcagaaataacatttttcttccaaggccgttgtgcttcagttcttaatgatacatcaagttttaaaaaaattatgcctaatgaattcaaaatgactactagaattcatactgtttattattaaatgggtatatagagaaa

SEQ ID NO: 12135 - DNA, 1990 bp, Homo sapiens
aggagtagttttatctgtagttaggcgaatgccgcttctttacattattggtgcaatgaaagtatgggaaagtctcaacagaacagactggacatttgagaaccttccatttttcaaaatttcagaatcctcgcagcaggtgtgtgagacaaggattggggacaggagttaattgctcttttggagttccgataaagatttatagctgattttaagtcatggctgctagaatttctaagctttcatgccatgaatggactaataataaacattttagacttaacatctattttaaagcatcactcttaaagtttatttcaatataccttcaagatggtagatttttgacccttataaaaatacatattttttgttttcagcctgagttctaccaagtatgccacaccaaaaaggattatgaagaaattggacctagcatttgtcgtcacaatccagtgtttggagtcatgtcgtaaaattggcttcatagttattggggttagggaggtggggaagagataatctttctgattacctgttttgtctggatggctggttttgaggttttaaacctgacttgaaatagtaacaccaaacatgattatacaggaatattttaataagtgtatcaccatgcagatgtagaagagagcgaaagtgattgtgtttttctttagattgaatatttgaatcttatgtgtaacaaaaagaagtgggttttagttctttctgtgccctgatattttgtatattaatgaattatccaagattcgatgggatttatcagtgtgtagatagctctataatgcttgaattgtacacttctaagtgtgcagtgcaagagcttgtttatatttcatactttttatactttgaggaaaaaaagtcaaagaaaaattgtatttgagggaaaaaaccatgaccaagtaaaggataaattcaaaaaatagcctcatgagacttggcatacacactcgtgggattccagttattatggagtgcttccatccctctccaccccttccccccaaaaggttttctttgcaagtgcttttggaactaagagctagtatcttggattaactgatgcctgctagtgctttctgattactcgcattctgtttcttgctttaaaagaagagtaaagacaagagtgttggaccagtattgcagttctgtagtgtcatttcttataaaaaacaaaacaacaacaataatttatcaaaattggcatatttaaagcctaacattctaataaaggcacaaatttctttttaatacttgtttcagcctctttaatctctttataagttaactaataaatctattttcttcagacttctgcaatagttctttaaaatcacaacagttagcaagctgacttttgtaatgtgctcaatacaaatacttgtgaacttttaatatgttgagtgctttcattttgataactggatctccatttgatattttcatttgtataactcatttgcagtctgaaaattttttttagtgccagtccctgaacatatcattgaaagttaattttctttgcattttaaaatatctggattatgaagaaaaagtgatgaaaataaattaaaactgaattaccttttctaatgttttttttttttaagtaatgtaattctattttgtttttatgtatgtgatatctgtttctgttgagatttgggagttattgaaatctctgtaatgtgtatggtagaaaatttcttgtgaccttaaaattttaccagttatttatagaaagagaaaatgggaaatgttttataggctttttactagcagtatcagtgaacacttgaactccattattcatgaaaataacacgttaggattggaatacgtctattcaaaagtgaaagaatataaagtgtttagttttttgtttttactctaaagatagaattggggagtaaacttcagtttttgtttagagtggatctgaatatttaaaatcctataataa

SEQ ID NO: 12136 - DNA, 1408 bp, Homo sapiens
ccagggctatggctctgtgtgcttagacagacatagtatggaattgtgctctaagcccacaggcttctccggagttaaaaggaagcaagaacatccttaagttactttttcaaaatatgcgcttcaggaggaaccaggtttccccaggagagagaggctccctgctcaatcagcacagggagttgctagcgggcaggctgcccagtgctgtggaatctccgccagcctctgggttgggggctccctcccacttcttgcttcttatggagtacatgggactgctctgctttaagccgcgatcagagctgttgtgagcaggacaagattgcgtgatcacgaggtgcgtggggagatgctaggacatttgttgatgtctttgacctgtgctccgtctctgttggatgactgggttagctaacaccactagagggaggtacagaatgttaaacagtcgtcagagtcacactgagggttgttttaacagagggcaaattcccagtttgtcaagcatatctctgttagagtccgaagttcatggttttaatggttctagctcgtagcccttaatattttcaggatagctgggtcctgccagtgtccgctgagtccatcagcacaaccagaaggtccagggtccaggcatgggaagcattctctgacaataccgagccctcgggacctcctgaaaccttgagcagaggctggagaagaccttcagacagtccttttactacctcacaaagtgccatgcccgggacctcagacctcagggttgtgacgttgttgatgttgtcaggccccagtacgtctctagtgaccgaagcagacctgcctgaaagggcactccggacagtgagccctggctctaacctgtgccctcatatttctgctgcctcatatggtcttgtttgcccactctgtaggtgactgatcaccctaaaagggaggtaggtatctagcagtagcacagttactttgagcctgaccacttgttctgaagtgcagatgttgaaacatgcattgaggaagaacactttaaggaagcactttatgatttactcatggctggtgttggcctcaaagtaaaagaacatcttaatgcagaacagtacaataaagagccccataggatggatgccatcatctgtccccatggttgggattgccaaggaaagtgccttgttctgtgcatcttcagaatcccccaggccctctcttgatccttttcatgaagtccagagcattccttctattacaggctgaagatgcattgtaaaaggtaatgctataatagtattccctcttctcaataaatgtgcaaaactggagaatctggtgctgatctgcagcatacttgacaacacagggaataccgtggatgttccacgccagccttacatccgtcccc

SEQ ID NO: 12137 - DNA, 1859 bp, Homo sapiens
atatggataaatatatatatacacacacacatattactgcaatctgtgattgcttcatctgtaaatcagttgtaaacctttacatatttgacttaaataactgtaagatatatatgtactacattaaaaagtgttgattaatagatgaaatttttaaattaattttttaaaacatgccatacattgtatcacaatgttaatgtgccaagatattgttcctgtcatgcagagtataagaatgctttgaacaatttgtagacttagtgaaataaaataagaggaaagccaaaaacaaacaaacaaaaagcatatggggagctggtattttctctttagcttactgttgtgcctttttatttttctaatcacagcagtatgagttatgagtgccctaatttgtggttagtttctaatttaatgttgtttcatagagtttggagtgttttgatacagggtgaaaatgaacttctggtttcaaacctgcgttactggagacagcccaaagagtaattttctgttttgacaggttttactggaagtatatgtgatgagcagaagaggttatcagcattaaattgttttggttctaaatttggaacagtatatataattaaaagtaaggaacattagaggatttaattagaataaatacatgttttggaaatacagtgacctcttgcagtgtcacaaaagtgcaaagtgatattagctgtcatctgcaatacagaatctcattgcttttgcacatggagcatataggaaactccaaacagatcacaatgaggtttctaaatctgttgggttctgtcttctattgggttctgtgaagcaaaccactgtagctttagctgggttcagtcatatgactcgttggtggaatgcctaggtttttcatcttacatgcagtcttgggggtggatgaatacataatttctcatgtattcgtgtatccattagtgaatagttcaagtctgtttaagagtgtattgagatggcattctctgcatgttaaagatcttaatggcaaccagcacctcttaagtatggtttaaacatattcttagctaattttttccattagtttttgaaattggtggcagttgtctgatccacaagggcaagatcttctgagtactctggggtgtgagtatgtgtgcacacgtgtgtgttggagtgagtgagagaatgtgtctgtgcatgtggccatgctttcctagaatgtcaagtagatatttttacactttgagttttaaagcaattactatcagactgagatcttgtatgccaaactttaatctgcttttatgttttcaggctgaaggtgtgaaaatcctaagaggatttcatattgaatatgtgtacacaatcttaactatcgtggtggaaaacatactactataatttattattatatcttccagataatgttattcatttagaacaaataaggtatattttttagaatcaactttgtaagcactataaaatctttaataagttataaggtctatgatgtgtttactttaaaaattgctgttaaaagcaacacgtattaaatatgtaattatcatctgggttaagagtctgtttttcttctttgtggtaagtcttagaatatggtactgtggattaatctaatgaaattaacatatgtggttgaagttaccaagaaacgatgaaaagaaactaaatatagttgacccttgaacaacaggagttaggggcaccactccccaacatagttgaaaatccatgtataacttttgactcctccaaaacttaactactaatagcctactcttgatgggaagccttaccaataagaaacagttgatgaacacatattgtgtatggtatat

SEQ ID NO: 12138 - DNA, 1156 bp, Homo sapiens
ttttaagtagataaaatgtaatatgcataattatttttgttctgtcttcattgaggcagaggattgggatttagttatagaagcattcaggagataatgtgcgaggagttatttaatacatcccaagataagctagtgttccagatactctggaatagaagtaggtagtatctgtcttgtcagtaacatctgagaaaacatttggtagcaaacccttccctttttacctttgtccttccttttcttgtttcttctgtttttctcatccttcttattgtctatcttactcttcctagcctgtcttacctttattcttcatataaagccaatgtacattcttaggaagttatttggtaaatagcctctaaatgcattaattttttacaagtaaactctttatgttgctcatctagaacataatctctgaaaacaaattgtaggatttgattcatggtttggggtataaaaataaaacttttaacatattatttaatttatttctgcagatccccaagtaagcccttggcacggaaattaatggattgggaagtagtaagcagaaattcaatatctgatgacaggttagaaacacaaagtcttccatcacgatctccaccgggaactcctaatcagtaagtgtgaattttgtgaccaacatcaggtgtgaattttgctaatttctaattattggctgtatatttttatgcctgaagacaaagatacgcaaaaattgaattcttttggtgaaacatgatttttgttgctccagagcattattttctctttgcctgctgctctttgcagaagtaacatggtatagacttgcggaatgagagtagcgcattgaataaggaccctccactctcactctcctcaacagttaactttcgcagttaagagtccctgataaatgaagatctgttagacttaaaatcttgtatggttgttgttgacatactcatttttcatgtggattcccagcagaatttctaggggagcatatattgtttgaaaatgctttgcaagtgattgggattctcttaaacccccagctcaaccatggcttcagcacgttctatggcctaggaaaaggggtttccagcaccagtccccataagcttagctctccctgagctaaaaagcactgtgtgattca

SEQ ID NO: 12139 - DNA, 1156 bp, Homo sapiens
ctttttctggtttattttttggatagattcttagaagtgggattgctgggtgaagaggtaaattaggttaattttcttatatgctgccaaattcccctttatagaggctgcagtattttaacatccctaccagcaacatataagtgagttttgccaacaaaatatattgccaaactgtattttttaaccagtctagactgttagtgaaaaatggtatctttatgcagttttgttttgcattttttaagtaagcaagccaagtgagatgtttgtcttttttggggggagaggggacggttttctgacttttctgatcagttctgttttttatattttatttttcagagtcaatacagatttgtatgtgaagctattttgaaagtttatgaagaaggctttgttaaacccttaacaacatcaacaaataaataagaaagcaaaaagatctgggatatgtgttggaaaactgctttcccttatgttcactgtgccataatgctgctcgcaggaaatggcattttacaaaaaaaaaatgaagaactcaaaaaaactttgaaaacttcagcactgttgcactttatgttttaaaaaatgtcactctttcaaaatctataactcatgtatttgaagactgtttcatgctttgctccgaacaaatagtaaataactgagtatgttcagggtaatttatgaaattttgtggtggtgccatgcaatccccttttggtagaattgccacaaacaaggctcaaaattctcatcatctctgttatacacctgtatcatgaaagcaaaaagaagtaaacatcaggagtcagctctggtcttttgcagtggtttgcgtacttactatactgattaccagattttatttttaaaattttagcaatatcgttcttaatattagccaatacactgcctatggatgcagcacatttttccctgcacaccccctgtagagacctgcctgctgctcagaagaagaaagatggaatttgctgttcccaggaaatgctgcacattgtccatttaccagcatcttatagaaaatataaatatgaatctacaaattctcttggatttaataatgtaacttatatttatcataaggttggcttattccaaatcatgtgatttcacatacttgatgtaaagg

SEQ ID NO: 12140 - DNA, 2036 bp, Homo sapiens
caattattttatgtggattggggttttaaaagattcatttcctagcagtttctgaatatttctgtaagatcttgataaagtttagagtcaaatggcagatattttggaaagccatttagtatgaggggaagagtacacattttaaatctttggtataatctaaacgatgtcatttcagacattcaaaactcataataataaatttcaggaaatcaagctcctaaacattaatagccaagataccaaataaattatcatattaaaatatttaagtttatttaaagagagaagtaaacataaacttatgtcaaagagaaattctcttaatctatttcctgacttcacagtcaaaacagtataagatagtgaagtaacttataatcttatttggtcattctgttctataaacagacaaatataatttaggctgctatatgacatgataaattaaaaactgagaaagtaaaattatgtcggggtctacacattaaatgactgttttggcagtttttcacctgaatttaaaaataaaatttgtctgttctatctgtatggacagaatatgacaaccatagaccaaaagatatcattgtatagatgtaaagagacaaaagtcatggttggcatgttctttaatttagggccttgtttatacttgtgagtttaataatttcttggcaatgagcactgctgcctttttaaatcatcaatgcctgtctttaaatgccaatcattagaagtttagaattacatttaaatttctcatatatgaatttttcatctgggaactacccactgtcgtcatttttatgtgcagaaaagatcctttttgaaaaccatatttattgggatcttatttaaatttaaattatcctttacaacttcttaaaatgaatatgctaatagataagactttatccattacatctaagaactttttaacctgtatatcaatctaaataggtttctagaaataatcctagctttcatacaccatgtagttctagactccgtccatatcagtgtaacattgtgtgataaaatgccaaatgtcttgtatctaagctacgctcccactcttccagccacccctacctcccaccttgacacccttaagaaagcaatgctgacttttattctgacaagtggaaatcaatagtggttaatcaagtggattttgtaaatgctaagaagtgtttgtgaaaaccttccctttctgagttaggattgttttttcctgttcatttcaggtgttttattgagcatctgatttgtgtcagcaccatgtaaatatgatgaggagtatttggaatagactttacattcaccagaaaattgatagtatttgttaaaccaatgcatccattcaaaatagaggcagagtaaacagcctaagaaatgatttcctttctacagtctgctaggagaaagaggtgagaggggagtggttgatgattttaatcaagagtaaagggaacatttattacatgaaatctgacttcagttgtgcaaaggtatgttaagacattaagacaattgctggaaggtttcaaatatgtgtacacacacatagagctacttttgtgtgtttatttatatgtatatttcacaaaggctaatgcccacagaggaaaatgattattttaacttctgggttatcatctgctggcagggtctgatcaggtctagagtatttaaggaaaagtctcctgtcttctatctccactagaagtactgcagcttgagagctgaaaggaacttgaaaaatgttatccagtcttcacttagcccatttttatcggcattaggaaatagggttcagcaatggttattgatttagcagtctggtcttatatgatctgctttctaattatctatctagtattcctatattatactggaacttcaataaattataacctatgtgaatatcataaattcttgtgaatttttgtctatttccagtagagaagcatactcagccaatgttttcacttaataactatgacaaccttaaaggatgtcacttaagttag

SEQ ID NO: 12141 - DNA, 2905 bp, Homo sapiens
tttaatttcattgtttaaaggagataaaatgttatttgtgtgtctttcatgctgtaaagaaaatgaatgtatctttcaaatgtcattagaattatggcttgattctaaggatactctatttgttttaaagtctacacgggattgaaaagaaagggaagagtattacacttcattgtacaaaatgtaattttagaagaaaaacattttcattataaacaagagcaatcattgaagcattttcagatataatgtacattctttttcattttgctttgcctctagaatagaaacttttcagaaaatttgcacatactgtttgtaagtataaaataattgaattctagacttttggagtgtggaagggtgtttgtgtgtgaaggtaataaatgtgttgctgcatgtgtttaccatagagaacgttgccaggctttgtcaaatgaggacattgttgtgagggtgtgacttttgtgaagccagaaaactgtgcctaagattcattacagtgagtatgtgcagaggcccctgacccagtaaatgctttttgcctttttattcccaatgtcttggacagttgagacaacttggcccaactctgaattgtagcagtgatgtcttatatgcttacgagtttatattaattcagctgaacaagaactacatcttaaaccacctttgtaggtatgattaatacgtgcaacagctgctttaaaaggtggtatttattattcatcactcatgaaacttgactcagtgaggacttcattatttttatttctctttccacgtctccaactttttaaaaatcactaatttaactctttgttaagtactcaagtacaaagtgatctcttctttcatgaactttgctataactgttgaaaggattggtgtcaggctctctcaaccctgggagtttccaaaatttagcaaatattacttgtgataagcttaaatgccacatcgctaagtacaattattaccaggaatccgtcaagggggagatagccccgctcacacccttagacccaaacaggtgctggttcatgctttctccacaaattggcagttgggtacttccccactgtcatcacagttgagctcattttaacatatattcaaagaagctttttagtttctactcctgaattgtagtgttcaagttatttgccttcctgggtaagaaaattttaacccaagtctgggattctctggcacctgtcttttcccatcttttaatgagttggcaagattaggtcaaatttcaatgctaaatttgattttttgaattttaaatagttgcactttatttcatgctgaccaccaacttaatttatacattttaaaataaaattatcctagaagtgttgtaaacgtgggaaaattttaattagtgttggaggtcattagattggacccaggtttaaatataatgatctcttcacagcttatttgatgtttaagagcaacttgtgtgatcttagctttgcaggttttctgtaatttatgtagcacaataaaggataaccagttgactgtgttactggactctgagttctcacagctagtttcatctaagcttggtttattatcatttctgctttggatttttttgtgcatcacatgaatacttagaaatccatttgttttcagtgtagtacctagggtgaagtagatgctgcacaagtaagtttaagggaataaaagtcccgacactttatatacatgttgaggggcacgatttaagagactgaaacagtttacattaaactgtttttattttctgccagtagactctatctgcttaaaaaaataaaaattgttcaacccagtgttctccagcatcaggacattacagttgtaatctatgttgtaatcttttcaaataagaaaagctactccttattctctacagtgtaggcttaattttagaaccgataatttactatatctgcattattgatatttttaagtagtagttttaaaaataattatttctatgtggagggtgttttaatttgggattttttttttcttgtaacaggtgctatttgtaaatatgaaggggaaaagtcacttagttaaaagtctagcttatgtcataattaagatacaattattcatttcatgtttgattctattaaactagtggcaaaacagaattggtcccttagttttttagattacctttccccctatatcacaaaaatatctctttccatatgatctcataattgaggcaaagaagctaagggtttatttaaaatgtgtataagcttgaatttggtcaacactgcataatttgaaatcactctgcatttgtcactgcagcttactgtatgcttgaaaggccttgtgtgtttgtcttaattttagtgaaaaaattagaatttctgccattcatgtacaaaaaaattacaactacagcaaacaagataaaaatgctggtttgcattaatactgttttagtcttaagagcaatttatattatgtgaaatgctgttacacatattttgttggccatatttcattttgagaaacagttgttcaggtacaaacatgacaaacaactctagctatgactcttaatgttcaattgcaaaataaagatgtgctttagtaatctaaagtacagaagttttgaagattattttatgggagtttttcatgggcttttctaacagtggttatatttagtaactggttatcaggaatggagagaatgacaagtgtaaaatttatttctggagttattgactcacatagtggctgtatttgaggaaagggagtaggtgaggaactaaaagggatttagaagattaaatagtgtctgaagaggccgggcgcggtggctcacgcctgtaatcccagcattttgggaggctgaggcgggcagatcacaaggtca

SEQ ID NO: 12142 - DNA, 1144 bp, Homo sapiens
cttgggcacttaggtcagttccatattttgactgtagtgagtagagctgcaatgagaatgagaggcagatgtctttttgatatattgattttctttcttttggatgtttacccattagtggaattgctgaaccatatggtcattctctttttagtttttgaggaacctccatactgttctttaaagttgctgtactaatttacattcccaccagcagcgtaagagggttaccctttctatgggtcctcaccagcatctgttattgcctatcttttttattaaaaaaccattttaactggagcgagatgatgtctcatcatagtttggatttacatttccctgatgattttgagcattttttcatataccttcccctacatgaatttgttgcacttctttcctaagccctttctttgaaaatcctgcctgtacctgtacaggtcctacatgatgtgaatttatctttttcttcctagtgctgtgttaaatgagaataatgtgcccctccccaaagagtctcttgagactctgatgcttatcacacctgccgacagtggttctgttctaaaggtaagaatacttttacttcttaaaatttttgccaaagacagttttgaattgaatcttgcagtataaccaagggcatctagtgattactgagtgacactgggacttaagatgtgagaagagcagccgagcacaggggctcacacctataattccagcactttgggaggccgaggcatgtggaccacttgagctcaggagttcaagaccagcctgggcaacatggcaaaacctgtctctaccaataatacaaaaaataagctgggcatggtggcatgtgcctatggtcccagcttctcaggaggctgagacagaaggattgcttgagcctgggaggtggagattgcagtgaactgagatcacactactgcactccagcctgagtaatacagtgagactgtctcaaaaaaaaaaaaaaaaatgtgataaaagcattgagccacagttctctagggagaatcctgttgccacactactcacaagaggatcttagggtttcttctccagtttgtatgtactttgtttatattttgggggtggttttgaatgttggctatgctttcactcatttcctttt

SEQ ID NO: 12143 - DNA, 1110 bp, Homo sapiens
agaaaaataaagtatagcaatgtccatctgtaattctaatacccagaaataacgctatttagctttataattttcgaatgaacaaggtaaacctcggttgccatggggaagaaggatgatgtggaaaccatattggtaaagttgttaatccctcgttatggagaactgatcttaagctatacctcctggaatttgctttctagttttctgtcctgcaatatgtatataattaagcactaatttgtactgcttagcataaaagaacatccagtcttagatccttaaaacttcatggattggactttcctgggctccttataacataatcgtgtgtccaggcaaacgcacactagtgtctgactggaaagctcaggaattttaatcttgcactgtttcccagggagctgtagtgattggaacccacgtttgcacaaaacatttttgcagaaggaaagtcaacacttcttgctggctgcctccccttagccattatgctaaaaacagcttctgagtttcactggtggggctcttgccagttcttaattataggacatattttctcaaagctgaaggtgacacctagaaccaggggcttgacccaggacatgatggaatgagcatcaaattttcagtgtcttggcaaccgtagatgtcctacagggttaccgttgtgctgctcaccacagagcagctgaggcattatgccttggaagacctaaatctcccatccagttcaggaggtgacaacatccttattttaaacttcctaaaattaggaattaggtagttggacatagtctgtgacctttatgtcgttggatacctgtattcttgacagttagaatattggtagggactttgttaaaattcacttgaatttcaagctcagaggaaactttgtctcatgccctgacatgaagtggcaaacacggaagttcatacttgaatgctgaattggccccgacagattaaatgcgtgttggggattggtttcctgtcatagctgctgctgctgccatgcgcagagctgctgtaacagctcttcctgttctgctcccctgagaacagtgtggtggggagaggcagggctgaggtggtctacgaatgtgg

SEQ ID NO: 12144 - DNA, 1175 bp, Homo sapiens
atctgttatatgcaaaaatatgtcttacccttcatcacacttattgtaagattttatcattttgaaagcagctgttaggccgggtgcagtggctgacgcctgtaatccgagcacttggaaggctgaggtgggcattgcttgagctcaggagttcaagacccgcctgggcaatatggggagaccctgtctgaatttaaaaaaaaaaaaagctgctgctgcatggcagtgacagtacgatgattctgtccttggcttgagcagttgtgtgatacgagcagttgtatgagagatgtttgctttgtataattagaattttttaaggttaatttttcttatttgccccagagctattgtttctgttgacatatggtttataaaaatcagtttgactttgtgctttaaaatgtaactacatatcctgcttagtcaaattatttcattgaatccttaaatgctgtgttcacagtgtcaggttaacaaaagaaaaaaatcattaaatggctctttcttcactattctttttactctttactcctcacccccaggtgttctttgacctaatgagagaaatcagaacaaagaagatgtcagaaaacaaagacaagaatggcaagaaaagcagcaagaacaagaaaagttttaaagaaagatgttgcttactatgagtgtcaaggtgacggatgaagccagctgctcctaaggacacagggctgggttggtaaagagaaggctatggttgacttcttgcttgtgcttcccactctccccgacttcattcactcaaacttctttaaatggggaaaaatatttgtgactctgtggctggcagaagaaataagcccatgcaagtggaagggctgctttgtcaggaggttgtggaatttctttcttctccccttcttccctcccaaaagcttagctatgtataaagtgccacagataggaaacagctgttaattacaaagagaaagaattgtcatagcatcttattttgttcctagttttataacattaccatccttcgttttgaactacagatgttgtagtgggttttggaggagggagtggagtaagatgccctcccacttttatcagtttagtagtagtactgagaaaaatcccttcagctctaagaacactgaaaaatccaccgattttttgggtaagcttcttgg

SEQ ID NO: 12145 - DNA, 1202 bp, Homo sapiens
acagtaggttaagacagggccggggtcagacactagggcggcctgaccccctcagccttgctcctaaccactccgccatcctgcctccccgggccaggactggcagcctcgggctctgttctccttcccagcccgggagagtgcaggtctgagctgtggcagcttagagagtgtatacgtgtgtgagtgtgtgtttgtgtgtgcgtatgtgtcacgggtgtgtttgtgtttaggcaaatggggaaagaaaacaacacccgcattctttttcagccccgtagacatcactgcatggtgaaggaatgtggattcagtgcagcaggttgtgtttcttttttttttttcttcatggcacataaatacctttgggtttctcggttctcagaaaggcatctattactcaggtcttacttagcagttatcactgaagagggaagcctggagtgagcatgtgggcgggcgtgccacacacactcataacgcccccttcagctggaaggcagactccttttgaatccagatgagcagatgtcttgagaccaagaagatccacttgccgagctccagctgggggctgagagctcgccctgtcctgggagcaggcatcttcccctctttcttgcagagaagcagagaccaccatccccactgaaatatagggacccttgcccagtgtgaaaggaggaagggaggaagacagggagggaaggaggaaggaaggagagagagaagctcagcacagctccaggcagaacctgtgggagtttttccagcagcgtggggtgtgtcgtttgctccccttcccagcaggaggagggagtttccagcaggcagagtggtgtgggatgagggacatggctggtggggaggcctctggccccatggcgggtgtcctattcaatagatggtatcactgtccactacactacagacacagcagctgcagcctggagacgttaagcctgccacccgggttcccagctggtaagtggcagagccagtcctgggtcgtttccagcctggaactctggagcttgccagtctgatgcacgtttattggagatgtggttctctcctctcccagcgatgtcctgtgaaggctctttggaggctttctgtcgtatttctgagctgtgttacagcttctggacaccagtgaggtgaccccaccccacctctgtccatgaacgtcagggtcatag

SEQ ID NO: 12146 - DNA, 1236 bp, Homo sapiens
tctgtcagggcttcttgcctaatcaagggatgcattttaatttatgcaaatgggggagggatggtggcagggagtcacagacatccatcaccccatttcctagcagcagtcattcatcagtggggccttaaagataatacactttttgtttcaggcaattacttaatcttgacaaactcctgtgttaagcagggctattagcggggtccatcattaatcagcgcagaaccaagtgggtgctttttctgaactgcaatcactcttggggacccggggtgggccctttgccatcctcgccgccctaattacacaagcagcatgctaacaaccagcatcccacacgtgttgcaggggcgccaagccacgggcagaagaggggcccatttttaacgccagtcagaatgttttcggagccaggcagaatgatacatgggggttattagcagccaccaggaacacagctggggaaacagataactcccctcccctgggtccctcccggacttgcctctgacttcgctgggtacctgggcagcacttagatgccgctgcatggcagacccattctgttttaaggggttacatttccttttggaaagaccacgaatgaagtgaaaataccaaggctggccttgtgtttcctggagtttgttggtgctccacctccttaccagggcctgggtcacagagtactgctccctcctccatcacacacctgtgacccttattacaccaatgcctggcccaggctgccctgagggggagtgggcacccaggagaacaggggatgagtcgggcaaagactgggacctgggccttcccccggcctcatttcttcttcctggtccaagaagagctcataccgccctaccctaccccacccatgtctggaatttcagagaaatgggcatgaggtctggctgtgacacagattagccatttgactgaaccagggcaagttactgaacgctcctgtgcctcagtttcctcatctctaaagtggagataatagtaacaataccttcatcaattgctatgaggatgaaatgagttaacaaatgcaacatgctcaggaaggctccagtgtgaaggaagccctgtgcactggctgttagaaccactgcggtttccagtctccaaggaagggccagtgcgtggctgactcctagaaactgctctgtctcctactgcggccccgagcagcatggctttctctcctcggtcctaaattaattt

SEQ ID NO: 12147 - DNA, 1369 bp, Homo sapiens
tttgggtttgaatctgaatgctatactggatactctgctccggaaagatgagctttttattctactacttggaaggaaaaggaattcctggtccacctgaattcctctatgaagcctaactcttgaggtctctaacataccttgtcatagaggaaaagcacagattatacctggatgattcaggagcacattctgattccaggtttggtagagctggctcttctactccgtaaagccgagtctgggactggcagcccatccaagtgtatatgaatgaataaagcatccaagtatatatgaatgaataaagtatgtaagtatcaccagaaaaaggaaagaaaaaatgtactccttggggcaagcccagaagctgccctggcctctccagaccgtgtttacagtgtttgcatgtagaatgtagcccttcctgaaaagaagacttgtttctaaatacctcggggctgctggagccgctgtgggttagggatggactgaggcctcgaggagtgagggtgcacccggggcccagcctcaggctgccctagggatctctcagtaggaagaggaagttgcgtgtttacccaatcctgtttctccaatgcaacgtccacccactttaccaccaaaaactccagggcctgacggcagcccggtcccccagcactcaccagcagcccagtgttctccaccaagccacagtgtgcatgcctggtatcctccggattcccttccttctgcccgctgagtcactgggcagagaatgatgacatgtgtaggtggtgtggttgggggtggaaaggggaaggggttgatcctcaggactctgagggagcatcgttgaattttcctgttcagtgtgaccaagacccacctggaaatggaatttggaactggcttcaggagacatcattcctgaacacactgtagggtgaattggtgcatcttccccaccatacacacacacacacacacacacacacacacacacacacacacaccccaaaccttttcatggggaatgtgtggcaaccttgccaaacagcaccactcagagtgtgactctgactgtgaccttggccttaatgaggaacttcttaggagagtttgaggacaaggccaacatcgtcatctgggctcgctgcgtcccagcacatcaaactctgtccagagacaaggccaactgcaaatgaaagccagggaacattgctaagggtctgtggctctgtggtggtgttcatcgccttcctgagataggatttcccttgccagtcccaacctgtatatattctgtacagaagacatccctgaatatactgtaggtgagtcgtccagccaaatttatatctccaaaacatttttagctttttct

SEQ ID NO: 12148 - DNA, 1398 bp, Homo sapiens
ttctctggagcctgcaagcctcttcccatgtgtccagctgctcttcctgctacaaaggggactgctcacagtggcctcagcttggtggttttgaggggccgccccccggccctccataagggtatcctgggcctgagaattctgcatctgccattggaggatggacagcctcaaatggaaggagtcccacgggagatgggtccgaggtccggctgtggccatccagccccctgtggcttgtccagcctctgtgcacccctggtgtcttcactccaggggcagacagcagccactgcagttcctttcttcgtgagtaacagtagtgatagcagctggggctaacaggctaggctttgtgttctgcgcatttggtcagcttctcactcgatcctccctaaagcaatggggaggcccccactagcccagttttcaggaagtcaactgggaggttagatgggggccagggtcccacagctactgatggcccgagccaggttgagcttcctggtgtccagtccggatcccacttgcagatctcatgctctcagataggtgggacaagttcttttgtcacagtgctggctctgtcctgaggcctcattgctggctgggtgtgctctgctgggaaaagctttgcggggcttgcttggttaaccacagaagagaaggggactgtttggggtgcctctctgcagcctccccgtgctgggtggaagcacggttactgtgttctctaatgttcatgtatttaaaatgatttctttctaaagatgtaacctccacacctttctccagattgggtgactcttttctaaaggtggtgggagtatctgtcggggtggtgtggcccttggatgggtcaggtgggtgtgagaggtcctggggaggtgggcgttgagctcaaagttgtcctactgccatgtttttgtacctgaaataaagcatattttgcacttgttactgtaccatagtgcggacgagaagtctgtatgtgggatctgtgcttgggttagaatgcaaataaaactcacatttgtaagaaacctctgtggctcaggccttgagttgttttgcttttttgtttgttagattctggtaaaatatacaaaacataaaatttaccgtcttcactatttgaattgtacatgtcagcggtattaagtacactcacattgttgtgcaaccatcacaccatccctctccagaattcttaattttttgttgagacagggtcttgctctgtcacccaggctggagtgcagtcgcatgatcactgctcactgcagcctcgacctccccaggctcaggtgattctcctaactcaacctcccaagtagctgggactacaggcgcgtgccaccatgcccagctaatttgtttgtattttgtagagacggg

SEQ ID NO: 12149 - DNA, 1147 bp, Homo sapiens
tcaaggggttgggtattactgacgagctttggctcaaaatatagcaggaccaggtcttttgttgataagtactgtttgtttattaatatgtcattaatggtatttcttttttacactctacaagtgaattagggagtctcttgttgacccctttgttgcaggaatgtgcgtcgggctaggttatccatgagtttctttattcctaatgcagttagaaagacctttctccttgagctctttgactcccagaaggtaccccagtccccagtgtacttagaaaggatctcgaacattgctggacgtcctcatagtactcacaaagggctagccttgaatgtcactcgcccagtcttcagtctcctgacttagagatacaatcacgtcacaggtctcttggcctcaatctgaaaactgctgccgccgcgccgaggagactcgcatgccgccaccacctcactgggagggcgccgagcccaccgtcgccccctagaccctgacagctgcagctgccttgccttgccgccgcctccctgcagggcccctgttccaatgaaaaacagaacacaaaagagcagagcacctaagcctgtctctgcctccctgtctaccggactggccagggcccaagacccccgctgctccactgcggggctgggcgggctgactccctgcttcctccaagctgctgcctcccctgcagccagggtctgggcagggtgcagccggtcctcggggcacgcagcttccttcaagtacactgtgtgtgcttcccggacctgcggcgatgccacgggcctgccttttctatgcgcctcactagcttaccaccctgtgcaggtaatgcaactgactttgtctcatcagtctttttctttccctgccaccctttatttatcaagcgtaatgttacactttaaaggacagcaaataagaactttgtagaatcccaccaggactttgctaacaataatgtttggaaataaagaagtgctctgaaaaaatatcagccaccaaaatagttatgttggcactgtgttcacacgcatggtccccacacccccaggttgggtgggtttttttgttttttgggtttttttgggggggggggctttttcatgttacatccatatctgtatttatatcttat

SEQ ID NO: 12150 - DNA, 1185 bp, Homo sapiens
tattgttgtcttaaagatggggaaactgaagcaaaaggcctaggaggctttcagaagtcatgcagcccagtcagtgttggcaccaaggttgtgatctgtctgtcttcctgtaaagtctacgcactttactagaggccatactctttcccttctactacagagtgctttgcttatttacctaatggaaaactgcttttctgtttttatttccctaatctataagcacaggaaaagtgtgtgtgtgcatgtgtctttttacacttaactctttgttgtagattttgtttggtgtgactcacagtcatttcacctttctatttcttcctcaatcactcccatccctcattggacctgtcagaagaagcctgtgaggaggagatatgagccgtatgggatgtattctgacgatgatgccaacagtgatgcctcaagtgtttgctctgagcgctcatatggctccaggaatggtggcattccccattatctgcggcagactgaggatgtagcagaagttctcaaccactgtgctagttcaaactggtcagaaaggaaagaagggcttctgggcctgcagaacttactgaagagccaaagaacactgaggtgaggaccacagcaagaatatgagctaagtttgaatctcctgttggactcttcaggggtttaaagggatttcctataattaatggagtctaattcctataattaatggagataccaagaggtctgcttgcaggaacaggcactaaaggtaccaagatgactaagacacagtccttgccatccatttgctttgccatccatttgctttgaaatatctggcaaatatcctttttttctttactttttttttttttttgagatggaatctcgctctgttgcccagactggatgcagtggcacgatcttggctcactgcagcctccacctcctgggttcaagcgattcttctccctcagcctcctgagtagctgggactacgggggtacaccaccacgcctggctaatttttgtatttgtagtagagacagggtttcaccatattggccaagctggtcttgaactcctgacctcgtgatctggctgcctttgccccccaaagtgctgggcttacaggcatgagccaccgcgcccagcccatctggcaagtattctataatttattaagctgataaaagatgtagg

SEQ ID NO: 12151 - DNA, 1207 bp, Homo sapiens
gttgacattgccacaaactgtacctcctgtctctgatcctttgatgagacagtgaagacatcttggtggcgttttgagcagcagctgcagcagtgtgatggtggttagtggtgggagagtggcatgttccagaaagaggagggctctaggtaagagggcgtggcacagttatgtcatttcatgaggagacgccctagatgtgagcattttttccttatttcacttcttcgtagtaagcagaaacatggtccatttctttggggtttatagtcttcaataacaagaaaacaaatgtaattgatacattacaattgagatcacttgtagtttccttcggcattgcctgaactctcttcagggaccaggagaaactgtttgtcagttttttatgctccagcatttgttaaaacttggtatttgttttcaggaaagcaaaacaacatcagattttagcaatgtattttcaaaattctatgtagtccttattcatatttcctcctttatcactaaagcttctacagttagtaccaaatctgtgtcaacgactgggtccctccagcgatctcgaagtgatattgatgtgaacgcagcagccagtgccaaatccaaagtctcctcatcttcgggcacgacgcctttcagctctgcagcagctttgcctccagggtcatacgcatccttaggtaaccacacccctgtcaccctttccctcctgcactgctctgcaagagatgactcttaacctcttagcaaaatacaaacccatgattgaggcaagtctcactgttgtggggctactatttaaatctaagtagcttcgtgcacttgctgctgatcagccagccacccttgttgagtgtccctttcttcgatgcatcatccgttttagtgctgagtaagtacacagtacactcatgctcggagggtgtgtggcactgagcacgtcctttcctcaactcttcctcttcctccatggcaagcccagccacctcccatattgtcaaagctaagttttttccccctctgacactggtgggagcagagccagcaggttcagtgagggattcaccaaaggtagtcagtgtcattaggtgtttctcaatttgagaatataaccagagctggcagggataatcgggttgggttgtggggaatggcaggaggaatctgaaggaatgtgatgagctcatgaatcagcataaccatg

SEQ ID NO: 12152 - DNA, 1210 bp, Homo sapiens
cgggaaacaccgggagcctgttagcagccggcctgcggggcagcgctcccgcccacccgctccggggaggcctagacatttccggcccagacgcagtccgagagtccagacgcatgccgactggaggaccaaagagattagcacgaagaaggatgatcttccacaaaaagagctatgtacagctataatggaaaatactcggtgaggagaaacgaaataaaaggcaatacagcgtagccaaacccgggttagctgcgggtggagttcaagagcgcgccgcggtcccgcccccgccagccccgccccggcgagaaaagcgtatgcaaattttcgagcggccgacgcgcggtcttctgggtaaaaccgagccgccgcttttgcgacccttcgggagcctcagaaaacaaagaattggggtgtcgtcgaaagctgtggaggctggaggtaagctagctaccagaccgactagggcgaggctcacgaattaattaccacaaccctaccaggtattggcgcttcctgcttgcagcccagggactttctattataaccatccttttcttggggttgcgctactgtccaatgagcgcatagtgagggcagtactgctaacgcctgaacaacacacccgcatcaactagagcttttgctttattttggtgcaatttttggaaaaatgaaaacctgttttcatagacttatcagttcaaacagcagtaattcgtaaataaactagtactttgtggttaaaccagtagagggtgcacaagacgcgtggttttagtgtcgcaagtaaagttctttcagtttttgcggtgattaaacgggaaggatttcaacagaacttcacccctttaactttacgccgatcatcaactgttctgtaacttccttatgctgagtcagcccagtagtctaggtcaagtttcaataggagacgaagtttcagtaggtctttgcacctcacataaaatgtaatccaggtcgggcgcggtggctcacgcctgcaatcccagcactttgggaggccgaggggggcggatcacgaggtcaggagatcgagaccatcctggctaacacagtgaaactccgtctctcctaaaaatacaaaaaattagccgggcgaggtggccggcgcctgtagtcccagctgctcgggaggctgaggcaggagaatggcgtgaatccgggggggtggagcctgcagtga

SEQ ID NO: 12153 - DNA, 1969 bp, Homo sapiens
ctgagaaggagccatgttgtaacaagcccctgttttctctttcctggtacagtcgaggctgtctgtcaacagcgtgactgctggagactactcccgacccctccacatctccaccttcatcaatgagctggattccggttttcgccttctcaacctgaaaaatgactccctgaggaagcgctacgacggattgaaatatgacgtgaagaaagtagaggaagtggtctatgatctctccatccggggctttaataaggagacggcagcagcttgtgttgaaaaataggaggctctccttgctcctggccttgctgacctcagcggttgccaggaaggggtgagcacagagtgcctcttacggtagttaggatgctcagttgctaaacactgcgctttattttcttaaccagttgtggtgtgagtatcagaattgaaacacttttttgggggtaaaaaatatagcctttacatggacagaattttttttgttgtttcagtgaatatgcctgtaattcagtgtatttcagttccgtcagaaagtgtaaatgttagtttcttggtaaagtccttttcttgcttaccttgactgttgatgtactgattgagaagttcattgtctcgtttgtgattcttccagatgtgatgcttgatattttctatatgcgagttagccatccacacccaggcatagcctggatacagtataaaaatagataattaaaaagatggttgccaagcaaggaaaacttattttatattttcccttccttattttaagcattgtgagtaaatcagatgttgaattcttttgccaagggaattatagctgcaggttctctctcactgccatcaaactgtaaaagattaaactgcgaagtcaagctcaacagattattttggaaagtttttgtattaagggatttagtaacatcattttgttttccaccaggcagggagtagggcttagtgttttaaaacacctctgctttctgatgttgccttaatattctgctattgcagcaattaaaaattgtcttcatgtacatttggaactaacacgtgatgtgatatattcctaaactatgaaacctttttcctagtagtcagctagatcatttgttctgggagtataaagccacccacgtaagttaataagcaaaatcctgactattatgttgttagagaaaaatgctttgctttgtctggaagaaagataaaatagtgaattataaataagtcaggccgggcgtggtggctcacacctgtaatcccagcacactgggaggccgaggcagggggactgcttgagctcaggagttcgagaccagcctgggcaacaaagtgagactccatctctatataaaaacaaaaaccacgaaagcacacacaaaataaatcagtgggatttggtaatgtgttttagagtaagaaatttcaggttgttggtgactatcccaacagtcatgttttaaatgtacagtttggggcaagtcatgtaaatactgttggtggtcttccccacacgccccaattttcaggtagtactaagagtatgtgccaggaaactcttgctattgaattgagatgattaaaatggtgacttaatccgtagttattttgcacccactgaaaggaaagtgctttccagaataatatgaagtatctaaaagtgtcaccttttcttgcctgatcaacaatttgggcttcctgtttgtacaaggggccatttggcatacctttcacagcttttatcaggccaagttaaaggctgactacattttttcatcatgaggaaagcagttgaaatgaggcatgagttactgtgcattgggattttagaacaattttcttgtgacagctctttttgtgaagttaggttcttaaaagtgcccatgatggtcacttaaaatgtgcagtaatagcactgccaggatcaagcatgaaaggcttttaaattagatcatcccac

SEQ ID NO: 12154 - DNA, 1361 bp, Homo sapiens
tcttctatttgaaaatgaaaggagattactaccgttacttgactgaggttactgctggtgatgacaagatagggattgtggatcagtcacaacaagcataccaagaagcttttgaaatcagcaaaaaagaaatgcaaccaacacatcctgtcagattgggtctggcccttaacttctgtgttctattatgagattctgaactccccagagaaagcctgctgtcttgcaaagaccgcttttgatgaagccattgctgaacttgatacattaagtgaagagtcatacaaagacagcatgctaataatgcaattactgagagacaacttgacattgtggacatcggatacccaaggagacgaagctgaagcaggagaaggaggggaaaattaaccggccttccaacttttgtctgcctcattctaaaatttacacagtagaccatttgtcatccatgctgtcccacaaatagttttttgtttatgatttatgacaggtttatgttacttctatttggatttctatatttcccatgtggtttttatgtttaatattaagggagtagagccagtcaacatttagggaggtatctgttttcatcttgaggtggccaatattgggatgtggaatttttatacaagttataaatgtttggcatagtacttttggtacattgtggcttcacaagggccagtgtaaaactgcttccatgtctaagcaaagaaaactgcctacatattggtttgtcctggtggagaataaaagggatcattgattccagtcagaggtgtagtaattgtgggtacttttaaggtttggagcactttacaaggctgtggtagaaacataccccatggataccacatgttaaaccatgtatatctgtggaatactcagtctcattgtgcacacctttgactacagctgcagaagttttcctttagataaagttgtgacccattttactctggataagggcagaaacagttcacattccattatttgtaaagttacctgctgttagctttcattatttttgctacactcattttatttgtatttaaatgttttaggcaacctaagaacaaatgtaaaagtaaagatgcagtaaaaatgaattgcttggtattcattgcttcatgtatatcaagcacagcagtaaaacaaaaacccatgtatttaacttttttttaggttttttgcttttgtgatttttttttgatacttgcctaacatgcatgtgctgtaaaaatagttaacaaggaaataacttgagatgatggctagctttgtttaatgtcttatgaaatgttcgtggataatccaagcataattgttaagaacacgtgtattaaattcatgta

SEQ ID NO: 12155 - DNA, 1160 bp, Homo sapiens
tttctctcagttatatttaaaaccgttgtgtactttgtacaaaggaatactagtcatacttctataaactttacacaataaaatttcattctggtttttggggggctgtctcttcatttcttagaggatacattcttaataggggcaaagattgtttcttgttgtgtgggaaaaaatcttatgatattataggggtttgtgacccttagaggttcaatcctccctcattgtggtataatgaggaatttgtgtggcctttgcccctggttgctgacaaggaatgtctaaaacacttgtggtttcctgagtgatagagcgtctcttgttatgctaacgaggtgactgtatggtgggctttagggtggaggctggtaaccagaaacagctactacagagggttgggccagcaggacccgggagattgagacgcagtcagtgacctgtttgatttaatcaaccatgcctgccaaatgggacctgatgaagagctctggaccccacagctcaatgacgcttcttggttggtgaaagcattggtgtgctgggagggagaggattcccctccatgaggacaggggcacagaagctctgccttccctcccagaccttcccttatgtatcccttcatttgactggccctcctaattcatatcttctgtagtaaaactaatcatagtgttttctagggaaggatagtgctttcctgagttctgtgagtcatttcagcaagttcttaaacctgagaggtttatgagaaccccaaatttgtagctggtcagaagcgacagtagcctggatgcctcacttgtggcttgcatctgaagtgggggcagtattgtggaggactgacctcttaaacccgtggagtctgatgccagctctgggtgtgtcgtatcagaattgaattgcagtacctcagttggggtggaaatggaataccaacaaaatcttattaatgtgtttctcttatttgggataattattttgattttcatttttctctgggatgggggcttataacagagaaaagatcaagaaatactactgtcttcaaggaaatatggatataactgaaaatcactatgccgaaagcttagagcagttgagcagttagaggagagagaaaaattatagcttgtagctatgtttcttgttgctct

SEQ ID NO: 12156 - DNA, 1106 bp, Homo sapiens
gtcattgtagcagctatgttagacttaatgaagtacaaagtctccacccgcactattaaactgtaatttttaaaggtacagaccattttgtaaggtagttgtaaaggagtttgttctgggttaggataagaaagcagaatttcaagacttttttatttccagtagcgtaaacttagaaattagtctgccttttaaaataaataaataaaaattttaaataaatgtcttttatgaaatgtcaatccagctaattgttgactattaaagtgtatcacatgttactttctttaaatctctgtggtgatcttttacattaaattttctgaatcagccagagtcagtcagtacactggcattatgctttgtttatcctataaattactctgaaataatggactcttcaaggaaagaatattctaaatgtctagaatatcccctcacactggggtgcaattatttgaaaaaaatggaaatgcaattttatggacaaaataattgatttttttcttactacagatgagtggtctaggcctatatttggtcttacctcaaactacaaaggaatgacaagagaagaaagggagcagagagatctagaacagatgcctcaacgacgaagaatgaacaggtatgagggaacaggtatgagtaagtggaatacacgttattgttgcagtaactcagttttaagtaagatcattaggaagcctgcaagatgataggatttcctttcctctcagcttgatatgtgtacataattcataatatccttttagtttaaatgtgatagtgtatagtgagggtcctgtcctcctaaccagacctttctgggtcagtttgttggaacagggcctgtttcaggatactgattgcttgtgttgttccatccacttgagaaaacaactttctgggtcccgtttccgagttcctagaagaaaaaatgttatagttttagtttgtattgataatagtggatacagttgcatccaggaggacagggtcattagttacaaatgtggcaattacggctcatccacaaggaaacctgttatgcaaatgaatactaaaatgagtagtactttttaaagattaggaattattttccc

SEQ ID NO: 12157 - DNA, 1218 bp, Homo sapiens
ggggactgaagtatttttatatttcaattattccatcttcagttatttttctttttaaaagacaaagcaacagcaaaacctctcttcccccttcccacccagttacaaaatatgttcattgtagaaaatataaaaatatagaataaacatggggagagagaatcaataccaccttccagcttaatattatttctgttaacaattcggtgtctagacttcttggcttttttctttaatttagataagctcacacagtcactcatgttattgactgtttgccttttacagtgatggtatacactggtgtatttttttaaaataaattatgaacattttaatcatgccattaaatcatctatagggtcatttataataggtgcatcacattcctttaagtacatatgccacactgcaatttattttgtaatatatttgtgttctattaaaaacaaattgtgtcagtaaatgtccttgcagataaatccctttgcacatccattatttcctaatgataaaatctaagacatgagattattgggttgtaggagatgtactttctcatacttttgatacatacagccaaactgttctccagattgttgtcacctccctacatgcttgccagtacggggtattgtgttgggataaacctatgtccatttgagacccaaattgtctccccttatgaacgggtacaaatcactgtcggtgcctctaccccgtctcttctttcccacttcacttccctttgtctgtattcttctgtatccttccttgtttccacctcagaacttcacagaagctggatttgatccagggtagagaaggaagctctgaatgttcttcctcactcctcatctgcttcttagtttatttgttatgtaaaatatccttggggctttgtacagcatccagtttttcaaaaatcatatccatttttttcaaatttacaaattgactttcacgtttatgacttttagtaagttaatctattacacttgtgaagtgagctaatgctctagcacggtggttactgaagtaaccatccttggaatcccatggaccaggctcagggactctctcctgttcttgctgactggctttgggatctaggatgtgttatttaacccttccagcccttctgtttcttcacttgtaaaatggagataatgctaatactttcctcaggattttgtgaagatttaaaaagatgatgct

SEQ ID NO: 12158 - DNA, 1109 bp, Homo sapiens
cgaccaagggaaaccatttggccccgtgaggaatgggcattgtcagtatccgtcctgaacggggcctagtcaggaagcggtctagaagtgtacggtcacggtcgcctcatgaaagtgtgtagcaggtggctctcaggaaaaataccaagtctggatcatccatgtggcagctttgcatagggagaggatagctccgaactggaactgaactgccttctctgcacgcttgaccaaagcagtgatgagggcggccagtacctgcggtgtgcgtggtaggtttaaagaaaagggaatgttttctgctgagtgtttcctttgtccttgggctgctcgagctggacagtaggtaaccactgttttcaaggaccagcccaatttctctggcttggttcggagttcgtttcatccctagctgtgagtgccttttggtctggaaagttggcttgtctcataatacccacagctaggacattctctctgtaattatgaattgtccttgttttacattaaaagagaatgtctttgatcactagagtctgtcggtgttggattatttccactgtgagattcttaaaacttttttgcttcataataataaaacaactcatgttagagaccctttcaacatgaaaggtttgtagttgagacattacatatattttattgtttataataaaaatcatctatacaaaagaagtcctgggtgttaatattttgcacaagatctgttttccatgatgtgttgacatctacaatttcactaactgttgacgttattttctattgagattctggagcctagggagctatgtgttctttttgttcatttcgttcttacttccctgaagcaagagactatatggccttcagtgcaaagacttcagaccaattctttgtattacacttggttgcctcttggctatataacttctgagtgcaaatcattgaacactttaacgaagtattgtagagaataaatcataatggataaaaatcgttttgttctgctttttcttttttaaccatgtgacttgatttatatggaatggtgataacagttgttttatttttgaagacaggcaacaagatagtattcggtcagcttggat

SEQ ID NO: 12159 - DNA, 1413 bp, Homo sapiens
tcctcatggtcactgattgatgatgcaatgtcttctgtttcagggaaatatgcagaggtgtaaacttgtgatggatcaaatcagtgaagccagagactccatgcttaaggttttagatcataaagaccgtgtcctgaagctgcttaacaagaacgggactgtcaaaaaagtgtccaaattgaagcgaaaggaaaaagtctagacccagaacaatcaggagattggaagcaaatttatgaagaatgatggtgggggtggggggagggttttggttttttccaaagtggaacattgaaataaaggaagtgttccttagttcccgtgtgaaagcagaggaacccatgacatccaagggcgtgaaaggatcagagctgactggacatagtgagctgccttcttgcgttcgggtgcacccctgttaaacctgatctgtgtcataagtgactccggatgcatcagtgtccaccagttggaagcaatgacaaggatggctggctggtgtttttcagccttccggtttatagactgtatttatctagtggattcctgcaggccccatactgagcctggactgaaagtatccactcggaccatctgttatctctctacactgaaaataaaacctcttccacccaccccattcggttcttctgcctgaccttcaaatgcccatgttggccttttacagcagtgccacggcaccaagcgagctgccacatctcacactctaaagggtttgaactattagttcttgtcattttttaaaaaaaaccattcccaagtgaaattgttatatcgtctgtcttgcgtgtgtcagaactgggtttttgtggaggttcagagcaggcaacaccataagttgctctcagatccttgttctgaagtacattcttggttatctgtacttctgtagctggtgtgatgctgttaattgtatgtaccacacatctccagacgttaataaaggactcaaagaggtttttgtacttgcgcagtttgcatctttttgtaaagtgaatcagtgccatactgaccctcactgaaatgtttaccctgcttcagtttttcacacattgttgggagcctactttgtttgttgaagttatgctgttcgcatagagttcctcttagagggtagtctaaatatgctacagtggtgaaacctgttggatcttggctcccttaaatacgagcctgtattgtggcccagtgcggataaaaattggtccgattacaggactattaaggctgcagtactgggggcggagctttcgggcgggtggatcctctccacacattgctcttcgtctgaactaacctgagtggaaaggcagctcagatcggcttcctttgggcacaagaccaaccgtctccatctggcctccatgtaacagaccaggaaagatttttctc

SEQ ID NO: 12160 - DNA, 1116 bp, Homo sapiens
tgtttacattattagtgttttcaggactagcctgagagcccaatcagtatttaggaattggttttaaagagaaaaatgagtcctccttgaagggaggaaaatgcccaggacctaactgtgaccctgacagccatccatgtgaacgagtggcctccgttcaagtgattggattttggcttgcaggtggacagtatagtggctgctgagtatgagctagagtacctgttactagaaggtcattgctacgacatcaccacaggccaccactgagcactcctcctcagtgctgtccttgtttgccttttcttgcatctgcagcaaccacaaggaggcatcataaggtcaaagatggttttggaaacacttttcccaatctggaagggtactcctccaaatctaatttgttttaaccagttgttacctgtgtaagggctgtgcactcaagtcctgttgtcacatcgaaaattatctaacactttccttttcaatttcagcttttaccgttatgtcttagaaccagagatttctttcacttcagacaatagttttgctaagggtccaatcgcaaaatttttggatatgcctcagtctccactgttcactctgaatttgaacacacctgagagctggatggtagaatctgtcagaacaccatatgatcttgataatatttatttagaagaggtaagaccatatctattgcttccaaatacctaatcatgtataatacagcagattgaatcatagtctaggtgggcctctgagacatcagtgttcaggtatgatatttttttaaacaacagctttattcacatggaactcatataccataaaattctccccattaacgtgtacagttgagaggttttagtatcttcacggagttgtgcagccatcaccactatgtaattgtaggatgttttcagcatccccagtgaaagccccatactcattagcagtcactcttcatttccccagcccctggcaactgctggtctactttgtatctctatggatttgcctattctgacattttgtctaaatagaatcaaatgtggtcttctgtaactggcttctttcacataacaaattgttttcaagatccatccatgctgt

SEQ ID NO: 12161 - DNA, 1702 bp, Homo sapiens
agaagcccgtaaggcgtttatataccctcaagaattactctcttgagaatatatctgaaagaaataattcaacagaaaaaacaaagttgtatacatgaaaaaatttattttactattacttataagccagaagcatcaaaaacagtttaaacatccaagaatgagctacactgatacatagaaaatgtttagatgctattaaatgataaaagaaaaatcccgactaaaaaaatgcatgcaacgtttactgaaagtaaatattgtatttgtgaaaacaattcagttggagtggggtttacagatagtttccatttttaaaaaatctttaatttagtttttgctttcaaaatacagtacaaaagcacaaatcccaaagatttagtaagtgagataagatgaaggtggaggtacaaagaataggttccagtgatgaaaaatgcccactcagtggtgtttgtaatttgaagatcatctgttttcttttctgtggttctccttttccttaggtcctcagaaacgtgaagaattatgatctctggagaaggacaggaaatcaccccatttgaaaaacagtttttataataaatgctagttttttctgatctgtctatacaactgctgataagccggctgggcaggagtgccacaccttttgattctgagcatttgattctgacttctgtactctggtggccactggatctttgggattaaagctctgttggatttgtacctcagaggaagaccaagtggctgatcctttggactctgtaaagagcattcttctagtcagagggtggaatggcagcagcaactggaagaaaatgagttttttggtgcccacacccaagagcacacacatgctgcactgtctcggaaagcagggccagctagagccaccatgttcttccttacctcagtttacctgcggcctgcgctgcactgcagatgcccaccctgccctgggtctggccggcggaagctctgtccaaggtccacacacctccaggtttacgccaacatccttgtgccctccccaccttctcttccaacgcattaggtgcattgtttaattgaaatccaaccaacaattgtgtgtcaaggctggtttggtgcagtggctgggcaaattaattttgggccaggatgggggtgggttgcagtgagggtagggaaaatgtcaggagtaggaaggttcgggggttaagggaagggaaggaagaccagaactggccatcctcttttataatccattagtagcaccatggctcatttgaaatgaaaatattacacttattccccacccaaccgcagtgaactttctaggtaattgttttgaaaacaatttttgtatctgtgaaagtctttgctttttctttccaccttctagaaaagtctgctaccagtttccttactgaatacagccatactcagcccctctcgcatccagcccgtcagggtcagggtcagggtcaggctccctcaagacgagcaccgcattgtctgccctcttttgcgtaggatttttctctcagacccaggggacattgccttggacttttctctacaaatgccctcagatgtaagaccagaaatgattctgcttgtggaactcgtggctttctgtcctattttccttttatgtgagccctgcaggttgcctttggcgcccacaccagttctgtcttcatgtcgctgcatc

SEQ ID NO: 12162 - DNA, 1911 bp, Homo sapiens
agctcaaaagaggataagagactgaaaaggcacctcagaatggctgctgtgggcagagtctgtgacatgactttccccgccctgcccctctgttcagagcagctggaaagatgggatcagtaagattaaaaaacttttgttcggccaggcgtggtggctcacacctgtaatcccagcactttgggaggctgaggcggacggatcatgaggtcaggagttcaagaccagcctggccaatatggtgaaaccccgtctctactaaaaatacaaaaattagccgggtgttgtggctcaccctctattcccagctactcgggaggcagagacaggagaatcgcctgaacccaggaggcagaggttgcagtgagctgagatcgtgccactgcactccagcctgggtgacagagcgagactccatctcagaaaacaaacaaacaaaaagaaacttttgttcaagctgcatcttcacattgaatgaaagcattcagacgggtgactgctgctgtccacaactgtgggcggaagtgtgccttttcccagtttctcgtccaggaggttgcatagcaaatactcaagtcactgggatatatgctttccaaatgctggcccccatagcacctttccccatgtctttctaccaagcctcttatgtttaatctgtgcagggaagacaagagtagaccatattctctgtgtgctgtgcatgtcctggtgtcactcattgcctcttatctgtcgccattctaatataagtcagcttaatagttgactctgaataatgcaaaacccagcttgcttccagaatggcctaggaccctcctcctcctgccagtttttttttttttttttggttcatgtggcataatcatctttcaaaattaaccaaatgccccagaaaatgatgttaccactaaaatattttctccaagaaggcatactgtaacagaaaagataggtaagatatttttttcccaagaagtaagaattgattgtgctgaatgttcaaactctggaaactgttcacagtatgttgttcttagctgttatttatataaagtgaattattttctctctcaatcatgccatagtggagacttttgtttgtgagtaagtgacagagtaatatgaaataatgtgatatgtcagagtgacatgcagcatcctgagcctgtttttatgttctgtgtacagtggcatttgattgagatcaaagcctgtcacagcctgctgctgggggtgtggggatatgccagagtcctgtgtttggttttagaagtttactgaatgtttcccacatggagaataatggatggcatgttagtttctttaagagtggtaaagttgtacatctgtcattgttgcatttcgaattgaacacatagatgcttgcctgtctgcttgggtgaatgcctcttgggagagcgaagattacgtgcatgatgtatgttaagaaacagtttccggtcaggcacagtggcttacacctgtaatcccagcactttgggaagccgaggcgggcggattatgaggtcaagagatagagaccatcctggccaacacggtgaaaccccgtctctactaaaaatacaaaaattagctgggcatggtggcacacacctgtagtcccagctactcgggaggctgaggcaggagaatcacttgaacccgggaggtggaggttgcagtgagccgagatcatgccactgcactccagcctggcaatagagcgagactccgtctcaaaaaaaaaaaaaaaaaaaaaaaaaaaattaaaacagtttccataaatggagcttaatttgctctgctgtccttaagccctcgtgggtttttttttaagagagtctcattctgtcacccaggctggagtgcagtggtgcgatcttggctcacttcaacctctgcctccca

SEQ ID NO: 12163 - DNA, 3203 bp, Homo sapiens
ccaccttctgttcctgctgagtggctctttgggtggcaccatgcccaggctgtaaacagctggtgaagactgctggcctcaggcggctgtggctctgcgacttctctggatgcggtattggtggctccacccaccagcaggaaaaagtcaggttgtccctccagaggagccaggccaggcgctgcagggcactgtggtggtcatcctgggtagccatgtgaccgtggcatgctccttggcatctctgataccgggttttgaaacgactgagagctaagtgcaggagttggttggcattagaggcgaagcccaaactcctgtagtggggactttgactcagagcagccctggtagcccccctcatgctgcgtcacagccctcacctcctctccccgtctccttgcaggaagttctactacatcaccctgctacgagaccccgtgtcccgctacctgagcgagtggcggcatgtgcagaggggtgccacgtggaagacgtcgttgcatatgtgtgatgggcgcacgcccacgcctgaggagctgccgccctgctacgagggcacggactggtcgggctgcacgctacaggagttcatggactgcccgtacaacctggccaacaaccgccaggtgcgcatgctggccgacctgagcctggtgggctgctacaacctgtccttcatccccgagggcaagcgggcccagctgctgctcgagagcgccaagaagaacctgcggggcatggccttcttcggcctgaccgagttccagcgcaagacgcagtacctgttcgagcggacgttcaacctcaagttcatccggcccttcatgcagtacaatagcacgcgggcgggcggcgtggaggtggatgaagacaccatccggcgcatcgaggagctcaacgacctggacatgcagctgtacgactacgccaaggacctcttccagcagcgctaccagtacaagcggcagctggagcgcagggagcagcgcctgaggagccgcgaggagcgtctgctgcaccgggccaaggaggcactgccgcgggaggatgccgacgagccgggccgcgtgcccaccgaggactacatgagccacatcattgagaagtggtagtggcggtggtggccacggggaggcctcttggggggtgtgggggataaaacaggacagacgacaggtccacccaagactgtcaagggatgagcatcccaaacctgctccacagaggtagctgcgtcctgaaaaaaaacagagcagggatgtagtggggctgggcagggatgggggcttgagaaatcaacaggtgcagcccagtgggtcagaggaaagcgtgctcgaaggatgccatggtcagggcagggcctccagagcaggtgttgtgcctggagctgctctcctggcctccttggatttatcgcaaaaactgaaggtttgcgcaagagacgaggacagcggaaagtggacctgccaggccgggagtgtgtccctcaccaactatgcacacagcactcgctcttagctcctctgtccgggctactaggagtgagaccagcttctggcaactgccccagctccaggccatcccatagcccctcctcttctggctgcccccaatgccccgaggcctggggagcccccagctcacccatctgtagctccctcaaagtcagggcccaccccatctgaggcagagaagactcgagtccagcccccaggaagcctgctcccctctctggcccatggtcctgcttcatgctttgggtcaggaggccaaagctgatgttcaggccccacccactccctacagtcctcagaccaaggaggggtttgggtagtaggcccgagctgcattgccggccttcctcgggccaactggcagcccaggagtggggaggctttggccagggatgctgccacttgtgcgtgagtccgcggctggcccttggaggtgaccatccaggcaggcctggctcagactggaagggctggggaccgagggctcccctgcctctgttctcctttctgacccactgggatttgctagcaggctgccccagccccatcaccgaaacacatactcaagagctcaaataccactgctcccaccagcgtacggattaagttcatcaggcttccatcggctggagcatgggaccatagcccctgcccaggagccgtaccctcggaccacagtggctctgtatggccaggaactgggactcgagctttcagattctcaactagccttggcaaaacagctgtaggtggcctccctgacaacagacactcagccctccccaccctggctctccttgcatttccccatgctccccaccccctggcaaaaggctggccatgctctgttcccagcagccgcgcaggtttccccactggctgcaatggccctaccaaaagccatgttgcatatccgttgtaagcacgtgccctgtgccctgtccccattccttatgccctaggaggccaagctggtgtctctaggagggcccacacaggcaccctggatcccccagagagtagattggtgtgctcaggccgcaggctgactcagaggtagggcagtgggctctgcaggccacctggctggggttggtgggggtcctctctcctgccccagcttccactcagccaccacagttgccacaccatggggtggagacgtgggtcaccacgggcttgggagcaagcgccttctgcagcacaggaagccgaagctggggtcaggtgaggtcgctacccctggaggtctggcataagggccccaccctcaggtctcctacactggccccattttactttggggtccaaggacaggatggtcaacagggcagggtggacagcgtgccagcgccgcgcagggccacctccctgggtggatgcatcacactaaggaagtgagtgccaaggggatttagtggtgtggttctttcaaagggaggtcagggtcaatgggaatctgctcggacactcaacatgggggtgggtgcactccttggaggaggaggaacacgttcaggggattgtgaggtcttgcacaagccacgtggggcaccttggcttcccggcaggaggtggacacccagccagaggcctggctcaaggtgacctcaccttcaccatgggcttcctgggtgcgcgggcctgagcgcaggttgttttgtacatattggaatatgtgttaac

SEQ ID NO: 12164 - DNA, 1140 bp, Homo sapiens
ctcccttctgtcccagatgagtgtttagccacccccaaactatcccttgaccttcatcagcacagaacagagcagcggtgatcaagcaggggatgagggaggctgtcttcccctcatcccctgcttgatcctcacagcggacccccaggcttccgtggcacctggcatggccactgatccctcccctccttgcccaaggcattcccctttggaccctctgggggatcctccctgagccccctcaggctctgggctggcctctgccatggtggcctccatccacttggaaaggggcctcagccttgctaaggatgtggcatcctcagagggcctgggtcttacctgcctctgtcctgtcctccctgcctgcccgtggccccctgagctgtcatctgtgacagcttgtcaccttggctaaggagagtctgaaagcccaagggtgagcaagggcattaggggcacggaccgggcattaggggcatgcttccagttggaaggctggccccaacctgccacctcggtccccagggcaccctttgtccaggagaacctgctgatgtacaccaagttgtttgtgggctttctgaaccgcgcgctccgcacagacctggtcagccccaagcacgcgctcatggtgttccgagtggccaaagtctttgcccagcccaacctggctgagatgattcagaaaggtaagtcctcagcctgggccagcccggtatacgtcaacccagccagaccagggccaggcccttagctgggggtggctggtctttaagagggacccacacgcccagagtgggccccggcaaagggtgctgtggagactcctgggacacgtctgtgtggtgaggtctgaaaccggctggatcctgcctgccctgcagccaccaggcactgggtgggggatcgcaggtgtgcccacagagcgggccggcacggtccaagctgcggccccgtgaccccgctgtttctccctggcaactcgtgttggccgcttcaggaggtgagcctggtctctgccttgcattcatcctggctgggttgggcgttggtttctgtcgatcctcctgttgtttacctcctgcagacactgctaggggctctgtgagccagcagctcccccatccgccctcccca

SEQ ID NO: 12165 - DNA, 2588 bp, Homo sapiens
ggtcagagtgggggtgggggatgtaaggcctgggtccctttcagcggcctctagggcaggagcgtgcgtcttcttcccagtgcagtggtggtttgagtgctgtgggctctggtggggagggggctctgctcctcttcatttgctggtagctgggtcagggcactggcgcccagtgaggatgcccactagcattctgccccagttggttggtggggggacacctgaccactgagcctttggtaaccttattttttatagtaagtacttcttataattttctttttcacatcttattttataagaagtttaggaatatttttgcatggatcattgtaaacagcagattctttattcctgatgtctattaacatagaatgtttactgataagtactttaaattgcttcatgagcacttaatccatcttagtgtctatgtgtgggggcagacatttaccgcaggcacacagtttgtgcccctttcttcaagtctctgttggtaattccatctgtttagtggatggttggcaggattagtaggttctaacggttccaggggttcagctgaccaagtagcagagaagtcttttttcccaattgagtgctaatagattaggataaaatactcacaatgttagtgtatgcttttaaaaagccccacacaacaaaatggaaacatacatgtacaactcctgtgagggctggagtcttggggttcaggaggaggttagaagttacaggcatctcttcaggcttgcttggtacttggcacacacaggatggtgttttaaagagtgggctgcaccccccacacgccatttacatcagcttcataaacacttttcttcctccctgtaacttaaccttttttcccttttatgaagttgagaggctttatgaaataagtttgcattgcacatccgtgcagaaatctttctgactttgaaatttttaggacgtcagctgtcagatacgaaaggtagatatcaggtaagaatctggacttaggaaatagtcacaaaactgtcataggttgtaattttatcaacattcgcttctagtaaaattaaagtcaattaagaaatagaacttgggtcaaaattctgttacaaagcttcataatttgtcccgaagcatatggtggagcattctgagaaatttgctttttgtgtgtttgacattcctaatttgggagtccttcagctgaattactattcttttagaagttgagacagcaggtaagcaaaggacctagttcatgtaaacatggacatcatgatggctatttaaaaaatatttgttctacaccttctcccctgaggcttggggagtgtgttcagccgctgcagtttctctgctcatggaggtcttgtttggatctgtgctggcggctgagcatttagtgtgagccagtgacccatgaacttgccgctctgtgagggccagagtcagggccagtcatggtaatgggcctgaaggcacttccagaaccttttatgtctctcgtgagccatctgttaagaacgttcttcttggtgtggtttgtaggcctacctgtcgctattctgggaaaccttcttgagtgctatgcaaatgtgttcacaggcaatgggggtggtcctgagccttggggtgggcacctggtcagtgagtgtcttgcccttccccagctgggcatacagtaccttgctctttctggtggcatcatctggctgtgatgaatgaggtctaggaaataatttgcatgtgtcttgggggacacaacagtaacgagaggaaatacattattacagcaacttgcgacgtactaatacctgtcagtgttggcccccgtaaggtatgtaaggcacctgtgagtgccagtgagtgctggtgaaaggccaacatgtactagttatgtaagtattggtgtctgctttaaaaaaggagacccagacttcacctgtcctttttaaacatttgagaacagtgttactctgagcagttgggccaccttcaccttatccgacagctgactgttggatgtgtccattgtcgccagtttggctgttgcccggacaggacaggacctccattgggcgcagcagcaggtggcaggggtgtggcttgaggtgggtggcagcgtctggtcctcctctctggtgctttctgagagggtctctaaagcagagtgtggttggcctgggggaaggcagagcacgtatttctcccctctagtacctctgcatttgtgagtgttccctctggctttctgaagggcagcagactcttgagtatactgcagaggacatgctttatcagtaggtcctgagggctccaggggctcaactgaccaagtaacacagaagttggggtatgtggcctatttgggtcggaaactgcatgtttcagaaagtttgtctctttttcctactcattatttgaagaagagagagcctgtggggatagccttatcttggtccacaggactgaagtgaagtcacttgggaaggggagacagaggatgagcggcgtctgtgtagggacccccccccgggcctgcagaagggtggtgtgctcccaggactggcatgacaggtgtctcctcctca

SEQ ID NO: 12166 - DNA, 1202 bp, Homo sapiens
ggtttaaaatgttgctttgaggattttccatcctgtataagaagaatggctttcttcagattataatcgttattaaagctgtatgtacactttacttaaaaactattaacagtttttcatgttgcactggtggtaattttgaacttggaattactgggtgggaattccaggaaccacagagtattgatttttgctgccaaaatgctcttgaagcagatgtccctgtgctcccctggctgcttctggctgaaggggggaggtgtagactgaagcttgggcactcatgtgtgtcccctccccagtccccatcctagtggggccagtctcattaggcagccatagataagcctggaacttggctgtcattagtgacttgatcctggtatgaaatgcatactgggtataaggttgctcaggtattttatttccttggccacaactcccatagatgccaatgttttgatagcctcagtttctcaacgatgtcttttgtttacagtgctacacttagtgtgagtcaagaagtgcttgagttacaagaaacttcttattcaggtttgagtaagcattttacttccatgtgtacttttaaataatccataccttgaagaagttggccaatgatattatatacatgctgatctgattgttcttttcattccttgagtcaacttcagggtcttggatactaaagagaaggagaactgtggttaatgttttggatcatcatttgtgaacaaggccagactttgcccattttaggctatccaggacttaaggtagccatctggatcataagaaggtcctgcagttgagacaaaatgacccaagtgtattttccacaagttttgatcctgtgtaatatttctttttccttccctagtgtatgtagatacaaggcatggaatgcagttccactttctccccagagttgatctttttgtgattgctttcccgtctctagtagtattctgttgtgtctagagaactgattttttcctacatacgcaaattgtacatttgtaagtgaaaatgtcaatacattaaagcattaaccttaaagcatgtttcattgtgacttctgttgtctttaaaaaattactttgtagtaacatactctcagctttttctgctgtcctggatcataagaatgccatttattgaggacctaccaaatgctagtatattgtcacattagagac

SEQ ID NO: 12167 - DNA, 1099 bp, Homo sapiens
ctgctacatattcttcagagaattactgtgacgggctataatgtggggttgattattgacattacatggcttccaagttttaaaataacctaagttttgtgtagtggcaaacaggttctagggctacctctagaacttactagctagtatggtttacagcaattagttttcacagcgataaagggatcagtcactaaccctcctaggaaatatcgattgtgaaagcgccagatactgaagcagtatataaatattaaattagaatattttgcatgccatatagtttcaagttgccttgaaatgaatgggttcacttttatgttcctgttcacagcgcgagtgtatctctatccacgtggggcaggcgggtgtccagatcggcaatgcctgctgggaactgtactgccttgaacatggaattcagcccgatggccaaatgccaagtgataaaaccattggtggcggggacgactccttcaacacgttcttcagtgagactggagctggcaagcacgtgcccagagcagtgtttgtggacctggagcccactgtggtcggtaggtgcctgggcactggatggcagctttcctgagagggtgggagagcattggtaaagccccgtgtgggctcctttgaatcctcctgctgaaaggatgggatagacaggcatatgcccatggcattgttaggagagaaactgaaaggttcgtgatcaaagtgtctgtgagactcggctcctaatttaggaaaacctgacctacagggaaaagctgctttgccagcagtaagatgggctgtgaagagattccctcgtgcgtgcctcagccctgctcaggtggccctgcctgcagggtgcagtggcattggttccctcccgaatgctgtgcattctcttatgctggtgcactagagtcttgacctgcatcttaggcatagaaggtaagtacagaacagtcatttgcttccttcagattcgcagcctgatgtagtttccaaggagagctacaaagaggcagcacctttcagtggccccccaggagatgacagcatcacctgaaagcctgtgggacccaggtcatccagggtgccctgatgggac

SEQ ID NO: 12168 - DNA, 1270 bp, Homo sapiens
ccaagaggcgcttggtaaatggctgtgaaggaggacagattatcctgttgaaaggctgctgagatgcggctccacttgacaatggtgggacttttgtcacaggaaaattagatgcctttggataggtctgagattgttcttatcttttccatatagcaaaaagctaccactcagaaagaaaacagagagttgaaggagtaccctgattgaatgccttccagaaaaaggattgttttgagagaaacactttaatttgcttcagatgattctgtggaggcttattgctgaagtggttccatttcagcacaggtttagctggctctgaagagagaagtgatttttaaaaatcttagggaatacaaagcatttatccattaacctgagtcaccaaccagttttcacaacaaggcagcctaggagctagtggtggccaggatatgttttgtttgtttggctcagtgtttgctgcttgttttttaaagaatttgaacaccgctggactgcttgtgctgtctccagtttctcacagcatgcccacttcctatggggctgctccaggctgcctcccatatttgtctacaaagggattggagtccaaggtgcattgttacagcttgtgggttccatcgaaacatgacacctagttattcccatcctactttgtatcttgtgaccacagaaccctcctaacaaaggtttgtggatggtaggtgactccctgaagctcagccctagtcctagagaaatattacagagtccccctgtgctgatggtaggtcacggaccctagccatctccaaaggacagagtccttttcttgctagtgcccctactgatagaaatgttgaacaaagggccagtggccgttttctagcagtggttaattgcagtgagttctattgtggcagaaaggtttgaaaaccatctctcgcctgccctcacaataacctgaattgtggttcttggttagactagggcaaaggggtggtgacatgagaacacgaaccctggagctggactgctgggttccaatcccagttccctttttgctccttcctaggggtgtgaactgagatgcaggggcagctttttaggggaaggatgtataagttgggtgacagattgatgcaggaaagaggaagaacaattggaaatggctttgacattagtttgaattccaaaagtgggcaagtaaataccaacgcggtgcttggattaatgagagggtggaaatggaaagggatccactagttaacaaagtttaacaacc

SEQ ID NO: 12169 - DNA, 1136 bp, Homo sapiens
tgaagacatttagaaaaaggggaggggaaggttagtaagggtgctaagcggtaagaacaggctctgggggagaaaactaagttattgagtatctagtattcattaggcactttcttttcaatatctcattgtgaagaacccctgagagactggtatccaatgttctttgtatccagtccttgttttctggaagatgagcaaagagattgagagaggttaggtaacttgtttaaggtctcacagctgctacatagtggtgatggagtcagacccatatcttccttgatttcaaagactgtgtttatatgccaccatttgcttttgcaagagtcagaatcagggtactgggttggccttaatggatggaaataatttatataggtagcagatttgaaagggccatgctgtcatctctaaaaaggatttttggggtggcatttgcccattaaagttgccaagtttattaccttttaagtaaatgatttttctcttttttctcccctctcttttgccgtttctctagaatcatgaagaaggttgtaggaaaccgatctggctgcccaactgtaggagacagaattgttgagctcatttacattgatattgtaggacttgctcaattcaagaaaactcttggaccatcctgggttcattaccagtaagtgctacatggtgttctgacttaaggttttttttcccctccttaacaaaggttgcatggttgtgggtagaaaaagcttatcaaatagtatcttttcagctgtatggagtgttgctcattcgtaattgaaattcagattctcagtgactttgtactttctatggctattcgttattttcattggtttcttagaaaacaagtgtcaacctcctttctaccttgactaatgttaatacttagccttcctctcagtatgcgtatgccagtgtcatctatttaatcaaataacaattttgataaaatatgtacagtgtcatttcttgtgttccgtgggttttagatcatgattcgcttttcttaccctttacctcatcagtattcttgtcattcctggaagggaaatctgggaatacgttatctgaatgctggggtcttgcactttttaagataagcccattaagattagtatgtctgt

SEQ ID NO: 12170 - DNA, 1538 bp, Homo sapiens
tggggacctggcagctcaaaacagatggcagcagaacaaaagaaacttttgctttggaagcacagccaaactccccagggcatcgtcatagatggcacctagagcatgggctgcctcagtcagggggacgtgcctgtgttgtccagagagcccagccagggacgaaaaaggagatgaggcccctttcctccatgtccccatgcccagacacataccttggccgtaatttcttttagaatccctttgggaaggaaatacaggattgagggattttggagtttctggtaaactcaccctccctccagccccgctatgaggaggaaagtagagatgaaagactcacgctgttcatggacttggagaggattatctttgagccaagatttggacaggagtgaagtcggtccttaagaatttgtggcgcgaccggagctgggctcctgacaggtgggcttgtgttgtgtcccctctgatggcaccaaagtccagggaagggggctcttgatgtctgctgggggagtgggggcagctcaggatgaatgcagtgccctgtcctggctactcacctgagggtgtagctcgcaaaggtgggaatctggtgctggcttttccttcaggcaggatcactctgacttgttgagtaatcagtcatcaggttggcctggtcagacacactggaccccaccttccaaaccctggacccccccatgctctgcctttgtataagttcccaccccactgaatcattgctgccatgctctgtacaagtttgtaagtttctgaaaagcccctgacatctccatgctgatgcaagtgagaccccttctgcctaatgtgagcggttggcgtcctccacttggcctctgctgggcgcctcagtcgctcaatgatgtgctctgtgccggggcttccaagcacccttcctgctaacagagggcggcccagtggagcctccgctgggcagaactgatgggcaaggcgtaatggctggtagctttcagaatgtgagggaaaggaagaattccgcttcatggggactagagttagtgtggggcctttaagtctgggaagttacattctgcttctttctcaattgctacacaaatgtgcagccagccttttttcttaggcccactgagatccctgctcagtgcgtctcaattgtatctccagtctaagaggagggtggggggcacccggggcctcctccactccttaggtggcccccaagcacatctgccaggtagagtaccatggggaggcctctgccctgagcatcatcacaggggcgcctccagacctggctgagaatagcctctgcttgggcctaggaagaagggcagaagtccaaaggaaaccttggtgagtgagtgtgtgtgtgtgtgtgtgtgtgtgtgtgtgtgtgtgtgtgtgtgtgtatgagcctgtgcatttcttttaagcaagggcagtttcctgcagtaggagggcagatgactggcatccttgctgtaaggaagagctttttccttgtgaatgggcctcttggctgtacccta

SEQ ID NO: 12171 - DNA, 1526 bp, Homo sapiens
cactgctcattacagtttgcttttttgtgtgtttgctgtgcgtttggagatattagtcagtttctttagtgatatttgtttccttgatgtgccttttcgtttttctttggggtttttggaatccggatgctgttgaagggcaatagcagactcctccagctaagagacaggacatgttcttgagccactgtagctgttgaagctggacaccagacgctccctataacccccccgccaggccatagcgtgtatgcatgtgcacttccacccacagaggagggtgtgaagccttgagaacctcaagaaagggctggattctgccatacctttgggtctaccttgggactgctggttgccaacgtgtcaaccagcctgtgttccctgccacccacgcacttgctgaggtgtggctgaggcagaatcatgtgaatgggtgcatccaaggagttcagggccctgcttggagaagaaatactttagcatcatgaaagggaaagaacgtgcaccccttttttgtttctttagtgaatgcaagatttaataaaagtgaataatgagcttcccctttgggagtggagcccagtgcagctcactgacagggttgacatcagtatgatgtgttggactgaaactgtatgtctgtaggtaggtgtgtgccttttagggcagaccacggtggccaccccatttctccaaggtggtttacctagcttgtgtatattagacattgccaccctcacctctggccaaaaattcttgatttaaaaagaaaagtctattttgttaacgacaggctctgttgtatgtgttactatcccaagcctggattattttatttatttaaaagtattttaatttccatattggctttattctaatcccatccatccctgtggagctgcagagcatcttcatgtgagtagacggatggacataaatagattcatgctcatttaggaagctgggagtttcgtgaagctgagggtgagttcctgtgattcttgttcgcttcaacaaaaagtgggagaccaagtttttatagcaaaagaccaaattagctgtagagtcttgaatgcagaaaaaaattaccctagctttcttagcacttagggttttgtgaggattcagtgtttagcacagtgcttggcacatagtaagccctagtaaatgttaaatattgttattagtgtttcgtaaaacttgagaaatagagctgagctcattcccttcctgttgattcaaaaataatacctacatgaaaacatgattccaagttgattgaatgttgtaggaattactggtttagagtagcccagttctcggcctaccctgctggttgggatcttactgtattcttgaatgcactggtttgaaaatatgccagacttcagcccccaaggaaacaaggctgcaagaatttatgaactccagctggaaaaggtaaaggtgacctttggctagccacatactggaccttaccccactgacgtctttcagaacattccaagggttttcctcaaggaaca

SEQ ID NO: 12172 - DNA, 1116 bp, Homo sapiens
tatgaagtattcctgaagcggcttaaaatttttttttgcaaaattaaatgattgtgaaataactcataccttttctctgcacacacagatacatgtatattttagccttggtaatttatatgcttctctgtggtcctggctcatcctttttgttgagtcatcgcatggcaggagtgcaagagagtgaacccagtcctgcaagatccaaggcgctttcaaaccataacaaattctaaacttaggtgtatagagtagaataggttaatatattaacaaatgtgcattgagtgtttgcattggccaaggcatgcaaatgtctcagtataaaatcagacagattttatatagtttataaactgattttcaaggccattgcagaacaggagttttgtttttagtattaatagctaaaattggttaaggtaattttttaagtgaaaatccaattagataactgcattttattataaacatacatatacattctagggagtacatatttacacatgttctagggattaggggaaatgatggaatctccttaccactctacattttctggtgttaacctaatattttacccctaaataagctaaggctctgattgttagtgacatattacatactctttatatggctatacataaggaaatacatgtaacgtgaatttttctctaaattatttggagctgatacagaaaagaaatggatgagaactgtagaagttcacctatttgttattaaaagttaaaagtgaagttaaggcttgtgcttagtgacaatatgcagttcaagcaattctcctgcctcagcctctcaagtagctgggattataggcatgtgccaccacacctggctaattttagtagagacggggtttcaccatattggtgaggctagtctcgaactcctgacctcaggtaatccacctgcattggcctcccacagtgctgggattacagcatgagccaccatgcccggcctcacattgtatttctttttttttttttttttttctgagacggagtttcattcttgttgcccaggctggagtgcaatggcgcgatctcggctcaccaccgcctctgcctcccaggttcaagcaattctcttgcc

SEQ ID NO: 12173 - DNA, 1273 bp, Homo sapiens
attttgtattagacttcaaaatcttttcttcttcttcttcttttttttttaaatccaggagaatgctttattgcaacttttagctgactagatgcttaacttagtaacaagtttagcccttgtaactggctagctaaaagcaaatcggcttgtttctcagatctttgggggatagcaagaaacatttgagtgaatgttgttgaagattttcagtagtatagaaaatgatggcgctcttgtgatatttgtaagtagtaagtaaaatttactttttgtgtacaaatctttgaagtttttgttgtgttgagaactttttgattgtagcacgttaaggctgatagtattgtcttcgtttttttttttttcttacagcaagcaaggatttggcacagacatcctatttcatggctaccaacaggttgttatcctgaccctctttgttgcactgttgtagcacactatagcttcctttaatgcagggccccctcaatgtgtctcttacccttgttgcgacaggagactggaccatctactgtggtggtaccttcctgtttgctttgcggtgtattgtacaagggactttgggcacagaggggttaaatgcacaatgtgaagtgtagtggtgctttctgatgacatattctcgatttgtgagtgcataagtctaaaattggtagcctgaatagcagctaaagattacaaagagctaaacttaacgtagaaattcgagcaacttggtaagtataaagctatttccagtttacaattatagttaaatgacaatttttaaaatttcacgttgatccagtcttaactttaaaatactcattaaagtttttttaataaataaaatttatgtaatttgaaattttttttcagataatacccactagtagcaagttaaaagtagtcaagtcctatccatgcctggatttgcataaacacaatttttcctttttttttttttttaaacaaaaaaaccttccttttcagtttatatagagtaaaaaatggtatgtgtttatggctgaacagataacatttccatcattgaaactgaactggaagaatagtcttaaggagcctttaatatataattctgttctagatttattaatgatttaaatttgtctttttgagtggatcattggggagaagggaccaaaccagctttgtatggtccctaatttcttgtgacactgataagttttatttacaatttcacattggcaaatactgctatattttctcaaatatctgttgttggtattta

SEQ ID NO: 12174 - DNA, 2623 bp, Homo sapiens
catatggactacaaagacacattcgacatgctggactcactgttaagtgcccaaggaatgaacatgtaataatttgtttaggtcaatttttcctttacttttttaatttaaaaattgttagaatggaaaaattccttctgatctagcagtggtaacccctgctgttgctgccactgcttcaatatttgtaagtgctgctttattcttcattctgaaaagaagagattatagtaaacaagtctttatctccacatatgatagtgttataaatactgtaaaagcatggaaggtgcaaaactcagtatttctacaattgcagctaagaacattaggatgaatggctggctgcttctaggaatataagatgcctcaagcattcattatttatgatttgaatactgtagctattttttgttgcttggcttttgaatgagtgtaaattgttttcttttgtgtatttatacttgtatgtatgatttgcatgtttcaatgataaagggataaaacagtatactgacaactgtttacaagaaagtggagaaaaatgtacatacatttttgtatgtttagatattaccgtaaatactcaggattggagctgcttgtaagtataacaatatacagaataactttattttatcttgtcagagtccatcactaatctaaaacaaaggtggcacttttttatgttaaccttaaactctaggccttactggaagccactgataggggacacttcactaccagatgtgtgcagtgcaacagatggtcatatacactgtgaggcactgaaattttgccttcagaggttctgaccagattggctgctgaaatagcccctaactttctgaaggcttgaagaggaaaaaataaagtttacatactcttgatgtgaagtgcatttaaatgtttgttggcttgttgcagttctatgaaacagagctgttaataatggttatgtggattactgtgatttgaaaactaaattcacaataacttacctagtagagatttagtgagttgtttcctttaaagaattttacactacatattttaatagtaaacagggatcacttttcctttagcattcagaatgacaccatattcttaaatatactccttccctgaagcgtgtttgtgtgtgatgccatatttctttttcaggtaaatgtagtcttccttataaaaatgaaattaaacctatgctctcaattcttttatattctaacaataaataaaaaagaaaagattactgactgtgcattgtacctgtatttatagtttatggttatcaggaagctctgtaagaaagaaaaggtcagcctcccaggcaaaccagtagtggaggttttacatttgtttgcacatctcagtatatttctgttgaggtaaagtttgcacagtcatctgacttctgatcaagcattagattttaacttgtttagattttgtcttaaacaccagtaatatggctcttgtttatcagctaatcttgaatttattctgtggtaaatcttttgagttgttgagtatatttgagattgattggattcgacctcttgttgaactgaaaacttaattttttctctgtatttttgttacaaagccactgatacgtgcacaattgtaattaagtatgttgcagttgtaaatattagagtttaatctcatgctctacctttatttagcaattacctaatttgccagtagctttataatttttaaagataattgttcattattttgtcaatgttatttgaacttggggtacttaggagcctctttgtagggactgtgcctaggtagcatgtcctaacatttgttctggtcttgcataacttcagtaatctttgtcattatatgtaactttgttgctctgtatggcataatattgtatccataaacatggtaattttgatacagttatacttttacagtggtacataatccaaggactagtatagaattaagctgagtgcaagatgagggagggaagggctttcttggtaatttagatgtgaaacctctacagagctatcatgtaaaaactacataaggtggttgtgctactgtataattgggggtgataataccaggaattttaataagattttgtaaagaatatccagaaaagtagtgaacttattttcagtagacatagaaaacaatgtgaatatttaaggtctgtgactatagttaaacttcactaagaatttgcagaattgttttgagatgtgtgaataaaggtaattttattgaatcttcattggtgctaatgatggacagttaaaaagatagctagtgtatattgttatgggtcagtacttattagtacttccaaaattgaatttgaaatgctatgtattcacttttcactctgtaaatgtaattctttacaatgactttatttattaaagggcagccagttgtcatttttacaggattgtgtgagctattcaaactcttcaacccctgaacagggtattaagcttccaaaataatgatggggataaatatggaaatcctttttaagttgtatttccattaaacaaaaacccttataattcatactatcatgaatttgctttatccatctcatttgcataacagttcatctgtctgg

SEQ ID NO: 12175 - DNA, 1109 bp, Homo sapiens
taattttgcattccaatttcatgttgacttgatacctacgatggctttttgttttaaaggcttttatcttgagaacatgatgtctgtagttaaaggtattggcgtattccacacatctgtactattcttgagtatgatcgcttagggtgtcaaattgagaaccaggcagatccaccacctacagtaaaaaggaccctaaagtaaattggttgaagaagttagatcccaaagattcttggtgaattttgaagtcttcatcagtatatccatattaaaaggagatgacagaagccaaaataaaagaattatgggctaacaggacagctggattaaaataagcatcagtttcattaaaaagggctaacttgaagataaatcttttgactccagctctttagaggatctgaagtgaccttgatggacagtggaagaaatcacaacatggaattacttgaacaaaaatttattgacttaaagaaaaagaaaaaatccaaaaatatatagagagaacaaaagtaaatatccttcaattatatgattagcttttatctgttcaaaaatagtttgaagtcatatacaccattaggatgtagaacagcaataactcaacaacaacagcagcaatagttgtttttaagggttttgttttgttttttttttgttgttttttttttgacacagagtctctctttgtcacccaggtgggagtgcagtggcatgactgtagcttactgcagccttgacctcctgggatcaagtgatcctcccaccgcagcttctcaagtagctggaactacaggtgcatgccaccatgcctggctaatttttcgtggtttttatagaggtggggttttgccctgttgtccaggcttgtcttaaattcctgaactcaagccatctgcctgcctcagcctcccaaagtgctaggattacagacatgatccactgcacccggcctgaaaacattctattgtgaaaattgtaatctagtaaaaatgaaagaggctcaacgcctgtaatcccaacactttgggaggccgaggtggggttggattgcttgagcccaggaattcaagaccagcctgggcaacatggtaaaccctatttct

SEQ ID NO: 12176 - DNA, 1385 bp, Homo sapiens
ctgtccagttgggtgatcaggaatcaaaccagcatcggaaagacttcccagcaccaagcttgagctgtgtcgtttcgtggagggggcagcgaggatgggcttgagctgttgagagatttctgccctagagatggcctttgtatatgggggggtggtggggggacacaaacacatcagacactccgtcctcacactggcaggacggtgttcatcgcattctcttctgtgaccagcctctaggctagcggctgcattcgtggtctgtgcaaacacttcgtggttctatatatcagcagcaagtgtgcaaaataaaggacctgttaactcagatttctggatattttggtggtagcttctagtcccagaatctgtgtttttaaaatactacatgacattctgtctattcaatcacctggtggtcatctttcttgtactaattaactgttgatgagcattttggatattctaggagaaagcctataatttcacatagtttctctttttcatgtaactgtaacctaaatgtattacttctgataaaactatatatcaaatgtcactgcaaattagttttatatctgtcatgtgagatttgtcttacttatttttcttttggttgccatggaagttatggccctgaaaatcgtctccctccccttctcttgctgtacagcatgcgttctctttttgtggttgctggctgggtactgtatttaatgaagtagagaatagcacttgcaaaaatacagtcttggtacctagagactgtcatgcagatagtataatttggtatatgtgctaatgcattgagtagaggattattttaacacactattttgcttttgtattttagttaaaataatcgatggggatgtgtagcccccccgtgtgaggatgacatcaccacatttctagtttcatggagctcaagatgtcttgtgtctgtgtggctagatggcctctgcttggtaatcttatttttaggcctaaaattcccacttaaatccaaagtaaaaatggttatactgaagcataaaccttgcctgtgtaattttaaaaaattaatagagctgtgcaaaccctgttatttttgtaaaaaaaaaaaaaaatacatatctatatataatatgtgtgtgtgtgtgacatatgcacacgtctctgtgtatgtgaagtaggggaggccctgggggatgacctcccagcctttatgatgcttttctctatgctgctggacttcattcttactggtccacgcagatgcaggcggcctgaggccagtgctgtaccaagtagaagacggttcctaaggacagagtttgtctgttttctaacaaagaaaaattctacaaaggagaggttgggcgttacaaaggcattgtgaatct

SEQ ID NO: 12177 - DNA, 1200 bp, Homo sapiens
aaaggaagaagtatttcaaaggaagaagagaccaccatgtaatcaatctgctatgctttaacagccctattggagataatatctcctcctagagggcacagaaaatgttctgggtggttttggttattataatgactggctgatgcactggcagttcatgcctactttatggatagatctgctaaaacaccaccatgtgtgagcccactcaaaatgccaataacacccccatttacaaacagtgacctagtgcaattcacagtcatcagttcatcacagccttgcattaactcagtgtaaacagtatgcttagacactaacatcttctctagtttaaagcagtgtcaaatcttattcattactgtttttcaggctgagctttttgaaactaatattcattcagaaatatcaatgaaaacagtgtcatggctccttatcattaaaaggaagagcacattggataaattattttcttaactccagcattcaattttgctacatgttttgtcttcattttaacagatattttggtaaaagacctcagtgggattgtagaggggcatcaaatcttaatgaacttcaccagctattaagtgacataatgattagaagattaaagactgaagttttaacccagctaccccctaaagtcagacagcgtattccatttgatcttccatcagcagctgccaaggtgagaaccgttgcttgatttaaagtcttactttaaataattttgaattacactattaaagattatacgtatttcatatttcacagaaggaaaggtttgctttcttaaaataggtttaattaatagagcctatacattggttttgtatttcagcaagaaagcaggaagaattcaattttattcatcagatgcataaaaagatatggtaacctagtggtttaaaaaaaaagtatttttgctgaaaaaagaacttcaattgcaacagagatgtagtattaagaattctaaatatcggccaggcacggtggctcatacctgtaacccagcactttgggaggctgaggtgggcagatcacctgaggtcggcagatcacctgaggtcaggagtttgagaccagctggccaacatggtgaaaactcgtctctactaaaaatacaaaaattagttgagtgtggtggcgagtgcccgtaatcccagctactcgggaggctgaggcacgagaatc

SEQ ID NO: 12178 - DNA, 1230 bp, Homo sapiens
ccatttacatttaatatcttttctaatttactaattctttattctgcagtaaatttcatccaatacattcttaattaaaaaaaaaaattatctccccaaagtttatatagttgtcctgacccgccatttacttgttgtttctgaaataagtctctaggtagtgtattttaacaatatctgattctcctcagtacagttctactatttacttaaatgagtcagtgaattccagttgaatttgccttgttctcaattgagtacaaaaacactatcttgacctaaaaagatagaaagtatttccttctttctttttttcaagtgttgcgtaccataccaagcaaattgcttagaaaataagttctactagattttgctttcactaaatttccctagccaatattgtcattttgattttaataacatggtattaaaaattatgtattgctggtgcggacacagttgcatgaggggtttctgccatcatcagtgctgtgtagcagagttagttcctctccagctcagccgcacaggtttggacatatttgactttttcccctcagtttgaattgaccaaagcaatggtgatggagaaggctagtcccctgctggttgggtgggaatttgtgagacagcattacacactgctgaactaggccccagacatgctgcatagattttatggaaggaactcttcttatgtccatgggggattggattcaaatagaaagctagcagatgcagtttatggacagaaagaaatccacaggaaagtgatgtcacgaaacttcagcaactgccacaccaagattctccatgttgatgcttatgccacactaaatgatggtgtggtagtccaggtgttggggcttctgtctaacaacaaccaggctttgaggagattcatgcagatgttcgtacttgctcctgaggggtctgttgcaaatcagttctatgttcacaatgatatcttcagatagcaagatgaggtctttggtgggtttgtcactgagcctcaggaggagtctgaagaagtagtagaggaacgtgaagaaaagacagcaaacacctcaggtggtacctgatgattctggaactttctgtgatcaggcagttgtcagtaatgacgtggaagaacatttagaggagccagttgctgaactggagcctgatcctgagccagaaccagaacaagaatgtgtatctgaaatccaagaggaaaagtctgagcta

SEQ ID NO: 12179 - DNA, 1199 bp, Homo sapiens
ctggagaaaccaggtgttcgtttcagaacccgttagcgctaaggggaggagccaaccccttaagcagcatgcctcacttcgccccacatggaggataattttcctttacccctaaaaagcactataaatacccactgaggagatctggttgtcttttaaatacctcgagtcagtaaaaactcacgaaactccgcacctcaggctccaactcgtgggaaaaggtagctcttttacaagtgggcaaaatggctgtcctcctagttttaccattggttggcttttgcgtccttcaagggcggttacttaccacggattggttctttttctcttgaggttggaggaagatttggcacggctctccgcggcctgggaggaggtaaaggggtggagagaagacagtttttttcaagcttgattgggcaaaactcatgtcactccggggacgtacaacctatgaatagtcggctgccgctcaaagagaacgaagaggcggggctagtgcgtggtgggaaggggcgggattctgccagccgcggctgccgctggagccggtgtccgggctggtgatggggttaattccctttcgtaagactcttacttgcacccacccagccccgccgtcgccccgccgcgccgcgctccaaccgcctcctcctcctcagtaacgcgggtaagagatgcccttccctcccccgtccagctccccgggaataacgcgccttgctcccctcccccgcccgccaaccggtagcgctaacggagaaggaggcaggcaggggagagatgtggtgtgtggaaaggtggccttccccgccgggtcgtcggcgcttcagccagggccttctgacgtcccgctgctgccagcccgccgttaggtcgggttccgagtgagccaggctcgcctggcccgcggctgcggctccggctgcagctgcagccactgccttgtgcccaccgcccccacccgggggccatgtgaaaagcaaacccctcgaggcctagcggaggaggcaggggaaaggtttccgagtccctgccatggctgctgctgctgcctccgcggctgctcttgcagccccagggactcgggagccagccacagcaggcctgccaagagcgtggtactgctctctcgtgtggctggcgccggtgccccgggctcccccggccgccccacggccgcatcccctggccttgca

SEQ ID NO: 12180 - DNA, 1220 bp, Homo sapiens
tctgccatagtcccatctacatactagtattagattcccatagaagtattcctgttgttactggcattgcatgttctttagaatactgtttctatggagttcagcatgataacaaagtcctgagcctaactaaagatgtctgttcttctgcttcctctccactttattgaatgaggaaataaaaactaaaatgcttttattatccacacattcacagagcaaactctaatatagtaatactaagcagatcaaaatacatttaagttccttcgttgtgtgtaagcaaaaaaaaaaaaaatgcatttaagaatagccacatgttgattattgttaaagttgggtgatgggtacatcaaaattcattacactattctctacattagtgtatgtgtgaaaacttctgtaataaaaagttaaactacaaaaatcatcttttgttttaaaacattaataaatattctagcatcaagattggggtaatactgaatgtatagtttttagggggtgaaatttagctgtataaatcataggctgttgacatttgtgattacttcattgctaagttttacatataagagtcttcatactttgtttcagggacagaatgatgctgctgaaattggaacaagaaattttagatttcattggtaataatgagtaagtcctgacattcaacaagaaaagaaattgtcatcaccattctccttgacttactaagttggtttttcttgtgcttctaggtctccacgtaaaaaattccccccaatgacatcttaccataggatgctattacacagagtagccgcttactttggattagaccacaatgttgatcagagtgggaagtctgtcatagtaaacaaaactagcaatacaagaatgtaagtgtcaagagatgtaactacatattatatatctaaataataatactttatctttctatattacctttcatctgaggttttccacatgttttaacagtctaattaagttttatgataaccttatgtgataggactgaaaaacacatttagtttactgggaacaaaatgcaacagcctggactcaaatatggcatatgaatgaggactggggcatatggtaaaaaaataaaaatccagaggacatagtatcagtgatgtttgacaaccactcttagggatttttaaaattaatttagacagctgtagccagccttagtcaaatttaaaaaaaaaaaa

SEQ ID NO: 12181 - DNA, 1204 bp, Homo sapiens
attgtataatatgaacttggccaatttcacttctacattctaatgttgctttcatcttcatttaaataaatgtcttcattttttaatgtgaaatgttgtaccctactcttttctgcatgctgtgcattcccactagatatattttttaaataatttataatttataatattcaacaatagagttgtcatttttttgaagctttaccctattacataattgctgttgttgatatatataatttccataatgtgtactattgcatcttatttaaaaataggaagtatttttctttgataagtttggcctatgtgtagaaggcttactaatttttgacttcttccttttttagcaggataacctagggtctcagtttagccacatgagtcttgctcgccagccatctgctgatggttctgaccctcatgccgccatgttccagtccactgtggttcttcagtctccacagcagtctggttatatcatgacagcagcccctccaccacatcctcctccaccgccaccaccaccacctcctcctcctcccctaccacctgggcagccagtccctactgctggatatcctgcctctggtcatcctgtcagccagcctgtgctccagcagcagggatatattcagcagccatcaccacaggtatattgctttttaaccttttctttcttgtggaaacctctcacttaagatcagttttaacttcaaagaacttatttttaaattctcatgaagagaatttgtgagagtatataaacaaagcatatactcatctttccgcctctggagattttcacgcacatgctaagcaaccatatgacaggtaaatgctccagttggttggtaaagtatgtgagctttgaggggttttttttctgagaggtatgggtttctaaaaaactaacctaagggaaacacaataaagtgtaaatccactgtaaaagtaaaatggtaagactgggcacagtggctcacgcctgtaatcccagcactttgtgaggctgaggctgactcacaaggctgggcttgagcctaggagttggagaccagcctgggcaatgtagcgaaacttttgaatatttaactaacttttaatttctgaaacagaccccacttggttatgatgtagtatccttcttatatattgtgggattcagtttgctaatatttgttaaagatttttgcatctatgt

SEQ ID NO: 12182 - DNA, 2236 bp, Homo sapiens
aggcaggtggattgcctgaactcaggagttcgagaccagcctggccaatatggtgaaactccatccgtctctactgaaaacacaaaaaattagctgggcatggtggcgggcgcttgtaatcccagctacttgggaagctgaggcaggagaatcgcttgaacctgggaggtggaggttgcagtgagccgagatcacaccgctgcactccagcctgggagacagagtcagactccatctcccaaaaaaaaaaaaaaaaaaaaaaaaaaagatggccctaacagttttaattttgtgtattcgaatggtcatttcccatgtcatatttgggtctgcagtgcttttttacccaacttttttggtaacaggaatgtattgattctgtaccttttctattctagttgttgggaaggtcttggaaattactgaactaccagatggaataactcgcatggaagctgaaaagctttttggggaactctttaaaattggcgccaagatccggtggctccgggacccccagtcccaaccacgtcgtcaccccctctgctgtggcagtggggacaacactgccaaccctgaacgctctaaacccagtgacttggcctccacctacaccgtcttagccacattcccctccatttcagctgcacagaatgcactgaagaaacaaattaactcagttaacaagtttaagctgagaacaagcaagaagcactatgactttcacattttggaaagggcaagttctcagtaacagccacctttggacccttcgcctttatggttcccctgccctctcccatctttgattggcttggtatttggagcttctgttaacattatagagactcctaggatgtgtgttcatggcattatagcttttgaagaaaggccagtgatccagcaaagggggaaaaatatgcatttcaccccacatgactaggaatccacatcagaatgatacagagttagcaggtttttctaaggaaatgccattcaaatgcctcctaacttttatagttattttgttttatatttctaaattcttgtatcagatccaaagctctattgtacagcaaattattcttcaaaatgattataaccagttgcaccctgtatttctttttgcagccagcacaatgtgacccaacttaaaatttgggggaaaaagaatgcaggagtgaaataaccaagtcaaaaccatgtactatctccttgggggttagggatgctaagaagagcccacaaatagaggattactcttcccctgaatctctaaactcagaaacaattaccaaaaaatacataactcttccttgtagggccctttccttattcatttaggtagtgtgaacattaagtataaaataaattatgttcttaatgcctcttaaaccacttacattcaaaggggaacagaaatcattctaagcaggaaaatacttccactttttttttttcaagtatctctctaataactaaatgccacttatttgcattctccttgtggattttttgtcacctaaggaaatgcatttgatgagtgctggaaacttcttaagtgctttacagtttgttttcattgtttgcagcggatcactggacatcaaagattcattgcacttatgaacaaggaaccttcttttcaatttctgtgtaatttgcaaggctgtacaatgtgtgctgatgcaagcctttttcagttcaagagaataaatgtttacaaatataggctcactttgtcttttttttaattaaaaacaccttttaaatgagtcagttttgaagacaataacctttttggaagatttaagtcaatttcagacttacagaagatgaaaaacagtaaaccacctcattttacaaatgtcctaaacatccctttctctgtggcagtgattcctggtggacatgattcgtgttactgtgttgtctatcataaagttattaccaactgtagaaatttggagtatgaacatacttattgtcaggcaactaaaaatagaaggttatgtttggtgagataaatttgtttttagcttatgtattgcacacccaattgtccacttaggctcaaacgctttatagacatcttttccctttggttagccaagcaaagtcaccccgttgggaaatctaaaaggtaggggtctgccaactgcagctttcctggagtctggttatcttccagcccagactagggcttctactatgaaattgaagagcactaggtgtt

SEQ ID NO: 12183 - DNA, 1667 bp, Homo sapiens
ttcctgcttagtgggtgtgggttgaaggtgtttaactcagaaaagtaaagacaggaaataactctctgctaggtccttgcttatatggcaaccactgctagaaccctaaaagaaccaaaaatctgccacagcctgcctccatcagcttcttatttagtatttcatatgcccattagccctatgcttcagatgacacgttttgtttagagctactttgctccaagactcttaagcccaaagtaactggtatgtcactgagtaacttgactcggtgtcagagcattttaactagccactcagatgagaatttatgtttaacttctctttttactcatcagctgcaagcaaaatcttgtagtttttaatcttaaacactgaataaaaaaactttcccctaaattggaatgatcttagttttgctttgagttttgttatctagcatctttttgttgcacagggctctattgaggtcctatgtctctgatttttttttttccccagtattgccctggagctgtctctggaaagtagctggcgaggttaccttaactatcactgaagaaagaaattttctgacacactgatggcatgtgacttgtctcctaagtcagtgaggcatcactttgtttgcataaagtatacggtttgttaaggcctttgttcttgtgagatgcaaaacagctgctagtctgcaacctagttttccctctcacctttaactgacgttttgtcctcaataattacacaaggacctagagtacctataggacaaaaagtatagaataaaaatatgcctttagtcatttggtttttcttaaaaagttgagattcttaatctgacttacatgttactttatccgtatgtctttgttagtggagaccgctaaactaatgatgtttgaaaacagttcctctgttttagattggaagatagcactctagagtggacatacggaaagactgtgactttattttgtaatgggaggaagaaattttctcagagcaaactttctattttttacctgtgaaataacagtgactttttaaaatggtgacagtgttggcaaggaaacagcaacacaggctgcgctgttggtaggagtgaaaaccagtataattcttctgaaaaacatttatcagaaacttaaaatatttcataccgtttgatccagtagcttcttctaaatcataaatgcagacaatgtttaggtaaagacatactcattaagtgttatttattttactcaagaactggaaaccaactaaatgccttctatagaagtaatttttgatgaggagaaatggtacaatactaattaacaacttggtttaacatgtttactgagcatctgttaagtgttgggggaaaaagcagcaggatccagagctataggtacagtgtgatctcagctttgcaaacacattttctacatagatagtactaggtattaatagatatgtaaagaaagaaatcacaccattaataatggtaagattggtttatgtgattttagtggtatttttggcacccttatatatgttttccaaactttcagcagtgatattatttccataacttaaaaagtgagtttgaaaaagaaaatctccagcaagcatctcatttaaataaaggtttgtcatctttaaaaatacagcaatatgtgact

SEQ ID NO: 12184 - DNA, 1536 bp, Homo sapiens
ccagatggcatgttctacctttttttttattagctcagagtgaaaaatttttcagatgaattttcatagattcttctcctaactctatgaaatggtggtatatgaaaaagttcagtggtcataattaaaaattgctgaatgatattaagtatgaaacagacttccaattaattagaagattttgcagagttgtttaaccttaaaattcaagcattacttccttttttgaagttgtatttacaagcatttgatgtaatatatttaagtatttcttaattttccacaaggggtttatggtatgaaaaggtcagcatcctactaggaacagggtttagcagagcactgatagtgatttttaaagtgtggtccttttcctaggagtttctagttgggaaatgaaagaaaatgttgatagcaaacactcggaagaagggtcaagtcttgtatatctggacattggtataatactgcttgaaacctgaggacaaatatttgtgtttcacaggatcatgttctaattgagctcacccaggctggattgaaaggctccacagagggaagtgagagctatgaagaagatccctacttggtagttaaccctaactacttgctcgaagattgagatagtgaaagtaactgaccagagctgaggaactgtggcacagcacctcgtggcctggagcctggctggagctctgctagggacagaagtgtttctggaagtgatgcttccaggatttgttttcagaaacaagaattgagttgatggtcctatgtgtcacattcatcacaggtttcataccaacacaggcttcagcacttcctttggtgtgtttcctgtcccagtgaagttggaaccaaataatgtgtagtctctataaccaatacctttgttttcatgtgtaagaaaaggcccattacttttaaggtatgtgctgtcctattgagcaaataactttttttcaattgccagctactgcttttattcatcaaaataaaataacttgttctgaagttgtctattggatttctttctactgtaccctgattattacttccatctacttctgaatgtgagactttccctttttgcttaacctggagtgaagaggtagaactgtggtattatggatgaggtttctatgagaaggagtcattagagaactcatatgaaagctagaggccttagagatgactttccaaggttaattccagttgtttttttttttttttaagtttataaaagtttattatacttttttaaaattactctttagtaatttattttacttctgtgtcctaagggtaatttctcaggattgttttcaaattgcttttttaggggaaataggtcatttgctatattacaagcaatccccaaattttatggtcttccaggaaaagttattaccgtttatgatactaacagttcctgagacttagctatgatcagtatgttcatgaggtggagcagttcctgtgttgcagcttttaacaacagatggcattcattaaatcacaaagtatgttaaaggt

SEQ ID NO: 12185 - DNA, 1096 bp, Homo sapiens
catgttggccaggctggtctcaaactcctgacctcaggtgatgtgcttcccttggccttgcaaagtgctgggattacaggtgtgagccactgcacctagccggtttattttgtttttcatttttattttttggcagaggagatcatgtgggaatgtatgcttgttttaaaattagtgttaaggctggatgtggtggcccacacctgtaatcccagcacttgggagaccaagacaggaggatcagttgagtccggtagttcgagaccagcctgggcagcatagcaagaccctgtctctaaaacaaataataataataatttttaaaagtgaaaaaaatcagtattaaatgtaagtagtgtatttgtaaatgcttgacaaggggatgttaagggcacaaaaataagattcaggtggtcaatttttcacttaggtcatgctgacagccctgctcctgtgaacgggatcaatggctacaatgaagacataaatcaagagtctgctcccaaagcctccttaaggctgggcttctctgagtactgccgaatctctaaccttattgtgcttcacctcagaaaggtggaagaaggtgaggcttacctggtactgcttacatgctcggtcacttctgtaagctctgttcacataggccacttgtgattgccaaacttcgtgttgttctgtcggaagagaggataagttgttagataaactcactttagcaaagtaaatttgtggagtatcagcatacctgccagcctgaacatttcttcacaagcttattgtcaggcaaagctttgtaggtccttctttttaacattctgggcctattttaataattttgggacctgataacatatgaagcagcacatacaaatgtttttacaaatgcaaaattactattcccttacaatggttctgtttaaaacagctggacccctagggtatattttaacagtaattaattgagcctagaaatctatactatcaaaaggccattgcagactagaaatggagtaaaatcctcatgtagttattggtaaagtgtggcgtctggacactagtacgcttcctacccttaactgctttaccatgctat

SEQ ID NO: 12186 - DNA, 1120 bp, Homo sapiens
ccctgcaaagagtgtgagttaattaattgagcctcaaatactgagcattaatttatttaatgagcactgacatcctgaggtgtaaaagacattacatcttgttccattgcttcagcttgttaagcagcttttagaaatggtcatttgcttaaatactaagccttttttcaggttcataaaattagtaacatggaattcacaagcctccttaatattagtttcttttgaaagacattacaatagtaatttattgtcactggcttctcaaagtttcaaccctctcaggttccctaaatgtttccacctggaaggctcttaaacttaggtttaccgtagctctcatcaaatagaaatgtttctctaacttgagtgatgatctgaaacagatttccaaagagtcagaggacttcattgtggagcaatataaacatctccgccagagagatggttctggagtgaccaagtcttcatggaggattacagtgcgacagcttgagagcatgattcgtctctctgaagctatggctcggatgcactgctgtgatgaggtatcagagtcactttgatatgatgagagcagagataaacagatttgttgcatgtttttaatctttggtatgggacatactagaattcactgcaaatacatttttatgtaactgttgaatgctcatacgaccatggaattcttccctttaaagagcttggtaagcatttgagtgtagttgttagacggagacgatcacgtcatagtttatagagtgcataaagacgtaagttaccatttaatacctttcattcaggaaaaatgtacttagaccctacaatgtactagtaggcctctgcgctggcaatacagataagataatgtagcccctggcctcaaaggaactctcctccttaggttgcatttgtataatgtttgatttttagattgttctttgagccctgcattccacgaggataggtcagtgggtattaacgaggtaaaaggggagtagtacgaaagggcattcaagcgtcccatcttcgcttcaaccaaagcagccctgcgttttcctagttttattaataggtttgatgtaaggtcgtctttgaaaagggggtttggctttttttt

SEQ ID NO: 12187 - DNA, 1099 bp, Homo sapiens
atcatggcttcactgccccttcaacctcctgggctcaagtgatcctcctgcctcagccacctgagtagctgggattacacatgtgcaccaccatgcccagctagtttttttgtagagacagggagggtctcagtttgtcgccctgactggtctcaaactcttgacctcaagctcttctctcacatcagtctcccaaagtgttgggattacaagtgtgagccactgcactttaccctactattgtttttaaagccaatcaattccttcaggtatagttttagagtggggcaatggtatacatttaaacgtttgattttaaatccacctgttcccaaactttcatcagaaacttggtacccattaatacttctttaagtggtatattagagcttgtttttggcgataaatcatttcttattgcctgggatagtctggagaagatattgctgtgactatcaaagtgatttttttgttttgaattaggttacagattatgccattgccaggcgcatagtagatttgcattcaagaattgaggaatcaattgatcgtgtctattccctcgatgatatcagaagatatcttctctttgcaagacagtttaaacccaaggtaacctacccttttgtactgggataaggtataatgggtatattaaagtggaatttaagtaagtgtgttatatggaaattaactgaacctgtcatctaccttagttcctaaattttacaactttttttttttttctggaacagcaatttgttttttcagagagggctgagaaagggaactgtaaaaaaaattctgaataattccattatttgtttggtggtaataaaaagatttgtatgggagaagagttttggataactggataatctagaacattcttttatttcaaacattactaagaacgttaaaattgtttatgcgcctaaatcaatagttgaatctttctttgaaggaaacattggattcatctaggccattatgataaatataaattactgttttacagtgattgatgcattgtattggactaactctgttctggacccaggattcttacctggacataaacccccaaatgcttggcatt

SEQ ID NO: 12188 - DNA, 1167 bp, Homo sapiens
agtgcagtggtacaaattatccacgctgttttttgttttaaagtttcatagttcctctgttattcttctggaggaaatacaaataaaaagatttagtaatctgggaagtaaacttctgagaatgatgaacccctggcagtatcattcagttaacttgattctgtgtcataaatgggagtttggaaaatagttcagtattggaaaaagggagtgaacataatattctcttattttatttgcatctttatgtcagtgattaacattctgctatcgcttatctcttgagcattcaggtagctttttttctatttaactcactggacaaatgacatacccttaagtgtctttgttaactgagggcttactagtttggggagttgtttttttttaaacctttacagtcaataaattgtgaggttgacttcccatgctatgttgtgtttgtaatgaagtttcttctcctttatgctcttttgactgcttctatactaatgattcttcctttgttctctaccattagtttggggggaaagagctcagagatgaggaacagacagctgagagcattaagaaccaaatgactgtgaaagaatgggagaaagtgtttgagatgagtcaagataaaaatctataccacaatctttgtaccagcctgttccctactatacatggtaagaattccatccatttgtaccataaacttgaaatcaaaataatgattataaacagccacaggtgatttctgaaagcacataaatcagactgtgaaagtttttagtgggtctgaaagaggtcatttacaaaaggacaggtacatgatttcacttatacgaggtacctgtaatgtgcaaattcatagagacacggtaggatagaggttatcagtggctgggggaatgggagaaatgagttatttaatggataaagttgctatttgggatgatgacaaagttctggaaagggatagtggtgacagttatacaacataatgtacttactgccactgaacttatacactgaaaaatggttaaaatgataagttttattatgtatttttatcacaattttatttttttaaggaaaagttattttgtcatcttatttcctggccttatgacagagctgcacttaagtgtgtttccatatgcgagactagtctcctggcct

SEQ ID NO: 12189 - DNA, 1094 bp, Homo sapiens
aagtttgtttagatttcaagtgtcacatgttacaaaaacttacttcttaaaatcattaaatttatctaaaattctcacatgttccttcataatctagtttgggatagtaattgtttcatgtctgtttaaatatgtcttccctcttgattctgtcgtttaaactttttaatcagtacatcaaacttctttcctttgtaggtaaggtactcaactgtgtggggtactacataaatcctgaaagactacaataaagtggtgatgtctcgggaacccaccccacctctacctggagatatgtctactggtcccatagcagaaagctggtgttacacacaggtacatgctcttaaaaatccctcactttatgtcacttataaattttacagtatgttgagaatagtattgtgaaacactttgccatagttattagaagtgttagaagactggatcgtaggatgttgaacatgtaacaagttaaaagtattaccgtcatcattataaaagtggttttctgaatctcttaggttaaagtagtaaaattttcctatatgtggaccattaataacttcagtttttgtcgagaggaaatgggtgaagtgttaaaaagttcaacattttcatctggcccaagtgacaaaatgaaatggtaagatttttgtttgctttgaatttttgttttttgtttttgatgtgatcatcagctgctcatgattttgttatcatttttcctgaatgagtattaatgtaatttcatattagattggtagtatgttcctaatagtgtggggaattataaagaactgtgaggatgttgacaggagtgctgtttgtgacattaacacatgatttcagtgttctctctctctctttctctctctctctctctctctcgaatgcttttcaagtattatattcctccatgtgagcttattgttttattttaggtgcctgagggtaaacccaaagggattagatgatgaaagtaaagactacttgtccttatatttgcttttagtcagctgccccaaaagtgaagttcgagcaaaattcaaattttcccttctgaatgctaaaagggaagaaacaaaagcaat

SEQ ID NO: 12190 - DNA, 1230 bp, Homo sapiens
ttgaaaagtattctttagtaaatatcttttaattctatttttcagccaagcaaccgacataatggaaacatcagggtggaagtccatgattcagtctcaccctcatttagtagcagaagcctttcgagcactagcatctgcacagtgtccacagtttggcattccacgcaaacggctaaaacagtcctgaaatcttccatgaacagttgaaaaatggaattgactttcactcctccaggtccagaaggattctaatacacaaaccataagcaagagttgtttctgttattttgtccacagaacagaagctgaaaaagcatattgcttgcatttcaggtggataatttatggtttattcttcagctttaaattagactgattaattcacttcaaggccttaaattatcttcaatgacttgtcttgttcatataatactttaatttttttttattgtgccttgtcattttgaccaaggctatgcaggattgcactagctccataatgcagtaatattgataactgaagatactaagtttcaaaaggatcttccattattttgcaaaaagaaaaatgaattttatagggtttgtcctatgctatctcaaagtttaagttctctttaaaagcacttgtattggagattaccagtaatatctccaatctaagttctataaatatgggagaaccctcttaccttcaaggtaagttatggcaatacactgcttcaattctaatttatttttcatttcagggggcaaatatgcaatgagttggcctagatttttagtgacatttatgatgtttgtcttgtatgttaactgtccaacaaactgtgggtttattctaagtttacaattattgagaactgattgaggttaagatttcatgaagaaagcatgtattgtgtggaagtaatttttttttaatttatactgacctacatttatacgaagaattctgtacatgttaaaagtaaggatgaccaaatgcaaatttaatgagtgggccaattaagaaagatacatatgcacttttactgtgtaacttttgtatgctgaatggtacatatatttttttgcttttgagggaattaataaggtataattaattgtgtcttaacttttcaaagaaatttttagatggaggcaactgggatgtttgtgataatagatgagaaagacatccttgattgtagttaaattggtttggattacagatattcattattg

SEQ ID NO: 12191 - DNA, 1319 bp, Homo sapiens
gctctaatatgtgcatgtattttgcttgtttagtgtatctacaaatacaccagttgtcataactaatcaatcagtttatctattaaaaggttttttaatgtgtttatttatggctagttctgtcaagtgtttgaaatactggaaatcagatcttctcactgaatataggaaggattgcagtttgaatataatcattaaatgactgaaatcacataaatcacattaatatatttttttctctttttaaccagttgaattaagcctcttttatcatgtatgtttctttaccccgctgctattaaacaaggcaatccttttatctcttaaataattatggaatttcagtgcagcactgtgtaatttgaagtcaagagcagctgaactcaaatcatataataaaaagcaaaatatataaattatgccatttagcaattattcagtgtccttatgtctcattttttaagtgcatagaaaaggtgaaatttgttcttttatagacaaatcagtgaagcagagaaagcttgtgatagaaagcagcactactggcaccaaccaggtctctcctgagtctatgctcacctcactccaagatacttgtcttttcaattttgttctctctgtggcccatcttgagacactaagatatcacttattctgagcctcttttaagtatatacaaaggtaatccaatgtcgtggtgtaagttatatctcttttcttttttcttagatgtagtactaagcagctacagtatacatttccctttaggcctctttgcacagtcggaatccttctgtctgcaaactgtaagaatattcctctgatttccagtctcggagaacattacaagtagcattgaatacagataattttgagtgccagctcctcatttagagattataaaataacaacaacaacaaaatcaagacctaaattggtgaactgtaactcagctggaagcatcaatctggagtttttatagtccagagtggttgctgtttattttaaattacttcttatagccagttttcactccatgttcgtcataagattctagaagtatacaactattctacatattggtattcttcacagtgctttataataaaatcagtgcttagtagtcttcactaagtgaaggaaagaaaaggaaatgaataaaagacaaaatgtatgaagttatctctcttccacagaaggtgcctaaatatgtatcacatttagattagtcgttataaaacaacatatttctcacatatcaccttagcaaaatctcatgttagtaaactcagagtgatcttcttcatttactttttgta

SEQ ID NO: 12192 - DNA, 1105 bp, Homo sapiens
gcctcctccccaaaattgcttttacaactaacactgatactaatttaggatagttcatgccttatccttgctaagaaaatggaattgatggtaggcaggtgctaaagtgcttttcaaaacaatattacgttagaatacaattggattcttcctcaaatttatacaggccaaaaagtaaaacattaattttctgaatttccagattaccaatcaattaatcaacaaatagccagtattatgctgtgtatttctgtcaggtcattttaaaatccatgttaattttataaaagaattttttacatgtcactgtcaggagctcactgtgaatgtgttgtcttcaaatggttatttaaccacacagtacactacattttacatatatgtacgtaatctctgggaatagtaaattaattatgttatttataaacaatacataggtcaacagactttaagcagggaggaaaagaagagtaatagcgtctgtgtgctgcagaccattcagaactgtcacgtgtgtccccatggtctcattcattgtattcctagcaattcccttttcaatgttgagttcacctctttatttcacaaagtacttggtctctcaatttcttgatctggttttgcttccatttaaaaactaatcaagaagggaaaatattgagaatgtgcatacaagaaaatcattaatttcctgaagatgaatttctacctgttgtgaacatttaactttctttttaaaagttaaacaaaaataaacaagggatattatgatgaatgtttggcttatgtgagtactagagataaaatttttaaacccagttattcacaatataaaatgttttcaagttagaaaaaatttttagaaatcctgggtattgtatttaactgtagctaaccaattttaaaacttgtattcttttgagaactattattaatagaaaaactttttataagcagtaaaataagaatgttccagtgactacctgtccttatacctagtcttgttaaaactttcttttgcagggtatttagtgtttggtttacagtcagtgcagagtgggcaagttaacagaaagtttgagctagagatactggaaaaaaaaaa

SEQ ID NO: 12193 - DNA, 1155 bp, Homo sapiens
ccgcatattctcactcataggtgggaattgaacaatgagatcacatggacacaggaaggggaatatcacactctggggactgttgtggggtggggggatgggggagggatagcattaggagatatacctaatgctagatgacgagttagtgggtgcagcgcaccagcatggcacatgtatacctatgtaactaacctgcacaatgtgcacatgtaccctaaaacttaaagtataaaaaaaaaaaaaaacatagctaaagaaaaactgcatatgcaaatcataccgtattcatttttttatttaacttggggatggaatggggatagcatacattttatttgtacaatatttaacaatcacttatccaaggtggggttttatggggattttaagctttctgttaaatacttgcagaaaaaatagcaagtacgatttgacagtagtacaataacctgtgcccaaaacacaagaaatacagagtaaagcgaaaataactgcttaccaatattctgagaggtaacaaatgggatatgggttgagactgcataaaaaacgtactgctggttgaatatctgaggtaaatgatgttcaatcaagatgctacttgtatcattttgcccataaatggataaataattttatgcatatcataccaaatgttcctaaaaagtaatctttcaaaaaagtataaaagagaaactggaaagtatctgtgatgaagcttctttctttaaaaaaaaaaaaaaaaacaaaaaaaccagtaatcagtttattccactaaaccaccatctcgccatggttttttttcccctaccacctgcattttacttaaatgtagctgttacttaggggtgaggaaatgcaacagaagagattctttttaaatttcatgatatgattctattttaaattccaaaggtgttgggttttttcctgattgtattttcaaaacatcaccatgaaagatagatagtgcaagttcatgggactaacaatcgtgaagcacagtctctttttctggaattcacaaggtacctagaattcaaacaagaatcacacatcacatgctaaaaaaacttctagcatctaaaatacatacaagagctgtgcagggcatagacttcaaataaagccgaacactggttaatccatcag

SEQ ID NO: 12194 - DNA, 1244 bp, Homo sapiens
agactagaaacaatagcaagggagtgggaactataattaagataatatatttcctgagagtataaaattttattccagtagactagaacttacttctgaatctggtcttcttagagtggacaaagtaaagacatataattacagctctagaaaatacagaaatgcttagttttctgggcttttttttttttttaaaagaatccttattccatgcagatgatttttgaaaaattatgacaatcttttccaggcctttcttggctctgctacttctgaatttactcttttttcatctaatcttttcttcaatgccagtgttcctcaccttccattcaaccctaattactgcagtcacttgcctctttagatggtactttctcaaagggctgtggtgatctttgaatttctaaagccattagcctcttctcaaatatatctttttacaaagtagtttatattgttgaacctcacttctctcttaaaactttgttcccttgttttctagatctctactctgtcttagattctcttccagtctttggtatctttcttaatttcttagtttttctcttttcccacctactacttaaatattaataatccaagattcattttttgaccacatttcacttttcacaggccattttgtttcccatagatcatgtttgatttttatcttctacctttcaaacccttccttctcttctgctaccagttaattctctaccagatgtactcctataaacgtcttaattcttttttcttcataacactcagataattccgacccactttacctcttgtctggacagctacctccagttaggtttttctgccttttctttttgtacattcactttgccagtaattgaaactccagtacgtgactactcattttctgccaatgtgataattttcctgctactcatgctgttccctgtaactggaatgttcttccttcttttttaaatctcttgtctcatccagtttaagcattctttgtaatactttaccttgtatccctaggtacagtaactcatgcacttctgtttttgtgctgcattttgttcatttcactagtatgactgtgtagtagtttcccttattcaagtacgaatttggggttagccaggattgttttatcattgtgtttattgaattaacgtaaagaacaggataagaaaatcagtagactggaaactttattttggttttagtgttctacaaataagaccaacatctat

SEQ ID NO: 12195 - DNA, 1477 bp, Homo sapiens
tttatttaaaagtaggcatattagaaaaagacctgtattttgtgcaatagagtcctcagaaattgttataaaaactgtacagaagcacctaagaggtaaatgtgttgaggcatcagaaaatttgactatgaaaacattattcaacactaatgatttatgagaaatgacaaggaggaaataaaagatggttgtaaagacattattgttcactatgaaaacagtgtgctatgaaaaccagattgctactgggaatgagaaaactgctgaggtttttaataataagctagtgtgtaggtataataccgtcatgctggagaagcattctaacccacatgtctttgttgctgatagtaaaagcgttttccttcctagtgttgccatttacacctgccatccttcacatcttgtgttatgtgttatgttttgatgtcactatttaatgaagaactattcaatgatctcttatgttaaatatatatatggtttagaagatatttgaaattattagtgccttcttgatattcttagtttaaagaatctcataaaactttatgttttatgtgtctaacagtatacttatcccatagggggcttccagcttttcactcactcatcatatttctttttagataactcgacacaaatgaaaattttattttatctatttagcagaaaagtcacacaaagttcataactatttaaaagtacaccatatttattgagcataccttaaataattttgatgggacatttttagtctcattgcattatacagttttgatatcccctacctcagtttacttcatttcaggtctgagttcatgtgcaaagtgtatgtatttcattgatgtatttcaattcatctataatggaaaagaccaacatttacttatattcttgtttcttctgatggtcaagtttagacttatttaatactgttttggtcatttattttttttgtttcatgtatctttgtaatacatctgacctgtactgttactgctgggggtgtcaaagcatataggttaaaaatttattagtgtcagaaaagtgtgagcatataaatagctaaaaaggataaggatacatgtctagaaatgatatgaatatgaccaactagtgtaaactaacaggaagtatgtgcttaataaaaatctaagtagaatttttaaagtattaaacctaataaaattaaatactaattaacgtgcataggtctgatgtgcagctggttatgaaaacggattgattcactaatgaacataactctttcgatgagctaaatattgaagcagtctctaatgccatgtttctttttgccatgtagtgaactgtgtcaactcaatgtaccatcactgtaattgcctagcctaaatatctgtttacactgacatttattcattcatcaaataaccgttgagccttaaaggtaggcattcagaatgagacagtaaatgatagtcacagcttttcctct

SEQ ID NO: 12196 - DNA, 1208 bp, Homo sapiens
aggagggaaaattctatttaggaggctatttcagtaagttgtggaagtaatgaagtgattagaaactggatatatgttataggaactgttcatttaacctttatttaaaaatattttctgccctggtagtaataaaacttgttgaacataattttatctttctttgaaatattcagaattttgtactgttaaagtttgaagtaataaatgcagaagatacttaaaatctgtgatacaaatttatttcctgtaatttggaatttttctttcatctggtagtggtgacaaacacctcaattaatctagcaaacagattaattttttgtaattgaaattttatattctagtttctgagtatatatttaattttgtttaaaaaattctacttacaaaaattgtaataatctaaggtgttatcagtatgagccacgagtattaagagagaatgatgacaatgtaactgtaggtctttggcaaaggaactatttataattgattcttaaagcactttgtgattattaaacaaagtaacttttatataaaattatgcattgattaatattactaaaacaacttatgttgcctactttacattttccaggaacatcatttacagcgagcaatttcagcacagcaagtgtttagagaaaaaaaagagagtatggtcattcctgttcctgaggcagagagcaacgtcaactattacaatcgcttgtacaaaggagagtttaaacagccaaaacagttcattcatattcagcgtaagtttgttaattcattgttttctgtttgtactttaaatttatcaaccagtggaaatcttttcttttgtctaaagaaattctgattttttaattcatacacactgattaatagatatgttaaacattaaagaataaaatccctctgtgcttacatctgaatttggaaatcattttgagttttaagtaacatttggaacatttgatatttatgtagtataggattttgtatagcacttatactttattacatagctaaaaggtggtggattactatacccaaatgagatttcctttttttttttctttgagacagagtctctctgttacccaggctggagtgcagtggcatgatcttggctcactgcaacctctgccttctgggtttaagtgattctcctgcttcagcctactgagtagttgggattacaggcgtgtgccaccaca

SEQ ID NO: 12197 - DNA, 1450 bp, Homo sapiens
tatatgatgtatattttgtaaaattgggaaaatcactaccttgtaaaatagtttatttgtatcatcaatattatttctgttacttgaatagtagatattcatcatcatgcttttgcacttgaatttgcaactgaatggattttaaaaaataattctttaatgggatcatgagcatgaaatgggatcctgcatcacttgttttaactatttattttgccatgtttacattttgtatcttgtaaaaataaatccaactttgtgtctaaaaagttaaagattcatagctaggaaatgaaattcttgtaatttttttctaaaggaactgtaaagttttcacttggttcattttgtttcacaatttgactagatggactttttggtaaatactttagtggcatttcactgtcaaatatgaagttcaaggcaaaatagtattttctattactgtgcaggggaaagggatggatcgatacatgcaaatttaatgtagtaactcacttttccatatattttgaatgtatatttctatttatgataccaatttataaaaaataattacacagaaaaaatggaataggaaaaattatgcatctagcacatttaaactgtgcaaatatgaaaatttttcgaggattacattttatctgaaggctgcatattttaactggctttaaaactgtaacacatcacataaaagatactttaccaggtatgtattgcattatatcattgcaataattattggaagtctagatatcgagccatcccaggtgttgggcggggggagggttgtggcaagattgtcttttcaattttggagagttttcctgtggctacaaggcaagtaacgggttggaaaaagtctgactgtaagcgttggacaccttcatagtgtagtgttttagtgactttttttatacggttcttgtaaattagatacgtgtagtggtgtttcagaatgtttgtttatgcactagttcagacaactttccctgttacttgttcttgataagtgaaaactgcagggaaataaaaaatacatatcaaaacatggacatgctgcatatgtgtttatttcacaatgtgcacacagtataagtgaaaatttaagggagatgatagcacttaacagcacttttcatgttcacatgctttccaagcattaatgaaaagaactataggaagctcatctgtgggctctattgggtttcagataatccaatataaactacctttgatatgaaagttcgtaagatattttacagaatgtaagtaatttgcagtatcgcagtcattgaaatgtcataagtgagcctcattttataaataaaagtttagagtagaattatattgcaagggggttttgtcaagtaagtactgggaaatgtaaatatttttaatgaatacaattaaaaccatttcaaacttacataattttatactttacatt

SEQ ID NO: 12198 - DNA, 1155 bp, Homo sapiens
ttttaaaagaagttgatgaaatgtattttcttgattgatctgttaaatgatactgaaagtgttgccagaataaggttcttagaaattttggaaaattttggaaatcagttctagaggtgatttcattaaacaagattgccttacttggaactccaggctcaggtcagtttgtaaatactcaaaacccaaacccatatattctcgttccttctcctgctcccttttcctcctcctcctcaccccacactagccacatagactctgattttgtttccttgagtggcagctggaggcaataatgtggggcctcagaacttggcagaacaagtgctcccctgctggataaacaggccaacacaatgagtttttccaccaacttctggtctgttggcaagtcaggtagatgcccaagggagctggcaggcacacgtgggtgcttcctgctccaccgggttctgtctgaggaacccagagatggttctccctctctctcatgtgtctcccagcatgctttaactgcccgtgtttgtattttcgcccactaggggaagctgcatgacccccagctcatggggatcatcccacgaattgcccatgatatctttgaccatatctactccatggatgagaacctggagtttcacataaaggtacgtattactgattggtccccagagaagacactgggccccagataacgtttcttatacctcctcctttcaagaagatataaaagatgatcctactaatttaaatgacattcttgtggtaagcagagccctctttattagtgacctaggctaacaggtgtctggagggtttgcttgaaatatccacataatgaaagcaaaagccttctttaggaggaaatcatcttgattgttgcccaaattctaccctttatcctctggatttctgtgggtatgactgaaatgtgtttgtgtttgggttagggcagcattttccaaagtgtgttctgtggaacacagtcccttgtgttattaatggtgggctagcagggaaaagggctgtaaggccaaatgagctgggaaaatgctttcttgaacagtgttaagtttatcacaggtttcaatatgctctgcaaaggggacatgcattagattacatttcccagcttatttgaatgtagacaca

SEQ ID NO: 12199 - DNA, 1216 bp, Homo sapiens
ccgggcacggtggcttatacctgtaatcccagcactttgggaggccgaggtgggtggatcacctgaggtcaggaatttgagaccagcctggacaacatggtgaaacaccgtctctactaaaaatacaaaaattagccgggtgtggtggcaaacccttgtaatcccagctacttgggaggctaaggcagaagaatcacttgaacccgagaggcagaggttgcagtgagtcgatatcgcgccactgcaccccagcctgggtgacaagagtgaaactccatctcaaaaacaaacaaacaaaaaatatgtggcttgtgttatatttgtatctgacagctctggtctaaacatctagaattaaacaaaacttttttgaggagtaaatttctactgtgttttctaattcctatgttctctctttggttctctttcaacagatatgactccacgtagcatgtcaaggactacattaatcaccaattcctttatttttccccccctacagtttccattttttttttatacttgcttactccagccatctgcagtacaccagtttcaggtcttttgagctgtgtagagtttctgtgtgtacagatgtgtgctcggacttttctctttttgagaaatctgaaggagatggttgcagaagatccacttactactgagaaccattaccaccgactcggcctccggggtgttgggtggtttctgggtggttcctggagcctcctctgggcagtgcactgtcccatctgtacgccctaatgtgccattccctagaggggaacaaccaagtgccgtggaggcagatgatcatggtctgcctcaactgtctggtttcctgtaaaataaacacattgttttatatttttagggaacaaaaagtgctgctatagggttcaaagttttccttctgaacacttttccgaaacaaattaccccaaagacacattttgaatatcctggtcacatctttggatctgtaaaatataccttttagtatggcacctgttaaaatgcaaagcaaatttctttggggcagaaaaacaatctgacagtagcagtgtagaatttgttcattcaaatacatctgtgtaaatgcaaaaagtcataaaattcacctccgagctgcttgcttttgaacctgcagcaactagtcttagccggcccggtttgaacatcgttctttcagaagtgctgaaaatgctgcaaagtt

SEQ ID NO: 12200 - DNA, 1161 bp, Homo sapiens
tttctctaaccattttcagcttgagtgggtattgctgaagaaatccaacatcattccagcagttgaaaaaggaagccttcgggagaaagtgcttgtcaaaattttgttctttgtgcttgtgtatgagtaagttgccatgaataagttattattttaacccataattggcgactgtttatatgaattctttctttggcaccaaataggtttcatcttcttaggcacaattagaaaaaatccacatagatggatattttacatttagttattgctttatccaaatacatgaatctaaagctgaatcaacccttacttccagttgtgcttattaagaagatcaatttccaagtagtaaagttttcagggaaactgactgtgctgctatttgttttgacaaatttgggggtaagtcaatgacaaccaaaccaatctcggtggaaactcctatcctatcatgttgtgtgcccaagatgagtgagctggcactgtgccctgaagctttcaccactgtaatgaaatatatgccaggggagactttgggcttttctcatgactgtgtgggtcgaaggtagctcaagtgtgtgtgtgtgtgtgtgtgtgtgtgtgtgtgtgtgtgtgtgtgtatgtgtgtaaagtgctaagaactgtgcattgacatccaaacatttcttgtacaaaatttccctagcaaagcaaacctgctttgacttaatttatttgttaaatgttgcactttgtttatgtatgttttgtttttggtggggaataaggagagagaggacgacaaattctattgaagtatttattttgtgaagatggcaattttgcatttgtttaaatttttttcattctttaattttgttatcagtgccagcccaatatacctgctctaccattatttgcggtctgataaaagggtccttgtggggcaggttttgcaaagcttatcaggtaataacatatgccacataaccttgttgatatgtttgcttctgatttgggaagctaaacattggtgtttgagaggattgccaattattaattgtcattaccactactctccattactttttgtttggaaattgaacaaaggtcagtaatggtttttggctcttgttaatatccatcataaaatagattgttttagattctttccagggt

SEQ ID NO: 12201 - DNA, 1191 bp, Homo sapiens
atgtagcatctagtgactttttaaagccctaacgtttacataaagaagctctagttcttatagaaataacaaagcaaataaaagttcttaacaatcccctctttcgaagtgcatttttttaaagcagggcaggagacatttggactctagctatatgacatactgggaaaggcagagggtggagggaagatttcacttcattgtctagcccagaatcttgagcaagctaaagaaaccatcataatctaaaattgcttcatttaacactaacaatttagactttttaaaccaagcattgaataatggctggataactgccgaagtaagcgccgctccatgaagtctgcttacttatttaaaaattgtgtatcagttttaaatactgttcattgtgtgcagatataaggggaatagggcattctgtagaattatacatgtctagtttgtaaagtgtgtcctgtgtactgcagatgtgtgttctctgggctttatgtatctgtacagtagctttcacattaaaaaaattgtggacaaacttgtccggggggtttgaggggagaatggtggtttatatcaataacgatgctgtactatagtccatgtaacaaaagatctggaagtcaccctcctctggcccacggaaaattttggtaatcttctaggttctaaaatgaagatgtatgggtactctggcagactgcatgttgtataatttgaaaaatactaaaagtggaaaataaaattgaattaaactttggctggtctgtttctccttatttgagccaccctgaaggtatggtcattggagatgtcagtgcctgtgtgaggatgagccattttctggcctcaaaagagttcacttcaagtgagcaggtgccccaatacacagcataagcaaagtcaaccttgaccatttttgcttttactttgcttaaatatctgctctaatttttttttcatttcagaactaagaaaacttgacatttgtcacttcaattctgaaaagatagcagctgttgtaaaaaaaaaagtgtcttattagcttttttaaaaagtaggattgactgaaagctcaatagagcagtgtattcactgaatatctgaatttcttcttgcctgagaacggcattaattctccaccaaatgaattggagccctgtttgcatatgttgaaagattatcagcatcttt

SEQ ID NO: 12202 - DNA, 1245 bp, Homo sapiens
aggagggagcgcgccgcacgcgtgagtaaacagccggagctgggaaagtcgagctctggcagcgtctgggtgctgaggggcagaggcggagagaaccctgtcctgatcttcctaggtgggataaatatcggggtgacagtggtaggccgcggggaaccctcagtctgcccaccctccgccccctcgcggcgagatgcctcgttccccgggcttctcccgccctccgccgatctcctccctctgttgaaagctgcccgggaaagtggtggcgggagcgggcccaggcccgaatgtggcgtgggctcaggtgtctggtgtcgggcgccggaggaggttcgcgctggggtttggtgattcggaggcctggggtgcagacgcggcgtggctgtgaggcccgggcgggcgtgcgggtgtgagggccggactcacactgggccgccgcggggctgtttccatcggtcactggattttctcctcttccggttcgggcctcagggtggccgacatgacggccaggggtcagagccccctcgcgccgctgttggagactttggaagacccttctgcctcccatggagggcagactgacgcttacctgactctgaccaggtgaggtccgccacggggcgtagcggagagtggggcgctctatagtggggagaaagaaggtggttgggaggggcgcgtagaatgaatgtgagttctagaagtctagcaaatgtgaggacgcccgagtcgcggacgccttggggggcgggggagatgtattctaggtgacgttcccgggtactgctgctgctgcgcttgaggtgtgtgtttggaacgagggagcatgcacgtgtgttttgcaagcgagggatttttaaaagtttcggttggaagtagttgttggaggaggggtcttcagtgtaaacctccgatgtgttgggaaaatgtggctacccagagtttttttaacagagcaatacactgatttttattaattgcaaaatgcttcaaagtaattttcatagaaatgtactaaagttttgtaaaaccctttggaaaggcttagcaaatcgttagtaactaggaatagggatccctgttctgtctttttggagtcaggttgtcacaacttgcatgtactcgatgtaaaaacttattctgagggtttttctactttcatttctgatatatattgcattatatattctgtatacccttaaggaccttacctactgggtcaattcatttgcaggagtt

SEQ ID NO: 12203 - DNA, 1341 bp, Homo sapiens
agttagatgatttccattgtaaaggaaacccttatctttagagaagggaagttaggaataaagatgtcaaagttgttaccatctgtttttgagggaaaagctgctgcctgctcttttttatacatggaagtgttagcaacctaaagcaggagttgttcattttggagcagagatgcaggattgaaaacatcttaccaaaaattgtcttgtatgttcaaacctacagtgatatctagttatttcagttgcacaagatatctgatttggtgtctgttgttttattttctctcagtatatcctcccctctaatctgaattttgtgtttttgggagaagtttggtatcagcattggttctctgatctgttctctggatatacatttaattttatgattgatgagtatattgttttctctagttttatatttgagactttaaagagtatcacctattctatacaaaattaaaactgcttgtttttcagaggcaaatgctctagaattgctttcaaaattgaatgataccattaagaattcagacaaaaatgtacgtactagagcactttgggtgatatctaagcagacatttccctctgaagtggttggcaaaatggtgagtatagtttttgggtatgccatcttaactatatgccaattaaaagaaaaaactataatgccaataaaaacagttcaggcttatttcatttgtatttatttggttcgttttttaggtatccagtataattgattcattagaaatactgtttaacaaaggagagacgcattctgctgttgttgattttgaagcattaaatgttatcgtaaggtatgcatttggatgttgtgcaaattgaagaatagttttcataaatttagctgaaggagagggtttttgggatttaaatgagagacagacattaaaaggggggaatgtcatttacaccaaacgactcaaggacaaaaagtaatagaaaaaagatggaagtagatatgtgtgggttactaggttttttgtttatttttactgggaccatgttcaaggtgaagtcttggttatgttcctgctagtaacatacacagttcaggtttgaaaaatatcttaaagtttgtgtaaggatttaaaaaataatgtaaactcataagtgggcttgggttgtttaggaaggcagtcagtgtttagcagggaatagagtaccttcttcatttttgttgtaacaggcatgccaacgcataaactcttttaagtgtaaactctttgatgacatttctgtcttccctgttttttgttctttaaaattttcttgttgagttacttgctttaacttccccactgttgaatgctc

SEQ ID NO: 12204 - DNA, 1161 bp, Homo sapiens
gggatcaatgtactatagatgagcaaaaaaatggtccgtcattcttagtggaaattttttgtttttaaaactaactttcaaaatttaaatttggaacctatcttatgtaatttggtactttcttgcatattagttgttgaaattttatgaaatgtaaaattaaagtttgagatgcattttataattcctaagaaaaaatgaacttgtttttctggaattcatattcatgatccgccaagtagttttcgtctcccattctcatttgtaaagataatgttctagtgatacttatccattaatggtacattatgttatgatttgtttggggtgtcagtcagcaaacggacatgtatttgatgtatctaacatttaaatgtgagctataaattgtaaaagtggacagtgactcctattttcaatttatttgagtttttaattaattcagtttttgtttttagcaccacagagaccttcagattggtccaaaaagaagaatgagcccctagggaaattgacttctttatttaaacttattgtgaaagtgatctattctttccacacactgagcttcaaggaagcacattctgataccctcttcactattggcaactcaatcaccggcattatttccagtgtacttgggcatatttctttgccttctatgatccgaaaaatatttgcaactttaacaagacctctggcattattttatgaaaactcaaagtaagtattttggactaagtagctttgaattaaatgtatacaatttaaatataggtagcaacttttattttttaatcagctgtgttgtagatggtagtcttgacaattttgtggagaggataataaactacacttttgttgaaaagatagttaaaatagtatagaaatatgagagagaaattggaagtctattttgcctgttacttccctttccctttgcttttcaatgcttaccttttcagaattgtttatgcaaacaagcatacctattaaatgcatgatagataggaaagcttacttggcatgctgttttgcaattaattatatggtatgcacttaatacagttggctgtttgtatccatgggttctgcattcatggattcaaccaaccctggatcgaaactatttagaaaaattaataaaatgaatgcaaataa

SEQ ID NO: 12205 - DNA, 1116 bp, Homo sapiens
gttttgccatgttgctcaggctcgtctcaaattcctgagctcaagcagtctgcccgctttggcttcccaaagtgctgggattacaggcgtgaaccactgagcccagcctagttaatcaactcttagctcatccctttgtatatgatggcgattggacccaaagttttctaggtgaacgtatgtaggtaactatttatcttgttataattattacaaaaacataatttcttttgttaatagaaaataagttcaaaattgaactgtaatattaataaccaaagcaaattcacctgataatttgtcgagttataaagagggatatatatttaaggcaacagtgggggttagtttaaaattgtcttaattttaaaaattgaaatagcaacatatattctgtgagttaatatttagtatatgttttgcttttattttttcgtttttcctagttagaaaagctactgggagaaattattgcttgtctgcaattcagctacaccggaacttatgatagtgaacttcttgaacaactctccccactattatgcataatatttctgcacaagaataaacagattcgaaaacagagtgctcagttctggaatgccacttttgccaaagtgatgatgttggtttatcctgaagagttaaagtatgctaacaacaaaacttatatacaactaactattctgttgtgatcatataaattgatactttgattcaaataatcttttcttatggggtattgttacagaggattccttagttgaaatattaccatttggaatacatgataattattaaacattatttcaccttttcattggtgcttagaataatcttgatttcaggagccaagaaaagcagtttaaattatccttaataaaagagacaaggaggacaggaaatagatgattttttttttttttttttttttttgagatagagtctcactctgtcgcccaggctggagtgcagtggtgcgatctgggctcactgcaagctctgcctcccgggttcaagcgattctcctgcctcagcctcctgagtagctgggactgaaggtgcgtgccaccatgcctggctaattttttgtatttttagtagagacaaggtttc

SEQ ID NO: 12206 - DNA, 1102 bp, Homo sapiens
tactaatatttatttcagggaaattcctactttaaccagaaaaccaaaggaggattctaagatgatgattacggtatgtttgacatttcatattttgggctttttagaatcacccttccattatacagtctgttaaactgctgaaatgtctgtaggtcttccctttattaattttaaaatttattgtagatttattgtatgatttccttttaactcccattcagatactagcagaatatcagcagacactagtcagtgtgtgtgtgtgtgtgtgtataaaataaatgtacttggcttttcttgaatatttacaattaggaacacaaactgttaggtatctaccactaactttggaatagttgccatatattgaatgtcagtgattatctttgggttaccgaagttttacactaaagttttcccagaaagtcaaactcgtttgctggttattaatctgtgtgtgtatatatatgtatatatttctgtgcaggaggagcaaatggacagtgacattgtcattcctcaagatgtcacggaagactgtggtatggctgaacatcttgaaaagtcctccctttcgaataatgagtgtggttctcttgacaaaaccagtccagaaatgtcaaacagtaataatgatgaaagaaaaaaagctttaatttcatcaaggaaaacatcaactgaatgtgcatctagtacagaaaattctttcgttgtcagcagtagttcagtttctaataccactgttgctggaactcccccataccctacaagtcggaggcaaacctttattactttggagaagtttgatggttcagaaaatagaccttttagtccatcccccttgaataatatttcatcaactgttacagtgaaaaataaccaggaaaccatgattaaaacagattttctaccaaaagcaaagcaaagagaagggactttttcaaaatctgattctgaaaaaatagtgaatggaactaagagatcaagccggagagctggtaaagctgaacaaacagggaataaaaggtctaagcccttaatgagatctgagccggagaaaaatactgaggaatctgttgaaggcattgtagtcttagaa

SEQ ID NO: 12207 - DNA, 4122 bp, Homo sapiens
gctggattcagaagatcttcataattattcaggaagccaactatttgaaatgcacgagaaactaagttgtatggcaaactctgtaataaaaaatctacagtcacgttggagatcaccatcccatgaaaattctatttagtattttcagagaaaattgaaggtttttttaaacatcactggatttcttgattgaggaaacaagttctgaaataatagcacaatttcaaagaagagactctttgcaaagttgataacatttcaaaccctgaaggacagtgacttattatgtaagttcaattttgtaagttcattatgtaagatccttttttttttcataatatgtattcttggctgctatgcgtggtttttcaggaaatttaattatcttactgagatgtgaaagcaaaactagtaacagaacttacattttatttcatgctttcttaaacccgtgcatattctggtgaaacatgtaaaatactttaagtaaaattgaacatttttatttgaatttttgctgaactgataaaggtgtttatatttttgtttgttggtttgtttaattcatgtttgttgggactgaggtttaggaagtttgttactggttaaaaacctcaaatgaaatgcgaaagaatttgaatttttcctgcatatgtcaactttggacagctttcaagaaaaatgagaaaagtttcaacttctggcggttaaaatattaatgcagaatttactaagattttattcatttgcattagcaaatattcatgcagcagcagttgactgaaaatttattcttatgagacgtatagtattcatttttaaatgcatgattgtacattatgtatagacgacaatgtttttaatttataaatttcattctttgttaattgcatgggtttttctgcagcttattgtgaataccttggttctgttcaatagaaacattttgtatatattaaatactgaaatatcagtatcgacggtggaagtgcttcatgggcttgctgcacatatttgtaggatactgtatctgcaaatgcaacaacaaatagttttgtacttggttaacagtcttagttaaaacatgagtttattttctaaaagtatccagaataagtaaaattatagaaataagaaaatgttacacaactttgctgttcatacccttaccttcttactacttttggtttggaggagggtatcaccactagaaagtgtgcctccttaagatttcttaaaggaaagttagtttcagtatttcacagcaagttggactacaaaatctagagttgatctgctttttaaaccttcatttaaaagcaaacttggaagaaatttgaaactgatgtttttaatatatgtctgtgttgcctaggttttctttttttaaagaggtatgtaattaaaacctttgtaaaatttgccaactaatattagtgcctgacttcccatatttgtttcatctttttaactgacagtatatctcacttcttctttgaatagaatgagtgagtgatctcagttttcacattttattcagaagctaatccctacttagcaaggcacacattctacagcaagtcatagaaagtttaatccttgtgcctccttagctctcgtatattcagggatctctataaaagttggtgtcttttttcatcatcataaattcatcataatcacagatatttttgggtctaagatattcatataccaaggatggttttgtaaagaattctgggatcattgaattaaggattgtggcttgaagtaactaaagaaaaatactaatttccttaaaaggaattataattatgatttacattttacatcattaatttcccaaattatatttaaccgtaaggaggtgcacatgagtttttagcaaacaggtatgaataagcagctatgtatatgtgtttggggcagaggggagcagattactttaacacacttcagaattaaaatcagttcgtttcatgactctgtgccttaacgtttgtgtgaactaaacttgctgattgaatgaaattcttgggaagccgaacagtaatagcagaaaatgtgaccaaatgagtatcatgtacttaaatcactgaattttatataagcacaagtattaattttaaaaacattatagtttaataaagctgcatttaaaaatatttgggagcaaagacaagcatgctaaatcttcattttgctatggctataagcatatatttttggcaacttatttgcaatattcttgccttaaagtttcctgcaaatttcccccttagtaattcccgaatagcaaaacattaatattccatgattagctctactgtgttgtctcactattaaaatggaattcgttttttcagatcttttctaatggttaataaaacaaatgtcagatcataataacactcaaatgtgtcttaattgtcttatgcatatttaagaagaaaaaactagtggcatacaggattgtcatgtagtatctttttttttttttgagacacagtcttgctctgttgcctatgctggagtgcaatggtgcgatctcggttcactgcaagctctgcctcccaggtttacaccattctcctgcctcagcctcccaagtagctgggactacaggtgcccgccaccatgcccggctaattttttatatttttagtagagaaggggttcactgtgttagccaggatggtcttgatctgacctcgtgatccgcctgcctcggcctcccaaagtgctgggattacaggcgtgagccaccccacctggccattttcttttttttttgaggtggagttttcgcccttgctgcccaggctggagtgcagtggtacgatctcagctcactgcaacctccacctcctgggttcaagcgattctcctgcctcagcctcccaaatagctgggattacaggtgcctgccaccaccactggttaatttttgtatttttagtagatacggggtttcaccatgtcagccaggctggtctcaaacttctgacctcagatatccacctgcctcagcctcctaaaatggtggcattacaggcgtgagccaccgctcctggcccatcatttccatatctatgaaatctattttggattttagagtggatttaaattttcaatatttcagtgacctcattgttaaagctgctttgccacttgtacaagtttgaaaaccattgttgaatcatatggagctttactctaattccaaatagttaaaggatgaatcaggttaaataatgctgttggataatacaggcaaaaacaggatttaaacccgcacattaaaagcatgactgaaggcccggcaggtggatcactttggcccaggagttcaaaactgacctgaacaatgtggcgaaatcctgtctctactaaaaatacaaaaaccagccaggcatgttggcgcatacttgtaatctcagctactcaggaggctgagacatgagaattgcttgaaccttttaggcggaggttgcagtgagccgagatcatgccattgcgcgacagagcaagtctctgtctcgcaaaaaaaaaaaaaaagtttaattctaacattgcccatggatttttttttttctgtacagcttgaagataagatagttaaagactctgttacaatttaaacatcataaaaatgtgaagagtaagtggtgaggcaagaaacaaaattgggggaaatggtggggatcgtgaatatataagtgaagttttatttttttaaggtgtaaaggagtgagaatagagtaattgctttttaaaaagaaagtataaatgggttaatttttttcttccaactttgactttaattcagtaagaaaggcctaggtttcatctcatattcttcataattgattttcaagaagttaatttgtcattcagcctaggaggctataaaacagcagttagttggcattattagactaaaacttgggtggggggaggagactgtttcctcattgctgcaacccatggtctatcctattcctaagccattagaaagaccttgtactttgtatagaaacattagagtgaggttttgatttttaacatagtactctcaaactttgatgtgcatatgaacaagtggattctgattcagtagat

SEQ ID NO: 12208 - DNA, 1785 bp, Homo sapiens
atgaataagtcagtctagcagatatgccctgtcattatactgcggacctctggtcacttaattttctgttatattatgtggttgaaaattcctgtttcatcgtaaagtgaaatttgaaagatggagttgaataatatgattctcgaaaagtgagtttttcttggaattctgttaaggtgttagattttcctcacatatttaaataatctgtaagaactaccctgaaagcactaaggaaaatgtagccgaaagttaagtaataggttttaaaaatttatcaaaatttattgatagtttgatctgtaaaacaaattgggtttcgtgctttctgatgtccagttaataagtatattatgtgccaggctttacatattgctctttgcaagtagccgttaaagtgtaagtcattgaagtttgaagatctataaatatttaatatagtagtctaaacagttgtgagaatttactcagttctgaaatagaatgttaaattttccgatgtggtcctaatcatttttttctttacatactaagccttcctttctccaaagaacagttaaaaccaaatgtgttatggtaagctgtaaataccgttggaataaaagataaccgttcatcttacctaaaaaattgaagacaatattttccattgttgatgtcacaagtaagaaaaaaactctaacttttgtactctacttgtagcagagggaatatttttggccacagtgtgccaatttataattgtagataaagctgaatttactgggcagcaagcttatatgctgatagaagttgatgcactgagaagtgatgagttgaagagaatggaaaaggcagattgagctggaattttaatgcatagtacatttagtagagagacaagctgtcctatatactcctgtatacttcagaaatagctgatagcctatagtctctgagagctattctgtacatagcacagtattataattgatgttcataaataccctgagagattatgttaaaatacattattaatactcccacaaaagcagtaagttaataagtatttccaacaaaaggcagctttgtttcttaaacggataaacaacatataactaggaagatcatcttcaaaataaagtgtcatggaactgaaaatagagtatagtctaacaattattttgatacactattgaatagctaacaagtgtctaaagaattttttatttttatagaataggaagtttctaaaagaaaacaattaagagcaaaattggttttgagtatagaaactgaaggatggcagtcttaactcctaagttttttacagagcacagattggtaaactagcatgccacctgttttttgtactatctgtgagctgagactggtttttacattttttaatggtgaaaaaagtcaaaagaaggacattttgtgacacatgaaaacatattaaattaaaatttcagtatccagaaataaagttttattggaacagctgtgcttattgtctttagctgctttcctggtacagtggctgagtttagtagtatagcagagtctgtatggcttccaacagtcaaaatactgcctggccttttaaagagtttgtcaatcccttttatggaggaaggttttgctcatgcatggcatgttagtcaatttagttatttgcttctagctggcagaatgtggtcttgattacttaatttctgttacccctgtgttttccagaatggcttctcctgattttacttacgtgttttactattgctcaaattacagatactaggaaacact

SEQ ID NO: 12209 - DNA, 1198 bp, Homo sapiens
acctgactgatagcacttacaaaaagactgatagatgccaaatcagtcatttattaaccctctaatattgttgtcccgatcatttggtaaacgctaagagagcttagttttacattcacaaagtatttgtatttgataagtcttaaaaatgatttaagttgaagcctaacagaagtacttgttcattcctcagttacctgcaaataatggaaataatggtgcagtcagttttatttgattgtgtaatgctttatactaggggtctcaaacccctgggtggcattagattcttacaggagcgtgaaccctattgtgaactgcacatgcaagagatctaggttgtgcgctcattatgagaatctaatacccgatgatctgaggtggaacagtctcatcctgaaaccatctaccccaacacctgtgtctgtggaaattgtctccacgaaaccggtccctgttgaaaaaaggttaggggaccactgctttatacagtgtttgaagtaggcacacttacagttactatttctggttctttatgactgttgagggggggcagaattctatgtttgattcacagtaaaacttttcatgaatcattgagggttaactgttatcacttgccaatggaaactggatattgaaacatttttttaagaaatgcacttttacctgaaataaaactataaaaactaaactctggtacttgtttttgttggctacattttggttttttgttttgttgttttcgtgagatctgaaatgagtatgaatagtttaattcaaataccacaaagtgtatgttatattcctccacaaacatgaacccttccttttctttttccccttttatggcctgctttttaaccacagaggttttctgatttatgcatagttttatgggttccactggtttctaaatccagaggtggtggtttttctgttgttgttgttgttaatgagttcagtttctcattgaacttgttagaagagaggtttcgtcaaataagggctgagtagatgcaggcaagcttggagaggcagtccacatggtgtgggcgagggcagaggtggcactgccaggctagtcaccagatgaagtaaatgcctcaccccaacatgaccttaacttcctctgcagaaccaagcatgttgatggcagccgaagaaaagctccatagttttaaggaaaacaacaaca

SEQ ID NO: 12210 - DNA, 2281 bp, Homo sapiens
gggttatagtggggaagtggataggggattcattttcttatgtgacattttgccttaagaatataaaagtgctttagcactgatggctggcatttttaatataggcagtgaaagtgactttagaagcatgggatgaaatagagggaagaagagtttttattttctggcctttaaaaagtgcctagtaggtcatttgagacccagagaaatgcacagagcttgagcaaaggcatgaagtccctgacattgttttcctttttgtctcagcatatagtattaagatgcctagaaataggactctattgttccctcttgtataggcactttacatttcttgtcactacagcaaccacatacagtacagacaacctccaaacctgtttatattagtgtaaatagaaaatctatagacaactttctagttttctctggaggcatttttgggaatgtacgtgtaataggctctgctttgtatacaggagataataccacatcatcggttatctccaaactccagtcttctctcaactgcccagttgtatgttgtcatcaatcactttttcaaggctgggtagagacaagtttctcctcgtaactttgacctctcccactctccaaatgtaatctggacctcattgctttcaaggtcagcttccccatagctcaggtatcctttgctctcctgtatcttcatttactattagtgaagagatctctgtcctggaggttattctaaactttctttgtaactattgttatagacaatggtttccaaaccagtggtttctatgtagcttttctagttccttgctatcttctcaccactggcttgaggtagtgatttggactttgctcattagagagcattatcagagatgtggagtccatcagaagaccagcttgcagtgtgtatagcatatagatgccaatattagaattctttaaattatatttaacattttcatgcttcttaatttaacttcacatgttgggaagtagattcagaaagataggagaaatacccagactctaccacttccgtgagctactagttaggcatgggcaggattaagttttatgtgtattatcttcccactaccaagaatggttatgtttcacagaataccagttcagtttgatttggaaaaagatgccaaaccaaatttatatgtagtctataatctaagggcattcttgaaactattgcccacatcccattttttttttcatgtttacttacaaaacagagataaacattagatgtctaaaggagttagtaatgaaaagcctatccttaaaaaataaacctgttgaaatgggctttaaagacatcgaaataatcacttgtcatgcattgactgtaaatgcagatagagaaatatgtctttgaagctccacttacacaaaaataaaacttgtatatcatgctccctcaaagaatgtgcgatagattattttaagaccatgataatagagtaaaaaggaaagaaagccagaaattacaattttggatgctaaaaagtaactttctagttaaccctaaagtcctgtcagattgtgaagaaatgttccaggatacacttggattagttatgcagtatttcttatcaatgtctagcccttgtgtattgttctgaaaactaaagtttaaatctttatgctgttgcttgctagatatcctgttctttggtagaaaattcccatagtctgtactcaagaagtgcctaaaaatggatttgtgttgattttaagcccatctaataaattatatgtattttctatggtatcgtatggcttgtcttaactgatgacacagcctagaggatttctgtcacaatttgtgctttatttgaatacaaagtcttttttttttttttttttttttttttagacagagtctcactttgtcgtccaggctggagtgcagtggcgcgatctcggctcactgcaacctctgcctcctgggttcacgccggttgtcctgcctcagcctcacaagtagctgggactgcaggcgcctgccactacgcccggctaatgttttgtatttttagtagagatggggtttcaccgtgttagccaggatggtctcaatctcctgacctcgtaatctgcccgcctcaacctcctaaagtggtgggattacaggtgtgagccaccgcgcctggcctaaataaaaagtcttgaaatggaagatattcacctaaccctcaacaaaccatgatgtaatgaagcacgaatcacaccattttgtctctttcctaattcaaataggtccctg

SEQ ID NO: 12211 - DNA, 2245 bp, Homo sapiens
tcctctcaggacattgtgtagcctatggtaagtacaaagggagaggaagacattttgaattttaagagctttattatcagtttaaccctccctagttgaatgttattttcttcttgttccattaagtcagaatacaaatcagcacagatattcgaatgtttccaatattttaaaatgtaatgttacttatgaaaagtattttgcttaaggttgtgtgtgtattgtgtatatacctcaagttcaagttaatggcattgatttatgttccagacaaaaataacacaaataataatatccttcgttataaccacaatgagataagtattggcattagtgttcagtgccattttatactttctctctgtgttctctgtattgtactaaccaacctcccaaatcgctgagctgcttgtttaaaaaaaaaaaaaaggaaaaggaaaaagcatgacattgtgtatcgattttttgttgttgaccaaaatcacacacatggaaacatgtaattcaacagagtgggaaagctagcagattcttggcttagtattactaataggcaggattgtacaatgagcaactatcagattattcctttcagtggttcttatggcatctaaattactgaataaattattaatccattaatcagtgaatcaaattatgattacaattatcaaatgaatgctcagcattaattgaaaactgttttgtgaaacatgtctacccagaaaagtagcattctataaatactattaaacaacttagctatattatttttaagtattaaattatatgtcaagcagttaaagtgaatttcagagtaaaagtaaggcatgtttctgagcaacattgataatttcttaatttgcaaatttcttcttattttggtacttggaatatagtgtgagattttttatttctaaattttgttgtatcttctattacataaatgcattgacaattataaaatgcaagtgttttttgaatgattttaagaatttggcttaaaaattgattgatacaacgtattatttgtactaagaagtaacttgacccaaaacaccttttatgtttgcttagggtatattttttcagtgtctgaaagtcaaaggtattcctgtcacaactgtaaacaaacttatcctaaatgtgttaaaacatattcttgggtactctatttatgtatctttcatgccttgaaaatctgaaggttaatccaaactcacatgttttagcatatttgagaaaaaaaaactaccttcaatatcagccttttaaatttcatgaagattttggtgaggaataatagtatatagtttaagtattgacaaaactttgaaagtttctttctttaaaatgggaaatactcaatatctaaatccaggtcaggcatgggatatcagtatttaacattggatgttttatgttttatatttataatgttcaaaatgcaagcataacatttaatatttgtccacatggttttacaaaagtaaatcttaaattactaagcttttcccatatgttctcgtactttctcaaatccctataaagaattacttgttatctattaaaaatctcctttacccaaatctgtattatggtttcgccagacaaatattatgtgatgtagcccagaaaatccacaccttttgtcctttttatgttttaatttgaataatcatgtgcttagtcccttggattactgccacatcagtttaacacgatatcagcacattcccttgtcatcatcaaggtgttggctcagatttattcttaattggatgtttaaagcatgtactaccttgttacagttggtttagtgtagtggattattgacatgacatcatgagaagatgtgtaattttataccacatttataaaacatgattttgttttctacccttcaaggtaaacattaaaaataaggtggtacttgtgtacttgtacataaaaccaaaattatagttgggaaaaaaataaatttatatatgaaaatgtcaaaatcattttaaaagtattattttcaaataaaatggagaagctggtgaaaagtcatattggcaatttttatgtagtttaagtggaattaagcagagggagatgcttttgggtttttaatatgccacttctgagtgaaaacatctcgtggagtcattgtgttcagctctgagaagaacaaagattcatagttctgtacatgtggctggatttaaatatcctgtttttgatactaattttgaaagtc

SEQ ID NO: 12212 - DNA, 1194 bp, Homo sapiens
cataaaaggttttttttttttttttttttcagtccagtttgtttgaagtcaatcttttcatcagaggcagcttaaagatgctttcagttagttttgtcttactttcagatttctctacataaatctagatactcattaagtagccttatgacaaacagtatgagatacttatgacaaactcgctctgtcacccaggctggagtgcagtagcatgatcgacagagtgagtttgtcaaaagtatctcatacttataaacagtatgagataggaggattaaaatattattttaaagaaaccactgtttccccctaaaatgtcataagagcactgaagaacttgaaatatttttttcagagtttctcacacactttaaaagtctaacttttttgtgtgtaagcatttagcttgccagcatatttctttttggctccttaaattgcggttgtgtttgcagtattgtcacttttgctctcactgttatgttgaataataattagcatataattgtctacagaagcaagagcaatctggaaggaacaaaaatgttttctgtgattaacagtgaagaccttgtaaatgcagatgtgtgataaagcatttagtcagtcccccaaacagtcatgccaactgtgaaggaatgtcccacaaaacatttccattccctgaggaaaaacattttctttcctacatgtatctctggtatttagaattgtcactaataaccttttcaagtgattttggctattctctaatgaagatatggtccatttgtttttcttcctgcaatgtggtgtgcagagatgctgcatatcctttttatgggattgcgtgtgaatttgaaccatgagacattcctaataatttgttgtgagatataccaagcatggatgataagtgtgtttttagtggtgtgttgtttttttaaagaggtgattcaagtaccgttgctaagctgtcaacataccaagctgttgaaaaaattgaccatttctttcagaagtaattctcagcctgtggaataatagcaggtgaagacttcatagaaggcgacagattgatagggaggctattgaagcagtttttctgaagcctgcattttgagttagtttatagtgctaatagattctatataactgtgagagtttggtagtaaaccagtagggattgttttctctcctaaaaatttgcacact

SEQ ID NO: 12213 - DNA, 1171 bp, Homo sapiens
aaaagtacacttgccaacacactaggagaaaatgctcagtgaaaattgatgggtaggaataaattagtataagcctaacatattgacttgttaaagcaaaatgaagacagctgtaagatcttttcccccttccatcataccaatgttagtgacttatatattagcaagccttataaaataaaatacaaataatatatcactatttaatttttgctgctcattgttccattattcttttgccagacccattatttgtcattctgtattcttaaagctaacactgagcccatagaaattccattatatttcctttccagttttctttgtttacaaagactttccatactaaggtgcagatgtcttgtaggaacagcaagttatacatgttcgtttatacatgtgaatgtgaatttttcagtcttcaatggcatttctcttttgttttagttttgactttgaaagtgtggagagtactgtggagagctcggtggacaaatcaaagccctggagtaggtccatcgaggacctgcacagagggagcaacctgccctcacctgtgggcaacagtgtctcccgctctggaagacattctgcactgcggtgagttcgtttaatcaggaggcaactttggcaggatgcactgggacagcaggctcctacttcttttgatgattctgggcactgtatctcataaattgccatacagcactttcatttgcaatgactctaaatgaatgtttctttaggagttcatgggatcttcccttgggcaatgtttgataactttaaatagcttctggaaacaccataccttgattcagcatagaaggtgggaaaattctgctgccaagtgatagaacaggatagtctcataggcagataaggttttgaaaccaggggaatgttgacatcctgatggaggtactgtttccagggtagaggcagcacttagagatctgggatctctgccctttgttaccctttgtccttccgctctctttcatttctccagtggtagctcaggttgtgtgctgtgggtgttttcttagccataggtacagaatgctgtagtgataatttttattagtgagatgccattaaccagtgttcctttgattagatatgcttcacttgtcaacctttttttttttttttgagatggaatctcgct

SEQ ID NO: 12214 - DNA, 1252 bp, Homo sapiens
ttggattcttttttcaaaggctcagcccgtaaacctctgagtactgatgtcaactataattgtaatcaatgtcttttcagggtaattgggatacttctggcagcgaactgagtgaaggggaattggaaaagcgcagaagaacccttttggagcaactggatgatgatcaataaattataccaaatatatgtttacagtatgatttaaagtctgattcagaccagggactctattttaagttcaactgaaataacactgggttttaattatatcacaggaaaaaaaaagtgcatttaagtattgttatcgtggactttataaaagcaaaggaaattgaaagtaacttttgattctgtatcaagaatcatattttcatacagtcataactgtctttctgtgaccctttcacagggcactgtaggatggattaaaggtggcaatttactgataactgcagatgtctctactttgttctaaaatctaagtcatgaggtgatttgatttactttatagaagctggattttgaagatctaatgaaaaattttttgataatatagtagtacaaaaaaagcaccagcaactgataaaaattgcttttttgtgcgctacccaactggttaaagccaatgtgatcttttatggtgaaactcctaagaaacaggtggttttgctggaaacttggtagacccttaattatagtggtgctaatgagcactactgtaatataaagccaccattattttttatcaaacatctgaatacattttacaaaggctattgtgagggcattattttgagcatctattttgaggtgatgtttaaaaaaactttaacatcaaatcaaattgtaaattaatttaaatatattgccttaaggacctactaaagaatgtgccaccagactttaagtgatagttgcaatatccttgtctaaaaaaaaaaaaaaagttgacttaaacattttctttaacagttgtcttttttttctaaattcagtctttctcttgcttttttttccctgctattgaggaagtattttgccttccctactcactgagaagtattgacttcgtggtacacattctaaagcatttctgatttgaatatttttgtacatttttatcaattattaaaccttctcttctagtgtgtactagtatttatttctacttaaactgctcagctctaaagaaattgtatgatcactttaaaggtactaaatccctgaaattttgcttcatcttacccaca

SEQ ID NO: 12215 - DNA, 1473 bp, Homo sapiens
cgaagttgtcaagtacagtaacattaaaaaaaagggtagacaaatataggtcatggtttgtctttgttcaatccctgagattcctttttaagattttaaatggaattaaagatccaatatttgaagttgctaaaaaaaaaaaaaaaagtgccttgagcacattaaaggacaaaaaatgatgcattaagatttgcttttagaggcagggtgatttactagatggatgtagtttttgtggcagtgttgaaatacctgcctcttcccctcttttggaaacgtttaaaaattagactcttcttatctgagctgtagtacttgttaaggtttttgatggagcacttaattacctctgtctgctgcaattctaacgattatgatgccatgaagaagagagtaagttggcctgcgttctgaatctgttgcatattttctctttaagctgatgagtgctattcaaaaaggaagggtatctggaagccggcttgctatactaatgaaaactgcagaagagaacctcgacagaagagttccaattccagtggaccgtagttgtggaggattgtgagtctgggcagtaaatccacagccaacaaacatagaaacgacaaatcaccatgtaacaaccagagatgactgaaaccactctgaaataatgaatgtggatagctgccttttttaacactagaaaacattccaaaactttaaggtgttggtgtatttgccagctttatttgctgtactttatttgtatttgccattcagtctagcttttaagtatatttttttctttttctcattttcaatgcacattagttttgcatctgttttgtgacctgttagatgtgacacattctctttttgtttattcccttattctaaatgagttctaaaaacataatattttggcaaaaattgaaaaaagctggagacattttgtgacatgcatacagatagcatgtgttattaaaaagagttgcctattgaaatgatcatgtttctggagaaattaagcttatagacagcatgtgttattaaaaagagttacctattgaaatgatagtgtttctggagatttctcagccccatcttcctccagcttgtctaccttcctcatgcaaacaatattccacatttttatatctagagcatgactggctaactggagagggaaggaaaagtttagatctggttactggagcaagtctcaaagagaaactctgaaagcttccagaatcacaggtataagataaggatagcattgacatttgctgggagttacagtgatagtttcatctcagcagttcatttttttcttcagtcactgctggttttctttgactattatagttgccaggaagatccttgctcttcttactttaaaaccagcatttaagtggcaatttggatgtaataggatgagaccaaatttatctaattattacagtagtaatacatttaagagttaaaaatgtg

SEQ ID NO: 12216 - DNA, 1696 bp, Homo sapiens
gatatacacaatatggtacatttgtgctctctctctctgtttttctctctttctctttctagttagatcaagataacgatgacttgtaccctccctgattctgttacagtagggcccgggcagatctgtgtttgttaaacaggccttgtttgtgcatgctttgctatgaatgaagttcctttaaggacaaagaaaagcacacttttcttcttttgagcatatctgcttttactttaaatctgctaatttctaaaatgtagagtccttcaccaatcccagagactcaatttggaaatgaactgatttcaagccgttactgtgaataaagcaccccagcattttgtataagctcttaattaaacctgtacagcttctttacctgatttaagaaagggagacaagcaataggggggaataagcttcttcaaaattcattccaagcacaaaagaaattttttccctttgcatataaacttgacatcagttgattctgttggggtcggggtgggtatgcagggattgccttttattatcaagtgatttatttcaagagcctttgaggggattcaggtgaaggaacccccatctgtgctggagagttggatactcctttaaatagcccccaccacagtcataacaataatgataatgctggattatttgttaagccaaggttgtctgcctcatatccatcatgctgtttgcaatattcttgctttcaatcaatttatactgagtgtaactttaggatttctgctattaaatgcatgctctctatcctgcttcagtttctggctttgctttgtctgtttcaaaatatgtagcttcctcttttgtacaacaaaaaactcattctcacttttactaaatatactgtaggagtcatcattgatgttatttttctcttatgtatctgtaaagatttttggcatatgaatgtaatattaaagtcaatgatgctataacttgcgatgtttgcatcatgtcaacctttttgaaggagtgaaaaagccctactatgtttttaaatagcaagtgtaagctcagtgctagagtggatatacacaccgcatgttttcatatgtggcacttttatgtatcatgttgggttattgttctagactggactgttaaatactatgtttgaggctgggttgtcatttttataactgtcttggtgttttatggccattatttattacttttgatacacagaatgagctgcatgcatttatagagcaataagaggatgtatttaatgtgccttgtttttaactgaataagaactggaagcatgaatcaataaaactgattaaaatggtctatttgctagcattttgatgttacttgcagtcagataactttgattactgttgaagtttaaaaaaagtttgaaaatatttttacaaactgtgtttttgatgacacaaaagtgaaatatctacagagatagatgtaattttataagactgccagaattatttgtattaatttgttgctgtagcctttagggcatgacttctgtatttgtgcaatcctattctacaattacattcatcctattacaactcagttgaattcttttttccttttatttccttatttatttatttatttttttaaatctaccagagcctttcagcctaagcgttcccaggcacactgatgaattttatcataactaaaatcaatagaa

SEQ ID NO: 12217 - DNA, 1136 bp, Homo sapiens
tacacgcaaaaatcttgagctttaataatgtcttctactttcatttaaaatcattttgtggtggtttatcaatactaattgttttttgtcaataaattttatgtttagatatcaccttcttaaagtgagatttcatgaacatattaggctttaaaagatgatattgctctagcctatagccactgatattcttacattcttttggcgattttactttttttagactaatctctttagtaaggagactatgttactacccctcaaattggagggaccatattgtgtgaaaaagctgataggattttggaaattacaaatattttgttgggagaaacaggttaatgtgtgtgcaagctgcatatgtctaagtattgttctgaattttaagttgggtgatatgctttgctactggtttttatcttactataattgaagattacaaagatgtaacctaagaaatgttaatatggtgccttgattggaaaaaaaaaaacctctccacatttgtagtaaaatgtgaactcagttgacagtcctacacagggtaggactgtggaacaaaacaggtgaacgtgtgtatgttccccctaaatattttcagaattgagaagggatcagcaggggccaggaagtgctgtgccatggctggccatcatggaaataggctgttttttacttcttccggctttttaatgtgtgtttttgtttatagaacagaaaaagtaaaccacaaattgttatatgagacacatgtttaatgaaaagataccaatgattttgcttcttttaaatttcaataacatcaaatgaatgaaagttgtgtctaatggaaagaaaaaatgggtcttttctcttgccttaggctagcatagaaagaagaaaataaaagattattactccaataatctttttgtgtgggtgtttttctcagatgactattttgatattgtagatttcgtgtttgtcataattaaaatgttactgaaatccaccatgaataatgtcccctgaaataagttgccactcaacattaatttttttgtttatttttgtatttagttgaaaggtttcttttgaacttgctcctgcgctactaagcattgctagacaaggttaaagaatcacttcattccact

SEQ ID NO: 12218 - DNA, 1102 bp, Homo sapiens
gaaatatttttccaagtactaaattctaaaaatggtttgtcacacagacattaaatgtaaaatacaatgcaatgaatagcagttttgtaaaaatcacagatgcattatattcaagacccctgcttggattgtgcccctctccctttgcagagtaactaatttgctttgcaaaatccacagtcaccttgcctaatagatacagagggtgtataatattcaccctctaaaatccaagagggtgaatattaagaatttgtaatatgttgtcggaggctcataccttcactcaaaactcattagaggtctattcccaccctggttgcaaatataggccatagattaggtttggaacagactgacttcatattaattagagctaatacgtttattttatttctaaagccacaggatctctatttgtttgattttttaaatctccttttttaggagttctttggaatttatcctcatgtgatgctgtaaaaatgacaatcattcgagatgctctctcaaccttaacaaacactgtgattgttccacattctggatggaataactcttcttttgatgatgatcataaaattaaatttcagacttcactagttctgcgtaacacgacaggttgcctaaggtaaattctttatttcttctttccagttaattctgtgattaaatatgtgtcataggtaaattgattttaggaggacttactttattaacatctatctaagtttccagtttttatttcaaaatttaggccactggactttgttattctgggagaaaaacatcgtgagcacagacttgtggccttaaagaagttatcttgtaaatgactcttctgtgacttactcagaaaggccctttcagtctaagattactgccaaaattccagtgttttccactttaacagcatttttctggtaatcgcattctgattgctaatgtgtttgcagcctgctgtttgtttaaattcaaaatgtgatggttaaaaccattttgcttttaaagaggtgtgtgatttaaacaatcagtttcaagttgtataaataagtgaaaatgagcccaaatacttttttagtcattatcttttacagttaaa

SEQ ID NO: 12219 - DNA, 1135 bp, Homo sapiens
aggcaaatgtcagcagggaaagacaccgctgaacatggctcaaaaggagggtggagttgggagattgagaaggaggcagacatgggacttggggatatagttgtccccagggagggagttggggcatctgttgtcacgccaaggatctgcagtagtgagaagtgaggctcaagcatcatgggtgcagtctgcacggcagcagccctgaagagaaacactgggccggagcctcaagcatttcggtcggcatgaagtcaaatcctcagcaggactgagaagggctctgcatcctgtcatctgggtattccacaaacactctagaatcataattctctcttcagattgtttcaagttctcataaataaaaagtagttctttcatatttcccatttatttcctgtctgtagtgttcagtacagaagtgttttgctctaatgtgccgagttgtttttaattatacgccatgctgggtttcagacggtggagaactgcgtgtgcaccctgaggaacctgtcctatcggctggagctggaggtgccccaggcccggttactgggactgaacgaattggatgacttactaggaaaagagtctcccagcaaagactctgagccaagttgctgggggaagaagaagaaaaagaaaaagaggactccgcaagaagatcaagttagcattttattttatatgagactctcaagtttaatttttctgggagtgaggaatcacatatttggcaagaaaataaattttctgcatagctatagctgagtcccgcaaaggtgaatgttttcaagtattggagatcatgttcattctgcctccatttaacgtgtgctgtttgtctttcagtgggatggagttggtcctatcccaggactgtcgaagtcccccaaaggggttgagatgctgtggcacccatcggtggtaaaaccatatctgactcttctagcagaaagttccaacccagccaccttggaaggctctgcagggtctctccagaacctctctgctggcaactggaaggtaggatgacttccacttatctacacttctttccatctttgcaaactaacttgaaatgttatatatatatgttctgcctcagtcagatcagccctgatggtgaaagggt

SEQ ID NO: 12220 - DNA, 1112 bp, Homo sapiens
tgtcttcttctgcttaccactgtaaataaacaggcctttataaaaagcgattgcacatccactcaattattagcataggggagaactaagaagatgtttacttgcactttagttcatttcttttgtttgtagtgcacttacagtttgtcagttggtaatcgaagttgaaaaagctagaggtaatctctttttggagaggaataagaaaaattcagtatctataaagaaatacctcaataactgtgaaactccccttgccttgtcttagcaagaatttcattattattgcattattcctgggagataacatacctataattttaataccagaacttttacttgtgtcatcttttaaagaaactaacatgttgccaccgttgtcagatgagttgctgtacacctcagctctatacacaaaaatgtgtaactgtacccagttcatacattaagatccagaaagatctaacgaaaagtattgtttggcagcctgacttggtccagattcaaaggtaagttttaaaaagctctaagaggaaattgaggtatttgtgatgcataggaattccattgagaataaaatttactattataattccttcattactcaatgttactgaaaatactcgaacgaaagtaacttgatttgtctacccaattttacgcattgatttacatttgctttcagcaattgacagtaatgttttataaatgaatcatttctgcaagtgacgttgcaataaatgttagctttccccttataatgacatttgtccttttcttctttgccatgggttttgattttttcccctattattgtctctttgggggttttatttttaagagattgcatgccaccagaatctgaacaacaataacaaaaacctagtaccttctggaagtagaatttactcttttgccgttggcaggcaaatacgccatgcgagacctggtcaaccggctccccggcggcaatggccccagtgtcttgtctgatgagaccatggcagccatctgctgtgctctgcacgaggtcaccagcaaaaacatggagaacgcaaaagccctggccgactcaggaggcatagagaagctggtgaacataaccaaaggca

SEQ ID NO: 12221 - DNA, 1729 bp, Homo sapiens
ggtaacaggtgcctccacagctgagcacacagcagggcctccagtaaagaggggaggtttctggggccacctgccctgagatctcaggctttcttgaggcacctgcttctctagaggtcttaggacaggaaactcagcagcctgcctgagaatgcagcttaaaatccttagagtccaatagtaaacgcatagtgtgcaccagaaacagcttttaaccttaaactgcaaatattgaatattgctttaaaaatatgaagcaggaagcccacattaattttcctaacacatgtatttttaaaaaattgcttttatttatttgccttttcattttgtcaacagcatcaacagctgtattatagtcaagatgactccaacagaaagaactttgatgcatacagattgtatttgcagtctcctcatagctatgaagatccttattttgatgaccgagttcactttccagcttctactgattactcaacacagtatggactgaaatcgaccacaaattatgtagacttttattccactaaacgaccttcttatagagcagaacagtacccagggtccccagactcatgggtgtagcatcaagatgcccaacagaggaactctttctttctaaccttgttcagattgaggtgaaaagtccatcttgctgatttgatgattgaaatgtgaaagtgaagtggaaggaatgaatgaagtgtgttttttttttcttttttgaggaattatcagggaagtgaggaaatgtttgggagaggactttctaagctctatttaggtgttagatctaattacttatagattctgtagtctggtgaaggtgtgggtgacgtgatgagaggtttgagaaatgggtgaaatgaaatgggggatatgtaggtcaaatcaaattaaagatgatttttttaatgtgaataaagttatgttctgatagtttgtacagaaaaaataaaatggatgcccatgttttattgctattactaaatgtcaagattgtatgctattatgtcttgtaaatttcttttgttggtgtaaatatggaaatgccacattggttaagtgccatcatttgtaatgcaatgtgtcacttgaaaagagatttgaagaaactgacaacttcaaaaacaaatgagaagcccaaggaactgtgagcaattaaaagcaaaccgcgacaccctttgtctccaccacacatagtgtactttggaagcacaacgtccaggctggtaccgcagcgccatgcccattcctcgcctcattcataggacacttcactgccattttctattcacataaaagaaaaataaatgtggaaatttcatccttggaaatgtgttctctattctttttaaattttctgtatgtatatggaaaagcagatttaataaacacaaatctaactgcatgttggaaacagcttaaatatatccaactattttggacttttcctagttttatatatactttgtgagatggaccacaccaaagaattaagctatgaactttccttctctgacaatctaggtatttttatttcttggaatctatttcaaatctagtacccttcacagttttatcatgtttttctatatggcagcccggccataactaaattgatataactaaattgataccttttttaggcatcatttttaagaactcagtaacttcataagaacagtggttgggcatttatttggttggcaccaatataataaaa

SEQ ID NO: 12222 - DNA, 1115 bp, Homo sapiens
ccatgaagggaggggaccctgagggaacagtggctgcctctccccagctgggtgtgtctgccacacagagcaggtatgtaatctacctgcccagctctcagcacctgagctggcaggcatgagccgccacattccacctggctaggtggctttctgggtgattaagtgctcagaattcaagctcttctgaatgcctttcctttgctttcctcatgcttacatttgttttcttcttgctcagtttgaagcagagaggcaggtatgcatttagacaggggaataccttcgtagaaacacttctgcagaagtagcttgcagtaaaatattagacacctggttagtatcctgctagagtatcttgctagagtttgataatatttatttttctgcctagttgcttaggatgtttaaaaaaaaattatcatgggctgacttttatcttcctttgactctctcctacctcctgctaggcttataaaatgaaagtgattccagaggtagctttagaccttttatttcctggactttgtgccccaagggagataatcagatgcagaggcacacaaagatgaattaattgtactttattttcctttttgacttgttgtaaatcctgcccttttgattttatgctaatactgctttgttgccacctgtatcgccctgctcactactaaattgaaatgctttgaaattgatttggtaataactatttagactgtttcaagtctgggttaatattcattttgctacgttgcctgcaatttttaaaatcatccttaattatagaagccttttttttaaaatctcttgggtgaagagaagaatttttctttatgtatataatttggtaatatgcttaatgtgggaaagaaattcttggcaatgatttgagtcagcaaagagcctgctgtacttttattcagactgtagttggattcttcaggctgttctattggtgtagcaagcatttattggcgcctactgtgtaccaggagcaagcatgttcagtactgggacaataaagataaggcacagcatctattgtcaaaacttgtccacttgtgggactacaaaatggtcttctgttctgtggagagtctgagcaagttgtg

SEQ ID NO: 12223 - DNA, 1207 bp, Homo sapiens
tgcaccgtttctgcattaaccattctgttgtttgttcccactcccccacccccagcaaatgtttttaatttggaaagtatatttaaaggttcaaaggaatttaatgagaaatgaattcttttgtgagtaatctttgttaaaaagaggatacattatctccaggttacataattttactcttaactctgatactttttagacaatttttttcattatcttcctatcagagtttctccctcgctcctcttctctgtagagtgatttagcagcttatttcccctggtaagccacattcttctaatttaccaaaatacattgtatggaacatactttgataaaaatctgtgtggactggaaaactttccattgatcctggggagggcagtgtgcatgttttaattcttcagccccagctgtgcctggcctccttcaaagtattttggtctttcatttcagccacaattacaagttcatccgaaaatgatgaccggagtggctccagtttggaatggaataaagatggaaacctaagattaggggttcagaagggagtgcttcatgaccgcagggcagataactgctccccagtggcagaagaggagaccaccgggtcagcagagagcacgctgcccaaagcagaatcctcagctggagatggtccagtcccttattctcagggctccagctcactaataatgccacggcccaactcagttgcaggtaaggccacacctttccctggaaggattatctcagggataccaaggtgccctgtgttcactgtcttcacatgggaagacactccagatacaagccagcttcgtggccgtgggtcaggcacttaccttttctaagcctcagtttactaatctgtaaacacaataaggctgtacttaatggtctttaagtgatccttctgctctggaattctttaaatcgattatttggactgtcaggctctttgtatataagagaagaaagtataaaaactctcctctcggtttttgttttaagccttagaaaattcattactgtttattacctcctggtaaatgggaattgttgagtgagtttgttaatatcagctcgaggatcttcttaccaaacttacaaacttatttttgtctaattgaggccgattgtacaggcaagagggccgaatttctgtacaatttagttaaaatggagctcacggcttaaaatgtaa

SEQ ID NO: 12224 - DNA, 1101 bp, Homo sapiens
gtgggataaaacttctttaatagctagaaatcaccataaataagaatgctaaacagaattgaaaattatatcaacttaaaattttaagacagcccagaagacattaatgactctcacttatgaaattgtttggcttttgccactttcttccttgcctttgctatatggtagaatcacagaacttacttagagaataaatatgtctattgttcaagagtaacaggtttaactcatgaccaagtgatgtacatccaagtgatgtattctggaaacgatggaattttacagttacagttccattgagtcaaatcccattttatatatacataaaaattaagttctgagtgagttctagctaaatataagtgcgactgtaaacgcagccaatttttttaagcagaatatgagaacacctaagtattctcttcatagcagttcctataaagggattaaacacttatttctgtgttatggttcttattcatatatttttatagcacttttggaacctatatttgtgcttgaaggtgtttttgatatttggaaacagtataagccatttggagtcatgattggtggtcaagtggattcaagctaaaatactaagaccagcattcttagtggcgcttataaattagctctcacctggtttccaaactgcttttaacaatggtagtgctcctggaacaatccttccaagctcctctaaggacaatatttaattcagatactaaaggtaagactggttgttacttttgttttgttgtacaattagtactttatagtcacatgttgtatatattaaatagcccagttttattcagacttgtaaatagaactatttcaatgtagttaatctaaaaacaaaaaagaaaaccccagtcacgatttgcatgttctctgtaagcttcatccatgctggttattgcactgaatgatatattattagggcatgttaacagtataccagtaacagcactttatctcatttatatgaacacctttgaggtgctacttaagtccaagctctgatgtattattcatttgtaaagataaggtacaggaatgaaccttggtttaaaggtatttttatatgaaaat

SEQ ID NO: 12225 - DNA, 1380 bp, Homo sapiens
taattctgccacatttaatgttggagagagagatctatcctagagacattttactgtttaaaaaagtttcctagccatgaagcgctgctactgatttagacaaggtatatggtcattactttctacccctatccttccaagcacttctgatactgcagtggtttttactgatccaccagcacctaaagaggctgtactacagtctatagctaagtggaaggcacattcatccttctccctctgactgctttgatcatcatttattgcatcgcagaactgtaattttccaaagtttggattgggacttttcaggtcctttttggagggcaaaggaagtgtcagcttctctggggaacttgtttttaaatccaaagacttgaaccacattccctgcacttgaacacgtttgctttcatcccttctctcattgtctccttcccatcttagtaccattgtagttatagacatctgcatttttagaagagttttagccatttatttttttaaacagtcaagaactgctgacatactgtggatatagagtataaaacttgaaaaatgcagatgttgaaggaataacaggtatcttgtgctttaatactttatggcaggattgtactataagcaaatgaattaaacagctatgtaaatcataaacaaaaactgaaaatgaaccaaaatgaaaaggataacttccaggcagtatctttctattgtaacctgttatttaaggaaatactaacgatttcttctaaataggatgtaaaacttatttcagattactcttcctcagtcctgcctgccaagaactcaagtgtaactgtgataaaataacctgtcccaggtatattggcaggtatgtgtgtaatctcagaatacacaggtgacatagatataatataacaactggtaatggtggattcatttacattgcttacagttctatgaccaggccttaagggaaggtcagtttaaaaaaaaaacaagtaatgtcttcctgcctatctccacatacatgtaaaaaaaaaacgtgtttgtgcttcagttctgtttttgctcagtaatatagtcaaggaacagtttgtttccaagtacccattgagctgtgtatgcatttttgtttatttcaaataaaatatatttgtattatttgtcatccatactatccatccataccacactatcttctgtatgagatagtctaatagaaatatacctgttttgttctaaaattatatataaaggttaactggctcaaagcatttttagaatgcaagagtgaaatgagaattacttggagagaaatgttttgtcaccagtaactgtagacttctttctgttcttaatcaaagttcaagtttacagaatttggacattttg

SEQ ID NO: 12226 - DNA, 1265 bp, Homo sapiens
gatttgcttttaatcattttaagagtcatttacattgtattatttggcctgttcaaaatcgtctcaatttaaatactagatattattgtatcataccaaataatttctgatcaataaattcagctgttttaattttatcaaataaaattttcataagctcataatacatttcttttttatatatttgtaatgttgactttacacagcagtactggattttaccagtaggaatagaaagagaaatacatttatgttttttctataataatagtaaactctgtagttacaatataacagtattaagtttgaatccagtgcttcgttttggcattcaacataataaatgcaaataataatgctcaaattatttcatgtaattggttatcttcctttcaaaaatagatgttcaagacagagttccttcatattcacaaggagcaagaccaaaagaaaactcaatgagcactttacagttgaatacatcatccacaaaccaccaattgccttctgaacatcagaccatactaagttctagggactccagaaattctttaagatcaaatttttcttcaagagaatcagaatcttcccgaagcaatacgcagcctggattttcttacagttcaagtagagatgaagccccaatcataagcaattcagaaagggttgtttcatctcaaagaccatttcaagaatcttctgacaatgaaggtaggcggacaacgaggagattgctgtcacgcatagcttctagcatgtcatctacttttttttcacgaagatctagtcaggattccttgaatacaagatcattgaattctgaaaattcttacgtttctccaagaatcttgacagcttcacagtcccgtagtaatgtaccatcagcttctgaagttcccgataatagggcatctgaagcttctcagggatttcgatttcttaggcgaagatggggtttgtcatctcttagccacaatcatagctctgagtcagattcagaaaattttaaccaagaatctgaaggtagaaatacaggaccatggttatcttcctcacttagaaatagatgcacacctttgttctctagaaggaggcgagagggaagagatgaatcttcaaggatacctacctctgatacatcatctagatctcatatttttagaagagaatcaaatgaagtggttcaccttgaagcacagaatgatcctcttggagctgctgccaacagaccacaagcatctgcagcatcaagcagtgccacaaca

SEQ ID NO: 12227 - DNA, 1119 bp, Homo sapiens
tgggacaaaatatacttttgaaataaaatgctatatggcacctaattattttttcttttaaaatgccttaagttgcagtctcattttgataatcatttgcttccagtgtttaaaaattaaaaaaagaatggggagaaggttatgagaagagcattattaagtttccaaatttaatttgaattccaaattcacctagcaataaaatctaatttttaaaaagtatataaatataaaatgtataaatgatggatagatttttgtattgatttgcaaaatgcagattatatttgataggctatagtatgtagatattccttttaggaatattacagctgtaaattatatgagacttgccagtcaaatgctatttggtttaaaaaaattattgcaatctcaagttaatggaatatttttaaatcccacattcagagtttaaaacactggttttcaatgtgttttttagtgttgtcacttgtttatagataaatatataaataacctgtttggatcctggtcctttttaactgttccttggtaattctgagcatttatttgatgacttaatatttttcactacctttggagaacagatgaacattattcaccatgaatggatctatactgtgtggtcatgagttgtgtatacttccataacactgtatttttcttctgtcagtacccttaggatacactttaaaacaccttaaggtctgatgttatggcaacaaactactttttcaaacctaaataggaaccatgtaatttctcaaaagtgattgaacagtttgcccacacttagtttgttggtcttatgtaaaacattggctcaaaataaagtacacactgatttattttactgtttgaaatgtttccttttaaactggtgctcaaagaagacatcagacttcataaccaagaattttattacaatttcaaatctcattttaagcaataatataaatgttctaaaacatttgctcacctcttgccagttacctttgcattgtctgtcttaaagcaaaaatataaaatttaagggtggtagttttaatatattctgtgggtcctaagggatgctttgaatttgaagtatatatacttttaataaaattcagtatg

SEQ ID NO: 12228 - DNA, 1213 bp, Homo sapiens
gaatgagaattatgcctgaaatctggcaaaccgaaaaatgttgctattgcaacaaagtggcaaaagctaaaagtaaggatttatcttcaaacataagctgagataacgaatagaagcaaaacgattggctactagctctctctctctctctctattaggtaaatttgaaaaataaaaatgacttggcacttttaaaggtaacttcaccaaagaccgaagagccagtaaccagtagctccaacttgtctcagcatcacatcttctgtgctctttatttttgccggaccagtttgcggttaggagaatgtgccttttttgtacctttgcatttaggttttataattttaattgatgtatggacacacacaaacaaaaaagcatgaaggaagatttggatccaagcagtgccacactttacatcatcactacaagtgttcaagtgtaaagaaaaccaattttgaaactatgaaattcctgattcataaatacacagttatttctactttagtacatataagataattcactgttattaaagctcttttattaaggcaattgcatatgttttaaaagcaatggtaaattaagttgtcttccaaaactgtgtacttgtctggtcagctgtgtatgatcagttatctacctcagagtctattttcttttgtgctgggacaggttgctggccctccctgtttccacagaccaaatcctcctagctcaggagctagggctaagcagttatttctttcaagtattttttagttcttaaattttatgcttgtatttgatgatagatgtcagtgacatttcatagtttcaaaagtccttgctgctctgagaagtgtagattctagtgaaaattacatagtcataagagaaatgtgtttttgtttttgtttttgtttcatttttttaaagttgtggtattattggttctatgctccctggaatattactgctttgtgaaagtccagactgaacgcagcaccctctgtgtacctagtacagttataaacctgggtctctcactacttgatatttttgcattagttaagacagaaatttgatagctcggttagaggggaggggaaatctgctgctagaaatgtctgaactaagtgccatactcgtctgggtaagatttgggaaacataacctctgtacataaaaaaaaaaaaatcagttaaacatcacatagtagacagccattaaa

SEQ ID NO: 12229 - DNA, 1178 bp, Homo sapiens
gttagcaaaaggctcagcagctgagcagaacagtgcaaattggtttttgactgagttcctagttctactgctggtttaattgatatttaatcctttcacaacagtggatcctggtgtccattgttaaaaatgtactctgtgcctggaaaatccaactcccagagctaaggagttaaagagtagatatttacttgaatgctgaaagggtaaaaactggctctgagaaactgtggtaacaaggtgaaaaactgaaagccttatctaccactgctaatgtgcatctcttaatgatagcactcctttgtcacacatattcatttccatgttttctggataatatggtgtacaatttcagggtttctaatggtgctttttcacacctgtgtgtttttcatctcttcttaatttataccccgttagtgtgttgtttcttttcatatcataaatgtattacttgttctgttctgagcatctgaatgccctctttgtttcaggccggagatggttgttggttggtatcacagtcaccctggctttggttgttggctttctggtgtggatatcaacactcagcagagctttgaagccttgtcggagagagctgtggcagtggttgtggatcccattcagagtgtaaaaggaaaggtagagtagattctatctttattgccatctactgccacattctgtttacagatacattaaataaaaatcaattttgttcaaagcaggattcttaattacacagaaagctgctgtctgtttacttaaaaaacaaaaaaactgtacaagttgataactgtgtcttggtattattagcaatttatttagagatttcttctttaatcacttattgtgtaattttcctgaatatttatctttaaattttttgaatttcataaaattaggaaagttaaaccatactcaaagcctgctataaacattttattaatatttaaataaacattgctttacctttattttcaaatgatgaatttggaattggcacaacattttaaaaatctatttaaagggcattgttttgcagacattatgcaggacatattctggaggtgtgttttccaaatattttagacaatgaaaacttgcccaaagacttggtatcaaccattcacgtttttggagtgaggacgcaaatgaatgattaaatatgctaa

SEQ ID NO: 12230 - DNA, 1121 bp, Homo sapiens
ctttgagtggtatgagttcaagcaaggatgactgtgagctctcctatggagcccagtgtagagcctttctggttccatcagttttataagatattcttgacttggaggaagattaaagccagaagtttaatttgttttattgcaaatgaaaatatggagatctgttcttattcatttaaggagcaaattatttgaaaaaaaaatgttcttctacatttattatttagatttctgaattaattttttctacagttatagtttctagagctttgcctcaaactaatcaaggttaatgacaacttggtcagatatgatgccgcacattgttagcttttatcacagaggatggcattgacaatgattccgagaagaatgctggagggattgatcaagatggaacttgagacctgcaattacaataaaaattttcctttgtacttgcagctccttcctcaagtatacttgctatttgttcttttgccatgttgacctgaaacattggctcaaaaagatccatactaccaaggtctgggtatccaggatgtcttcctagatgttattttctcgctgattctttagagcatttcttctacctcgtctacttcagcctgctcactattcaaccaagtttaggtgtcttgttagcatctattttctacatacattcatcttgatggaattgggttgtgataagtggtacttctatccgtgtggactggctaccttccagtaccatactgttgatgattcattcatgccattcagtgtgaagaatgtgacaactttccatcaaacacattgcagattcaatagcaccaaggataacagatcccaactgcagagcatcattttggcatgtatatggagtgtttgtggggagggggaagaggaactctagagggcagggtatataatatcttttataagacagtacaaaaataattttaaaataactccgaatatatttgatgactaatggtccaatttgtcgtgaaattgcagatccatatttcactttcaggaatagacatgctatttcctttcagctatagacaaagcctctttcaggtaagacagtattttaccttacaatcatacaacgtcaagccagactcattgtt

SEQ ID NO: 12231 - DNA, 1160 bp, Homo sapiens
ttctttcacattttacctaccaaatctagatattcaacgtgagtccttaaaacagtcacttctaaattttattttgactcctttcttggctttttcaaactggaccatgagacccccttcctaaacaatgcagttgttttgttttattctttttttccagaaattcaagctgaaacatttgatatgacctgtgttttacctggtgatcagttctcaggctagtctaagtctgtgctgtcttggcatgccttgggtttcctatcctgagagtggtaatgccagtagaatgatgggaaccaggagagtgaatacgaccagattcaaagcctaaaacaatatgtttcagtttacttttatatgtagattttttaaatattcacatctagcctggaattttagtaaatacagatacttgttgtatccatgggaaatgaggtcatttcaaagatgtaagtcacgttggtgactactttcttttacttgtgataaatatatcactatacagggtaattgcttttataaatttgatcctttgcattggcttataattcaagaaatgtcaacttcactgtgtcactttatgtcatctctcataaaagtttctggcaggactaaagtttcaaaggaatgtgatagaatttattttggataacatttgtattcagcatgctaatgatgtaactcctctctttatcattaccacggtgatagttaagttcattcgttaactcattttagtgacatgtgaggccatttaaatatttttaagataatgtatattgattagaaagggttagaaggagacaaatttatggtagaaattagccttgccattgtctaagttaatttatgtgacctgattgaacagttttagttgtaactttagagtagcttctttgttagaggatctctttcctttctcttttggttttctcccaatatttttatctgtcttgggattatcttaaaaggtatttattaatgagtatttggaagaaaattgacctagaaaatgtctcttttaaatttatctaggtacttgtatcaccagagaccttcatcaagtcctactgccacactggataaggccactacccccgacccttcttgtcagggacatggcttcctaataatggttttgctgttgtctctacataggg

SEQ ID NO: 12232 - DNA, 1159 bp, Homo sapiens
tatttctcctttcattgttgttatttctgttataatactttaattgtacatctgacaatactgcctcttttatgttgtatttagaaattaatatacttataaaattaagatttattagccaaacttgaattctagttttaaaactgactgtgaattttatttttcatatatttatgcattacacaccttagctataagaaaaaaagggttttgattatatgcttcttgcagttaatctcgttatttaaacaaaaagttttgggtctgtctttggagtatttgtaacttctaaattttgaaatgactgaattaggaatttggatgcttattcttttagtctgtttgcctaaaaaccaatttacaatctgactgtctcttgggagagggaggtgccttgcaaactttcacattaagaatgtgcctgaggctgctttactctggaatagtctcagatctaaaatttcctctatataaggtggcatatgttaagttttgcttcattggaccgtttagaatgctatgtaaaatgttgccattctgttagattgctaactatatacccatctctgatttggctctccttaagtgataggatttgttattctaaaggtgataaacttgaaaatatcagaatctgagttttacttgaaattttgcagaatacccaggtggagtgaaaattggaagggttttgtgcaatgactaaaaggtaaaacgctgttaaggttcaagaatcaatactttcaacccaagtagccctctgcttgactgtatattatggaactagtaaaccttaggattttgaaaattggagtctaatctttcaaggaggtgggctcccaggatggtaccattgctctttcctagctaaccctagatatggcagctctttaatgtacttcaaaaagcaaatatatattactaaggaaaaaaagttatttataattgccttgtcataattgttaaggtgttctagagccatttgcatacaatttaatgtaatttcattccattctattgtttacacaacgattactcgaagatgactgcaaaggtaaaaggaaaataaaagtgtattgcacaatgagattgttttgcattgtttctttcctcctttagatatcatctgcattactgcaatggcatttagcactttcat

SEQ ID NO: 12233 - DNA, 2001 bp, Homo sapiens
tgctacatttgccaattttcccattcatgtcatgtatctggtccaggattcagttcagaattattgagttgttacacctcctgtagtctcttttaatctagaacagtgtttcttttcccatctgtgactcctttgaagagtataggccagttattttatagaatgtccctccgtttaggtctgtgtgatatttctgaatgatcagattcagtttatgcactctttgatagacatacctcagaagtgatgttgggttcttctctgtatcatattaagaggcacatggtattgatttattcctttactggcaacgttcactttgatcatatgcataaggtgggaccttccagtttctttattgtaaacacaagtatcacttcttaataggatggatttatttacattcactgattacattaaacattaaaagataaagtgaatatatttactgtattgaatcattaatcttttttcaaggaaacatttatactttatgtcatggctctacattcataggctattaatgaggaattttattgatagatagaatgatagaaatcttgtgtataaaaacaccttgttggctgagtgtggtggctcacacttgtaatcccagcacttagagaggctgagatgggaggattgctagaacccaggagtttaacaccagcctgtgcaacatggcaagattctgtctctacaaaaaaaaaatttagctgggcatggtggtgtgtgcctgtgcttccagttacacaggaggctgagttgggaggattgatggagcccaggaggttgaaattgcagtaagccatagtcacaccactgtactccagcctgggtaacagagcaagaccctatctcaaacaaaatcaaacccaaaatgacagtacactggataaagaaaatgtggtacatatacactatggaatactacacagccataaaaaagaacaagatcatgtcctttgcagcaacatggatggaggtggagaccattatcctaagcaaactagcacaagaacagaaaaccaaatgccgcatgttctcacttataagtaggaattaagcactgagtaaacatggacacaaagaagggaacaatagacatgagggcctacttgagggtggaggatagcaagagggtgagaatcgaaaaacaacttactgggcaccacacttattacctgggtgatgaaataatctgtacaccaaaccgccacaacacgtaatttacctgtaaaacaaaccttcacatgtgcccctgaaacgaaaataaaaattttacaaaaaccaaaacaatacaaaccactttgctagcagatttaggcaggaagtggaggtgcacctgctgccccagtctctatgcctggtctggaaacagcaagagctatatctgtatcttttgttgggtgagctgcctaatctctctgagcctaacctgtaaggcagagctgacaatacttacattgtgttgctgtgaggatgagagatgatctgtgcaggatgtctggtgccgtgtttgacacatagcaggtgctcagtcagcagtggcagtgtgattgtcatgtaaataaggagaatgattattgtggctacggaagactggacattttagaagtatgtagtgaaatcaggagtgaagagagtgtcctgtaggtggggtggggtgcagatgggtattgaaggttgtttctgcattgccgttaatttgggtgaaatggaggaaaagcctatggatgcctacagaaagaaggaaaataattacagtagttagttcattgccattgcctattcacctgtcttcatgttttcttttccgatccatcaaggtgctggcagtgggtgagaaccagggctttctttcactacagtaaaccctccctgccctgagaaggggcgtgtatgtgtgaagagcctaagagtagtgagaattaaatacaaacacagccaatattctttcacagctttcagatcactttcatttatgcttccatatttgtc

SEQ ID NO: 12234 - DNA, 5756 bp, Homo sapiens
tctttgtaggcatgctgtatgtaattgacacaagggaacagtatttgcatttgtactgtcttagaatattatttatttttttgtatttgtaaatctgtggacaaaagagggtttcctcactccttttactcactgggctcatgacagtgaaggagatgctccatctgcttctccccctttctcttgctgtagtccaatgtgctatgagcatcagcttactttgtcacttagagcaagcaaaacccagtgcaagagtctcgttcagctctaaataggtttgctttcttttagttacagtgcccattttgaaattgcctatacagtcttagtgaccatttaaaccggacgaactaggtgtttaattttcactcttcatgttcaattagcagttcaaattaaagaagatggttattggagaacttttttgaatggttttgtattaaattgctttgaaatagatttcatttcttgtgcacacagccaagatttcttcaatgggtgtgagctagttgagggttaaccttgtaggttgcagagtgtatttgtttgtttgtttgtttttctctgtgatgaggtcagtgctctgattttgaaggaggatattcactgaagctcatagttataaacaaggaaatcactgttaagaatgggaatttgtcctgtgttctgggaataacataaagagagcaactgatttcagccaggttttgccactaccctataattagtgcagtcttatgttataaaagaaagaagttaactatatttggggacaaaaaaatatttcaagagttgataaagattacctgtgcagtgcagagcactttaatgcaaccagctttcaagaaaaagccctatctagtacttgatgttgatgtttttattttgctgagcaaaataaagccaatgggagaaagactattttaccctttgcttttctccttaaacgtaatccagatgactttcctgttactaaacactgagcagcattacactacaatgcttctttggtttccaggaatttttttcaaatggggctgtttctggaaaaatgaaaaattctattggacaatggcaatatcaacaatgaggaaaattactgaagaataagtttccataagtctcctacatagcagtgttatttatgtacagataagaaaaccatatgtcagccaaagattttatctcttcttctaacttttagtaagaggaaaaagggattataaaacccttcataaatcaagaaggccatcacttagaacgaaccccaaacaaaaatgccataatataaatgtgtgaatcagggctgtgaagacaacagcagaaatgctaacaagcgtgcagaaacaccagagagtgcgtatcctgctcagaaccattcacatttaattcaattcttggaaaaaattaaagctttttgcccacaatttgcaatctgtgggttaatagttaaaagaatgttcccaaccaaaaaattcttaccgtaatattatatcttgccctacttatttacaaaataatatgtttctgttatggtccttagtaataattgaagaggcttagaaatacatctgcttgtttattgagaaaacgatgcaaataattctgcttttagagccttgttattttatttcacaaaacaggcatatgtctaggagtgtaatttgtggatggttgagtttgtaagaacaatcataaaaggacttgttagtctccagaacatctgctaaaatgcaagtatatgtataaggtaatagcatattacagctgaaaattttgagaaggtaaaagtttcttaattaaaatatgaacatatttagcttgctttagtgtctggggcaagtcctctcaatggctaaaattaactttagagatccatgtgttcaggtttagatcatatgacactcgagcacagaagaataatttcaaggaggtcatcttgtaaattaaaggtttagaagaattgcataaaacgtagtaaatggggtctgtcattagcaaaggcaaatctaagcaatcatttttccccccagaagttacttagaaggagaactgggaacacttggggtctctctaactgatggcattcacttcacacagtcgtctatgttatccagagatttttatttcattttacattttagggcacagttctttggggctaattaaaatggggtttgcaggctttttatggtgaagaataatatatctctgtctatagctttcccatggtagcctgataaggctgagagagaaaaatatgtgcagtatctcatcctccccctgtaccaggccatagctttgaagtgtattttgtaaattcaactataggttagtcagaatgctgtttttcgttaattaacttagcctgtgttgatatctcctccttcctggtcacattcaaaccttcccagagtacaaaggggtatgtagaaaggattccagaagaagtaatactttattctctaatgttaatagcttttctggatctcttagtagggggaaagtagaaaatcgagtagaatttggcctcaggtcaataaatgatataaaaacatgtgttctatttatgtatatatatgtatgtttctccaaaaagtgataaaaccaaaatatcactgactcatccctacccatattcttttcataaaacccactcaccaggtacaatagaaacttccctccttgtttgtcagcctcctgttcatgttccccacacacctgaaggtggtagaatcttttcagcctcttagccagtgagctaaatatggctaagcacaggtcataagagcacctaaggccagcatataagccaactacagttcacctttccaaatttggtcctatggatgttgagcatagggaagcaactctcagtattttggattattcaagtgtatgtggtaaaaatgcagatgattgctgctttaccccagggtttattagcatcctacttctgctgggctgcatcattatataatgccacaggcatctagtcaaggtaaagaagccagaaaggttaggcaagaagtgagataaaatcagatcacctttgatcaaaatggttggtgaacctccacatgtccagttctgttgccaaactttccattcagagtatttggtggagtttgaatttgagcaaactaaatgccttcatcttaggtagaaagggcctgaatcttccattttatattcaaacctcattgttatttggcctaagtaaaaagtcagatttcatttccatttacctgagttcgctttaaagagcttttcaaagagagctttatagacacccacaattgtccccaatctcttcatgatgttgcattaatagttgtttttgtccctttcttggaaatgttaatgccaaagttgcctgaacattgggcggttttcttaatttgaagtataaaaattataaagagtaattccaaaggtattaaaagattgtttaacagtatgtgtggtgatgtcattatctccagagaggcttcaagaaatcctttggaaataaaaagttaaatgtttacatttcatgtggtatttcaggtcttcaggttctgattagcttacttttttcctttgtctttggctgatttctgctttgtagataaataataatagccctgagatgtttctaacatttaaataagaaaaaaatcaaatcgaagtcagcctgctggaaaagtgatcacatggcagttgcagtaacttgtatggaaagagaaaatgcaatgagcccagttactgcacttgccactaccatgctgtccatggaaggaataatcagcagttcagttgtcacaagccgcccttgaagaaaacgcagcaaaatattttaaaatgaagatattgcagtccccagagccagtgaaggtttcttttggtaaaatgaaattgtgccattgtcaaagtaccccgtagtgatgagcactgactggttcactggccacattttagttcttcataataataggccacaaaagggctctgtggtttgcctccatgtgcactggcccctccccacccctagggggcactcagtagctgctgagaaggcctgtccacgaggctgttggaacccctccaataaatacttagaggtagtgtatctgatgcttgttttcgtggagaaaattgtattggagaacttaaaacatcacgaatatttttaataggatccgcagacacccaaaggagaagcttggtcttttccaggtatttccaacttgagttcaacccaaagcctttgaaaggaatgcattaccacatgaccacatgctgagaccccatggggtctaacacgggacctaagaaagtctctgcagccagatagtacatggtgtctccacaaaactaggcattctggagattgcccagaaagggatgtgaggggaccgttaagatctgtcttgcttatctcatgcactcacattccttcagcctcctggagttcctgataaaaggaagccagggtgtggacattttttagctattgatttcccaatagcttgtggatcagttgtacacccacacttccttctctgcctaattccgtttttctggaaaaagtagtatgcccatgtatgtgtgtttttcttaacacaggtccatgaaagtttggcttcctggtttgatgtctgttgcgtggcctggaaaccagggagcagcaactattgagatggtttctgtgttcagtgaaaaattctatttcattgagacaattttttctttatccacagtaattttttgacactgtcatcatgaaactacccttaggaaaataagattacctgcaaaaaaaaaaaagaaatgagttatggaataggaacagttatgtgatgattctgaaactttaacttagagcttcattactttaagaatggaaaacaacctctgagtttgatttcccaaagtttcataaagcccctaagctcatgattttcatcaactctttgcccacatagtcatttacctccacagccgtttgttgtcatagaaggggtggtggtgtttggatttgatttttttcaacttgcagtgagaaataggataggtgacaaaaccttacttgttttcttaagacaattcagtgcttgagcatctctgtcagaaatggaatgaaatactgttagccaattagaattattttatgtattgttattgtgttttgctgatttttatatgaaaatataattattcattcttgatctctggaagcaatcattattatgaggatcattttactttggaaacactttcataataaagataagtattaagagtgcagtgtaagtgccctttactgtaaatgctaaccagctcgtgtgggtaaaacatcacatctcacctgatgaggttaataaaggctcacatcatcccagtagattgttacaagcctcgtcaactcccagtatcattgtgatcattgagaaagtaatgttacgttaacttggatagactgtagtatctctttgaaaattaagattaaaacctcaatgctaaattttatgtagcactttattctggaaaacatggtttatagagatcatctgaaatatatcaggttatgcttatttttaaaaaaattttaaaagaggcacctaggataaacacccaaagcacaacacaaaacttcccttctctgtgtatgcacccctcatcggagtttggcccacatcatcttctcttggtttgtacctcactttgctagaacttctctccatctttctctgtctttcctgtgaaatacctct

SEQ ID NO: 12235 - DNA, 1138 bp, Homo sapiens
gctgactggattctgtggcctggatactcagaaacatccagcttggagaggatggtgggggctggtcactaggatgttgttggcaatgccctaaggcagcggtccccaagctttttggcaccagggactggtttcgtggaagacaatttttccatggacagcagggtggtggtgggggagggatggtttcgggatgacactgtttcacctcagattatcaggcattagattctcataaggaatgcacaacctagatccctctcatgtgcagtttacaacagggtttgtgctcctatgggaatctaatgcagccactcatctgacaggaggcggagctcaggcactaatgctcactcacccgcctctcacctgctgctgtgtagcctggttcctagcaggccacggaccagtaccagtttgtagcccagggactggggacccctccctcatggaacctgttcgtagtttgccatgcaagcggacctgctttggatgcttctggggcagctggaggggctgcaaggtgagacccttctctgctagcagcctcttgcctgcacctaccagcctgctcactgggctcagggttggggtgaggttctggggattgaagtggagctccaagctcttttcatggtcaaagtctgtatgctagttcaggctttacctactcagagtgatcttcacttttaatgcagttattgtctgagtaatcaccctcatactcatttgacaggcactctttggcttggcactgaaagctctttttctccatcttctcagccttgttgcctaccactctccaagaggtcatcactgcttgggtcatacttattagaccctcacccatgctaagcttctgtcaagtttttgttcttttttttcttagagacaggtttcaccatgttggccaggctggtcttgaactcctggcctcaagtgatctgcctggcatggcctcccaaagtgctgggattacaggcgtgagtgatcacgcctggcctgtcaagttgttttgaccctacacacaaagcctggtctccctcttcaccttcccaaatcctgctcattcacaaagacccagtgtagtcttataattctttgtgaagacttctctgatgacaccggcctgtagtgt

SEQ ID NO: 12236 - DNA, 2207 bp, Homo sapiens
tcagaagaaattcagaaaaagatgacaagtataaaaacaaagtgaagaaaagggccaaatctaaaagtaggagtaagagcaaagagaaatcaaagagtaaagaaagagattcaaaacataatagaaatgaagaaaagaggatgaggtcaaggagtaaaggaagggatcatgaaaatgttaaagaaaaagaaaagcagtctgattctaaaggaaaagatcaggaaaggagtagaagtaaagagaagtctaaacagttagaatcaaagagtaatgagcatgatcacagtaaaagtaaggaaaaggatagacgcgcacaatccaggagtagagaatgtgatataactaaaggtaaacacagttataatagcagaacaagagaacgaagcagaagtagggacagaagcagaagagtgcgatcaagaacccatgacagagatcgcagcagaagcaaggagtaccatagatacagagaacaggaatacaggagaagaggacggtcacgaagccgagagagaagaacaccaccaggaagatcaagaagtaaagataggaggagaaggaggagagactcacggagctcagagagagaagaaagtcaaagcagaaacaaagacaaatacagaaaccaagagagtaagagctcacacagaaaagaaaattctgagagtgagaaaagaatgtactctaaaagtcgtgatcataatagctcaaataacagcagggaaaaaaaggctgatagagatcaaagtcccttctcaaaaataaaacaaagcagtcaggacaatgaattaaagtcctccatgttgaaaaataaggaggatgagaagatcagatcctcagtggaaaaagaaaaccaaaaatcaaaaggtcaagaaaatgaccatgtacatgaaaaaaataaaaaatttgatcatgaatcaagccctggaacagatgaagacaaaagcggatgagtgagttatataaacttacttccattctgtttcggattttaagtttgagagacttgctaatgaatctcctttatgttgttttccttttcattgtttttggattgttttatgtttgtccttttttttcttaatgtggatttcattgagttgattttttgataatctgcaatctggataatttgtactgctaaagttttaataaactcgacatgagaaaaacactttggtgtagtactgtgtgctgtgtttaactattttatgtatgcattactgtgttgcaacaattagccaatagcatcctaatttgtttagtcagccatttggaatggttgcaatgcattgttgcaaaagcttgtgtttctcatgattaaagtaactttagaagccactagaagacatcttgtatagattttctgattgcgttataaatagaggtttgcagcggtttcttttaattacacagaagcagggtcctaataacctgagatcttaaatcatcacttttgattttatagtaatttgtgctttaaaatagatgtatttatattgcacttcatactctattctttatagttcgagccatagcttgtttcctattaatgcttttcctgtctagttgtgttttacttaactgcctataaaaatcgtaagagtaatttttttcagttgatgtactgattgagcttgagttgctgttatacagcatttgacaggaactataccttggaaaatcagattgtgattctcagttctgtgttgcttttggtttgaagagttttgggaacgttttaattattaattacccttctctaaactttaaaaaaaaaaaagcttttctcattaaaacataccatttgtgcaggtccttaagctatacagattctaaaaattgttagtattgagacattaacttctaagatttctcttttttggcctccaacctatatagaattgagtgttaactctgcatggattttgtttgttttaattgaactgacttctctaactctcatagctgtgagttccaaatggcaagaaaatgcatcttttctatatatgtatcacgataggctatagcatgtttatgactctggtttctttctcttcaggtggttttataccattactgttaatgttattttaacttggcatgtataacattgccatatagagtagagtagaaagttgcaaattttgatagtttacagagttaaacactaaacatatccaaagtccatttagagttttgggtgt

SEQ ID NO: 12237 - DNA, 1121 bp, Homo sapiens
atgtagaattttcatggttattttgtatgaattatttttctgggtaagccatctgccacagaaattgacactatggtgagattaatgttaatgaaatgagcagtagagaagctactggattgctttaaaacattctttgattaaattactacatagttggtaagttcatagttttaagttacttaattgaagccctcagaagttgcaaagaatttatctgataaatctgcctttgcacaaatgtgatactgatgcatggacggctttgcggaatgacctttgatatttgtgcctagtggaaggtatggagctaaacaattaaagaactcttcattatggataggcacatattggatctctggtattttgggtagtggtattaacttgacaattctaatttattttagttagtatatgtagcaagttagtatgtttgttagtagtttattgtacttcattccagttggtaatatagttttcatcacactaaactttttatactaaatttctgtagaagcttgttgggtttgccttcaccagaaggtactttaaatacctaccatagctgatttgttataaagaaacaaaatgggtgttcttctgtttccttttgattatgtttactgtaattatttcattttggatttatacatttacaattgaataaggattataggttgataagctgtttattgtgaaaagatgtgttttgttacaaatacttgttttaaaaattaataagcccccaggaagtacagcattgactggcacaactgcccatagtgagcttcccaactaactgccttcagtggattcgggcaagtgcaaagtctttggcctattgtgtgacaaagaggtatatattaaaggaaaagaaaaatgacatgaataagaaaattccgtcaacaaggttggagtagggagttgttgaggggtttagtttgttttaaaaggtatgtgagggagtggtggggtggatttgtgtttctgactttttttctttaagcaaattccatatgttaccaaaagcacatgctgtatattttcttccccttttgtgtgtatatagtattttgaaagataaatgaattgggtatttgtatgtgggatgtacaaaattg

SEQ ID NO: 12238 - DNA, 1184 bp, Homo sapiens
cgcgcatgctcagagcacagggaccgctccacctcgtccgtggccctgcccacccaggccgcaagagctgccgggacggtccccatcttcttggagcgctttaggctggccggcggcgctgggaggtggagtcgttgctgttgctgtttgtgagcctgtggcgcggcttctgtgggccggaaccttaaaggtgagtaactctcggtggctaatgagaagctacaaaagggtccgctttgctggtgcgcgactgcgcgtttccgttctttactgcttctcgcggcgtccgtccgcccctcgccttcctcacgttcaggccgagcgccgcgtgggccgcagccggaggcggcggagccgagggggcgcgggcggcggcgaggctgcccccgcgaggaatgcgggatcctggggttccccgcacgtggctggtgcccaggcagttccgcggttgcttagagacgggactgtggctgccctcatccccattgcgtcttttttttttttttttttttttacctccaccgccttctagtctcaccgaaggcttgtggccatctctgtaaagtttctggggaggtgggcacggggtaaacgccggagggttctgtggagcctatgggactgactggaggccaaagaactttgggccgcagatgtacaccagcgtcactcttttggtctgttagggccttcatcgctcacatcaggtttcagtgtgaaacgggaaaacgtgggtaatatttcatttacagtcgtacattctggaaaagtatctgatgaaacgcagttccaaaattaggccaaataggttttgcagggtctaaatagttattttatttcatcgtttgctttgtagggggccctagatcacggtagtaacttaggagtgtagattgtgatagacaagacaatgcataaaattgagtaatttctctagggggatgtggatcacacagtaccccgttgcaagtgcttcctatgtgtatccatggtatcgaatgcaattgcagtgtgtcaggggatgcttccaggaagtgtacctacatcagttcataactagagtcaactaatggcaatattctcgatgatttgttcacataacttttgtacagttgggatgactgggtggcttagtagagtcctggaggcaagtactttgtaagtagaagacttggtttgtaatt

SEQ ID NO: 12239 - DNA, 1157 bp, Homo sapiens
ataagtgccattcttggattattaacgatttacctcggttatgctgttgtataagtcagggacaggatatttggaagatgaatctagaggtcaggtctgtactaagagaaaagccttttctcattggtgcaaggaagttgttgcatctttttcaacagtatcattattagtaattgtgctcagtattaaactagagcagtacttacgttgaatttaacaaaaattaattgttacgttataggacctgtgaaaagagcaagagaagaaacagacaaagaagaacctgcatccaaacaacagaaaacagaaaatggtgctggagaccagtagtttagtaaaccaattttttattcattttaaataggttttaaacgacttttgtttgcggggcttttaaaaggaaaaccgaattaggtccacttcaatgtccacctgtgagaaaggaaaaatttttttgttgtttaacttgtctttttgttatgcaaatgagatttctttgaatgtattgttctgtttgtgttatttcagatgattcaaatatcaaaaggaagattcttccattaaattgcctttgtaatatgagaatgtattagtacaaactaactaataaaatatatactatatgaaaagagcaaaaacagtttttgattttttttttctttttgtacccaaagcatttaggaaagaactagaatattagctattgacgatgggcctttcccacaggccatttatggtgtctcctaggctggctttgtatatttacacaggaaagttggtaacactagaaataattacttgtcacaaagctttcctttttttttctttttcgagactgagtctcactcttatcgcgcaggctggagttcagtggggcaatctcagctcactgcaacctctgcctcctgagttcaagcgattctcttgcctcagcctcccgagtagctgggattacaggcatgaaccaccacatccggcccagaaagcttttcaataccgaatgtagaccagccaaaatcaagagacttactgatttctttttgtgaaacttgtatgatgctggcaggtcatatcgaagttctgtaaaacaaaagccacctaaggataaaattgtatttccaagcgtttaccacccttgactaaacaacaacaacaac

SEQ ID NO: 12240 - DNA, 1099 bp, Homo sapiens
ggagaattccacttttgtgtgagctcaaatacgcattcaaaagattacatttatattttatccagcttttccaaccattcgtagtgggagaattttcaggtcgtctattttgcttaatcgttacagctggaaatttccttgctgagtacttcatgtgtattctttctgttcatttctctttgttagcactttaaagtttatatattttttaattttcagcttagctctctttactcatctttagccattaggaaaagaaatagtaatgttcattgtgtagagaatagatacctctttggcattttaagcaatttgattaaaaatagcactgcataaaatattgtgacagaaattggtgtctataaattacatttaaaccacagtttgattttgaggctatcatctaattctagttttgttttatttttacagtttaaaacagagtggaaaatttcctggaaatccctggcctccatataagaaaaggacatcactccatcctagctataaaggtcttatgagacttttgcactgtaaaactttacacattgtgctattcactctgctttacaaggtacagtagtaatttgaatagaaagactaagcttagaatttattttcaaataataatcctaaaggataatatttacataaaagtaccacttataaagcaaagtgtatttatgcatttaagatgtatgaagatatgttataatcacatgtatttgaaatccaagttgaacataacagaatagctacagcattctttgtgagaaactatttatcttatctagctaccgataaaagtatttatttatggattctgtagaacagtaagtgaaataccgtggaactacaggaggtgtggaatgagctacagggaccaaacaaccatcagaacccactaaaatgacaaaactagaatggcagttatgtgaggcagtgaatcttaggttggggggttctttttgctttttccctctaatcaggaaagtgacgtggaaggatttgagtgtggtttctatgtggcaagatcaaaaattgtttttgataaacattttaggaactaacaagatgatgcttttacttgcttgttatc

SEQ ID NO: 12241 - DNA, 1226 bp, Homo sapiens
tggctcttttcacattgtaaatatttttcgtacagcttaaatttgccacattcgctgcttagaaaatgttttttaagttggtattccattttttaggtaactccctcagtcttgctggtcatttctaggttcttgctgtaatagtgctgtactggatgtcttgtacatatagctattttttttcttttggattatatccctggaaagaattcccaggggtgggaattacttggtcaaaaaacatgatttacatatgtttatttacatataattatgtaatttatatgctgtcttttaaagaagtgttggaatagctttgaccaactacccagtttcattgtgaatccagaggtgtacagttttacccaaattttgaagaattgaagctcatatgcttgaaaaataatataatcacagttttactctactcattaaaaattatttccaatgtaaattttttataattttcagtgaccagtgtaaccaatattttaattttttcagagtacatgtgatgcagaaaagtcttacgaagtattactgagctttgtgataagtgaactatttaaaggaaagttataccatgaagaaggaactcaggaatgtgcaatggtatgtttctgcaaaaatcagatgtagcggttatttagtaaaaaatttacattttcttgccattatgaatgtaatttttaaaaactctttattgtagactgacttgttcaaattttcttttttaactttaggttaaccctattgcttggtctcctgaatccatggaaaaatgcttacaggacttctgcttaccttttctcagaatcaccagccttcttcagcaccacctttttggggaagatttacctagctgccaggtagataatttgggatatgtaagagggagcttttttttttttcagatggagtctctctctgttgcccagactggagtgcagtggcacaatctcggcttactgcaacctccgcctgccaggttcaagcaatcctcctccctcagcccctctagtaactgggattacaggcacacaccaccaggcccagctaatttttgtatttgtagtagagacagggtttcaccacattggccaggctggtctcaaactcctgacctcaggtgatctacctgcctcggcctcccaaaatgctggaattacaggcatgagccaccgcactagccaagccttgtttttataataagctattttgtttta

SEQ ID NO: 12242 - DNA, 1113 bp, Homo sapiens
gtatgatattaatactttttttttctttttgttctaggcgaggcaaacctctctacatttgtaaggaaagatacaaagttcttgagcaacagtggatttctcatacttttgatcacatcaataaaagatggggtccacattacaatgggctgtgactctccacctcagcattgcatcgtatcatcattttcgctacgaatttatttttcaacaataagctttaacttaatttgggggattaacacttttgctgagggagaaaaagaaaacatacattatgaagcctttccaaaattaggtgcttggtaatcacgttaatggtataattttttttttttaatatctggagaacattaataacaagttaaattattctttagtggtcattttttaagtgcacaattaataagaagcacaacttgttcacaaactcattcagaaatgattctcccaacaatgcgtatcagctattcattgatacttagagtgggtgtgatttatttgacattttactgcttctttctgtctgtgtgttttaatttgcatctgccaagcataatgcatcttttttcctctgccattcttgtgttgattggagaatttttctgtatgtaattagaaaaaaatgtaaaacatgatttatgtgaaatactgtatagtaaaagttggtctaatagtagaactttaaaattttttcttattgtgaggaatctgttaaaagtttaaagctttgctgaaaactgaattcattctcaggaatttcataaatcttctccccaggtaaataattgaaatagctgtaaaataagtagatagctgctgttaatataatacagtacattttggggggcatatgtgtggttggggggtccttaaaaatcaaaatttgccatttcagttggatgaattactagaggtaataacaaatcttactatgaaatcaagaggtttaagaacatacactgggcagatgttgattccgtgcatgcccaccttttattaccaaacaaggttttgtttatatgattgtattagaaatgctcagacttccccagaaatgaaccataaattttggaacttcctttcagctcaagaggttcagctatattgtat

SEQ ID NO: 12243 - DNA, 1938 bp, Homo sapiens
tatgtccctactaacagaacttgcaaacacatgtagagaagctgataaaattgcaaagagaaataaacaagtatacaattatagttggagattttgacacccttctttcaataattggtaggattaagtggacctaaaatcagtaagatatagaagatttgaacaaaactatcaaccaacttgacctaattgacatttatagaactccccatgtaacaacaactgaatacatattctttacatgtgcatctaaaacatttaccaggatagaccatagtctgggcactaaaaagtacaaatatgtttaatagaattcaagtcatacaaagtatattctctgatcacaatggaattgaattagaaagcaacaacagaaagatctctgcaaaatccccaattatttgaaaactaagccatacacttctaaatacctcatgtgtcaaagaataaatgaaaagggagcttaggggtgggagaggtatcggcaggggcagcgctgccgccggggcctggggctgacccgtctgacttcccgtccgtgccgagcccactcgagccgcagccatgtctggggacgagatgatttttgatcctactatgagcaagaagaaaaagaagaagaagaagccttttatgttagatgaggaaggggatacccaaacagaggaaacccggccttcagaaacaaaagaagtggagccagagccaactgaggacaaagatttggaagctgatgaagaggacactaggaaaaaagatgcttctgatgatctagatgacttgaacttctttaatcaaaagaaaaagaagaaaaaaactaaaaagatatttgatattgatgaagctgaagaaggtgtaaaggatcttaagattgaaagtgatgttcaagaaccaactgaaccagaggatgaccttgacattatgcttggcaataaaaagaagaaaaagaagaatgttaagttcccagatgaggatgaagctctagaagatgaagacaacaaaaaagatgatggtatctcattcagtaatcagacaggccctgcttgggcaggctcagaaagagactacacatacgaggagctgctgaatcgagtgttcaacatcatgagggaaaagaatccagatatggttgctggggagaaaaggaaatttgtcatgaaacctccacaagtcgtccgagtaggaaccaagaaaacttcttttgtcaactttacagatatctgtaaactattacatcgtcaacccaaacatctccttgcatttttattggctgaattgggtacaagtggttctatagatggtaataaccaacttgtaatcaaaggaagattccaacagaaacagatagaaaatgtcttgagaagatatatcaaggagtatgtcacttgtcacacatgccgatcaccggacacaatcctgcagaaggacatgcgactctatttcctacagtgcgaaacttgtcattctagatgttctgttgccattatcaaaattggcttccaggctgtcatgggcaagcgagcacagctccgtgccaaagctaactaatttgctaatcactgattttgcaaagcttgttgtggagatgtggctggacaggtttgccatcagagtggatataccattgtattaaaaacaagataaaaaagctgccaagatttttggcgagtggttggttggtctgaagtccttgcaagacgctgatgctcaagctgttgacatactcattgcctactttaacacctgtcagagaaacgtgatatggggtaaggaggtgcttttttaaaatagttcatagacttctgtaaaatgcaagataaattaaagttattataacagtgaaaaaaaagaaaagggaacttaggaagtatttagaactaaatgaacatgcaagacacaatattcaaaatttgcggaatgcaactaaagttgaactta

SEQ ID NO: 12244 - DNA, 1298 bp, Homo sapiens
cccccactgccaaggcccccaccaccgttgaggacagagtcggcgactccaccccagtcagcgagaagcctgtttctgcggctgtggatgccaatgcttctgagtcaccttaactttgaaccattctttggaattggcgtggtatatttaaccacgggagcgtgtctggaaacgcaaactatcattaatttcatactagtttgtaccgtatctgtaggcatcctgtaaataattccaaggggaaaactaaacgaggacgtgggttgtatcctgccaggttgagtggggctcacacgctagggtgagatgtcagaaagcgcttgtattttaaacaaccaaaaagaattgtaagggtggcttgctgccaggcttgcactgccgttcctgggggtgtgcatcttcgggaaaggtggtggcggggcgtccactaggtttcctgtcccctgctgctccttccgtaagaaaatgaaatattctatgcctaatactcacacgcaacatttcttgtactttgtaagtcgtttgcgagaatgcagaccacctcactaaactgtaaacggtaaagagatttttacttttggtctccgtgagtcgcatctctactaaggtttacacaggaattccacctgaagacttgtgttaaagttctacagcgcgcactgttaactgaacgtctttttcttcagcctatacgcggatccttgttttgagctctcagaatcactcagacaacattttgtaactgctgctgttgctttctacatacaccttataaagtgacatttcaaaagaaataaggtgccacagttttaaaccagaaggtggcactctgtggctccttgtagtattatagctatactgggaaagcatagatacagcaataaagtacagtaattttactttttttcttgtgttacatctaaattacaacccttaattgccacgtgtgcacttactactctccagtatgtcttattactctccagtatgtcacgcatctttaacttttcacgtcctatgtttgctttctcccatttttaagagatggtaagttaactggaattgatttactgaatgaaattaaatgcagatatccctgtttttgaaataagacaaaagtgcttcctcagttattgccctggtatgagtctgaagatgctcatcccctgcagggaggacgtggctgaggtggcagcaccctcacatcaccctcatgtcactcacccctggccgccctgctggacactcgaggtcaacgccagcccagcactctcccaggaggcccagtaccagccagt

SEQ ID NO: 12245 - DNA, 1612 bp, Homo sapiens
gttaagatagaggaaaaaaattttgtttatttgggggaacactgtaaataacgtttataatacttaaatacatttggttgttactagagagttctaatatgaagggtagtttttcattatttaaaaacacatggaaaaatatgagacatatttctaacatacgaactatagtgcctggatacattcttcagcatttggcagttaatctgctgaaaccaaagtaagaactgaatgacagtgacagttgtgttttatagtaatagaatgtgagagttagaatctttggacaaagttaggctttgtcatttgcctattcagacttttaccaagttgtacctcgagatcacatgtccgttttctttcactggttatattaaagggagagctattatttctaaatactttacacctttgacaaaatgagctgcttgtgttgaaatcagttgaattcactaaattataatattgccagtgttttcaacacgttagaattgataacaggtatttttcttttgttaccaggccttgttcatcaaaacaggtgacagtgagtaaccaaatgcagaccagttctatgcaggataatgataaattcccttctagctctattgtaaattgttgtacagatgtcatatttcaattactaagtttcagcagcttattcttgtacaaatgtttaaaatatggcttttctaattggatattgtattttttttaagtcttcttgaaggcactctaattgctgctaaatgatgttgcttctttgctaaaaaattaaatgacctagaaggtgcaagttgactgtacatcatagatattaaaaagcagacagtcattaacaatcaagatgtaaaagtgatccatgttggacataattgagtttttaaatcagtttattgggttctagggctgtagaacacatagatactagatttttaatttgttcatggttattctacatttctagaaagttcttatcagcaagatggtcccataagcaaatttcttgtggtttgtacagatttgttaaaatgtgaacgttttctaactgcctcgtagggtagaaaccaatatttttcaggatgctgtatttcactcctgtaaggactttttctttattgtcacattcataatgctgatacttacatgtaagttgttcatgttgcagaaaaaggttatacgtaccacggattctctttaatattgtacagttaaactgtatttctgatgttgcaagccattttgttttttcattgtacatagacacattgtctctttaaaatgctgctgaaattgtagagagtatagccaaaacagtaataaacaatgacagttaaaatgtaaagactatgaaaattacattggaagggagctttcaagatggtaggatattgactaactgagctccttcacttaaaaatcagctgaataaattccttaagtatacttcaagacaagtgtaaattgtttcaagctgttaaagttaaacctaataaccattatcaaggcaactcctgggtaagtaacacttagaaccatcaagagtggtttaaggggctggctatacccattcctctgtagagcacagagaaatcctattaaaaaaaaaata

SEQ ID NO: 12246 - DNA, 1196 bp, Homo sapiens
agtgttgaacgttaatttcactcctataatacagcagctgtaaatatttttaagacaagtgtgccagatatttaaattttgccaatcagttgaattcttaaacatttatttgatgctggggaggtagtttttgttttgttttgttataataaagtagaggaactgacagaattaaaacctgcctgttttaacagtcattccaagttacgggtattaatgcatgtatttatgcatttgaagggagagtaaaccattacccctccacacacccccagaaaaacaggaaatgaagtgtgtagagagcaaaacattgagtaaaggtactaagttaattatctaagctagttgaacacacctgaggtgatacagtatgctctcatcagtaataagccactttagtaattggggataggggtggagggaacatttatataattaggaaagaaagcccccaatatttaatgatttttatcttttctccttctcctacccttctccccaatctacacaattattctcaagcaaaaatatgattatggtgcaatagtttcaaaagtcagacctgctttgtctaggtggttattttggttggttggttggttggttggttggctggcttttattttggttggttcatatctcacacattcatatttagaatatgggaaagcatataatatggtgacataataaggataaattcgaaataaattagtaattttctccttaattgtttttttgcactgcccttccttttaattagctttttttttctttttttctttttttttttagacagtctcgctgtgtcaccaaggctggagtgcagtggtgcaatctgggcccactgcaacctccgactcctgggttcaagcgattcacctgcctcagcctctcaagtagctgggactacaggctcctgccaccatgcccggctaatttatatatttttagtagagacggggtttcactgtgttggccaggctggtctcaaactcctgacctcatgatccacccacctcagcctcctgaagtgctgggattataggcatgagccaccgcacctggcccttaattagattttaatagtgccttttgttgatttcacctttccctttcttggtggtaaactttcagaatggcattataaatcgtttgtgaaattaaaatttaatttttttaggacttagagatgt

SEQ ID NO: 12247 - DNA, 1217 bp, Homo sapiens
aaatgtagttagttatataagatatacataaacaaaataattaagtggtaatgtcgcatagttacaattctgggtatgctcagaatagggagattacattaggagagtagtattttttaaactatggacccatggtccattgttggtttatgaaatcaatttaattgctatttactagtgtcacctcactcttttttaagtggactaggataggctagaaaatagatgttgtacaggactcttactactgcattgcagtaagatttggtattctgtgaaacttttaaatatatgaatgtttgtaactgtgtactaaattagatggaaaatatatttcttctgtgagttgcagccaaaagtgttggaaatccattgtaggatgttttgataagttgatgtgtacatttaaaaataaagtctctcaatttcgtctgcttgtagcattcattcctaaatttttaacatcttaactaatcacatatatatatttgtgtgtgtaagtataaagtatacacacatatatatgtgtacatatatatttttttttcttaataggtgcaatggatgagcttcatagtctggatccaagaaggcaagagttattggaagctagatttactggagttgcaagtgggagcactggaagtacgggcagttgcagtgttggagctaaagtgagcaaaattctcatctttatttgacagtctttctttctattaaatgatctaaaatagtatgtaaaggattcctacataacgtgcttaacagcaaatgtaacttttataatgtgtagaataagatcagtgttcataaatgcgtttttaatgtagtataccatatttcaggggcattataatacagcataatatgtttcagggataaaaaggagtttggtagattgtactgcctgtctcccactatgtagtttcttatccttcctgcccttattatccatggtcctatctgtacatctaatccacagtttctaactgctgcataaaactttaatagtgtatatcttttaggccaggagtcctcaacccctgggccaaggaccagtaccagtcctgttagtaaccggccacacagcaggaggtgagcggcaggagagtgagcattactgcctgagctccacctgtttgattcagcagcgttagattctcataggagcatgaactctattgtgaactgtgcacatgcaagggatccaggttgtg

SEQ ID NO: 12248 - DNA, 1474 bp, Homo sapiens
gcctgtaatcccagcactttgggaggccaaggcgggcagatcttgaggtcaggagatcgagaccatcctggctaacacggtgaaaccctgtctctactaaaaatacaaaaaattggccagacgtggtggcaggcacctgtagtcccagctactcgggaggctgaggcaggagaatggcgtgaaccagggaggcggagcttgcagtgagacgagatcacgccactgcactccagcctgggcgacagagcgagactctgtctcaaaaaaaaaaaaaaaaaaaaaaaaacaaacaaaaaaaacacctagatgctagaaacatgctcatgcagaattttttgtccctcacacagatgtagaatgtagagtaagaagacatgttgtgagggttgtggaaagaaaatccaaatcccacccatcaggagatgaggcactgggagccctagatgccatctgtcttttgaacttccacaaaataatgttgcatttcttctggtgcatacagaagtccagtatgctgctcttctgaggatccggcaagatggcagaagtagagcagaagaagaagcggaccttccgcaagttcacctaccgcggcgtggacctggaccagctgctggacatgtcctacgagcagctggagcagccgatgcagctgtacagtgcgcgccagcggcggcggctgaaccggggcctgcggcggaagcagcactccctgctgaagcgcctgcgcaaggccaagaaggaggcgccgcccatggagaagcaggaagtggtgaagacgcacctgcgggacatgatcatcctacccgagatggtgggcagcatggtgggcgtctacaacggcaagaccttcaaccaggtggagatcaagcccgagatgatcggccactacctgggcgagttctccatcacctacaagcccgtaaagcacggccggcccggcatcggggccacccactcctcccgcttcatccctctcaagtaatggctcagctaataaaggcgcacatgactccaaaaaaaaaaaaaaaaagaagtccagtatgctaacagaaagtcgtaataagctgcacacagtggtttgctttgtgggataagccgaacatttttcacttctgattgttgactgtgtgttggttcctctctgttttcccctccactctccaccctttgccttggcttgtgctctgggaggctgacgcctacaactgtgtcatctgactctccttgtcctctggcttccaattgggtttggctgatggctggtgctgactggggattagaaggcaggaagccaggtcagcctatttatcccactgtgactccttgttgggacatggttttgcagtggctgcattcctctttgccacgggactttcaagtgttcccttctccacagctgtggctctcacaggggtccagtaacaccatcaccacttgcttctacgcgtctatgagtggcattggcttcctg

SEQ ID NO: 12249 - DNA, 1127 bp, Homo sapiens
gatgaaggagttaaggtatcaagaaagattaccttatgttccaaagaaaaatacttacaagaaacgagcccccttatgaaccatgcttcaaacactgtttcttactaggaattttgcaagaatacagtaaaaaaaaaattttaaggaattcctctccagcaaaatccatgagatggtgcataggagttatatttacaaagcatcattgttattctctcttgcattggtggtgataatagccaagtcatttctgaggctgtcacaacacacttcacaaacaccgtcttttgttttgaaatgttgtaaatcattgttatagtccccgtaattatggaaaggccattcaggtcaattattactttttaacagaaaaattatttgaaaacaaactgaataatagtgggtaaaatgatcttttatttcattgtatataaaacattgtctttcttttaacagcagattgctgttccccgcaatgatgaatgggcacggtttggccgaacacttgcagaaattaatgcaaaccgagctgatgcagaggaggaagcagctacccgaatacctgcttagttcctgaaaaggggagtgtaactagtggatttgggaaaggttcttaagtagatcctgagactatttgcatgcttctgtctaaatgataattaaaaggaaatttcatggattaaaccatgggtttaatgcagcaaggaaacttacaatgtccctttatatataacatgcatcttgttttggatttgtgtcattttttaatatagctgattgacttcacagaaagcagcttttttgaattctaatacataggtgtatatttggtattagttattttgagttcttttcaacttataacactgtatacagttatttctaaagcacagatgaaataagttctgcatatttttaaataatcacagttccctgttatacagataatgttctcactacccataatatgtaggaacattgtttctccttagccgtagtatgcatacacctatccatgttcattctgacatcctttgttgtctttataattcatgtggtagttacctataaataaaaacaaatatgcgttaacttttcaaattttcatttttactccttacaacttg

SEQ ID NO: 12250 - DNA, 1133 bp, Homo sapiens
gttttgacgctgaagcactcaaagtaatattttaattttctttgttcactagtctcttgagaatacagtgtaaataaatcatataatggtgaaatgacacttttagtaagaaaaatgttggctgtatcctagttatactgaaactcatgaaataggaatacctgtcaccttcaatatctttagttatctttaatatctctatttttttgtcccttgaaacagttcgttttcctgaagatcttgaaaatgacattagaactttctttcctgagtatacccatcaactctttggggatgagtaagtaacttagtaaaatatttgtcaaattagtatggaaaaaaaaattttcattctttttcttttagatttagaaatcaaattttattttcttcttatttttaatgtggtttatcttaaaatatatgttataatggtgtttttttacattgagacaccagttattttaatacctaccatttagtgctgtaaatgcattatttaattctcacagcagtattaatgatggtattattatttgctgctttgtgcattgatagaattggataattgttcatgaacatacaaatggctggagtatagattttaggcaatctgactccagagcccataatcataactactacttttttctgctaccattttgctaaattacttctagtagcatgtattcccctaaagctgtaatagaaagcttaagttgttattctatgatcaaataagcagttgagagaagtttatttatttattatttatttatttatttttgagatagggtctcgctgtgtcacccaggctggagtgcagtagtgtgatcaaagctcactgcagcctgaacctcctgggcataagcagtcctcccacctgagcctccgagtagctgggactacaggcacacaccatcatgcctggctttttttaaaaaattttttgtagagattgggtctccctatgttgcccaggctggccttgaactcctggcctcaagtgatcctcccacctgcgcctcccaaagagctgggactacaggcatgaaccactgtacctgccctgaagtttattttttagaaggaactttaaatatatgtcccaggccaggcgcagtggctcatgc

SEQ ID NO: 12251 - DNA, 1178 bp, Homo sapiens
aatttgttattaattttttatatcctttattctttaggcagatgatgttgagggcaaaattagacaaatcattccacctggattttgcacaaacacgaatgatttcctttctttactggaaaaggaagttgatttcaagccattcggaaccttacttcatacctactcagttctcagtccaacaggaggagaaaactttacctttcagatatataaggtaaagataaatctaaatatttattgagtaaagttctatttgcctgaaacctgtatgtagttttgttgtcagtgatttattctaactgcagtaaacaagttttaatcagcattataaaccaagatctattttgtgtgtatgtctgtatctatgttcacatcttaatctgagacttctaaacattttcccacaggataattttgtgttctgcggactttcacttacctttgtgatgagtttcacctgacttttcctggctttttccctaggctgacatgacatgtagaggctttcgagaatatcatgaaaggcttcagacctttttgatgtggtttattgaaactgctagctttattgacgtggatgatgaaagatggcactactttctagtgtaagtacagttctaaagcaacagtagaccttattacctccacaaagccagcattttaattgtggcagcccaattattgggacagtataatgatatttttcccaggaaagaaaaactattgtttatgaggcttgagttttccttcattatgctttgggagaccttgagaatagagctgaattaaatgctgttgtccgttagggccctgaatgtaggcttaaacagtaaaatgagctttgcctgtgttttcttttacttgccacctattcatctttataataggcaagtgcactgaagtgatgtaaagaggtctgatttatccaagttgctgcacaccaattaagtgaattgtacattcagaacatagcaggtgtacccattgggccctcacagagtagcttgctgacactgaaaattcagtcagagaatggaaaagaaaatggacactgcatgggagcgcgactgtaattgacctgcttggctttctgttttatctgcagatttgagaagtataataaggatggagctacgctctttgcgaccgtaggctacatgacagtctataattac

SEQ ID NO: 12252 - DNA, 1312 bp, Homo sapiens
atgaagaataatagcacttaatctcagttgtctttcttcagctaatgtcttctatctattaagcaaatatttgagtgtctatactgcccagagttctttaaagttttggagggggctgctagtcacatgtctgtatttaccatcattggacacaaataccaggtcttcttgttaactctttttagagggtttgcaattcatggttaacattatgtttaagcttccttaaaaaacaaaacaaaacaaaaaaaaaacattgtgggacaagtttgggcgtattcatactattcttatttttaacattggagacttaaaattgtaagactataaggaaatatatttactttcttcgtctaacaaataattgtttgtcacttagaaaaagcagagagatcttgctaagatgagaaaatgtctcagaccagaagaactgacaaaccagatgaaccaaatagaaataagcatgcaacatgaacagctggaagagagttttcaggaactagtggaagattaccggcgtgttattgaacgacttgctcaagagtaaagattatactgctctgtacaggaagcttgcaaattttctgtacaatgtgctgtgaaaaatctgatgactttaattttaaaatcttgtgacattttgcttatactaaaagttatctatctttagttgaatattttcttttggagagattgtatattttaaaatactgtttagagtttatgagcatatattgcatttaaagaaagataaagcttctgaaatactactgcaattgcttcccttcttaaacagtataataaatgcttagttgtgatatgttaatgtgtgatgatatgattcttaaatacttacaataaacctcattcttaaatacttatcattccttccacactttgcttctaagattttacatctgacacctttaaaacatttctttaaggttatcctggtaattttattttttcaatatgatttttctttcttttttaacttttagattcaggggtacatgtggaggtttgttacataggtaaactagtgtcttgggggtttcttgtacagattatttcaacacccagatactaggcctagtatccaatagttaatttttctgctattctcccaacctccaccttcaagtaggccccagtatctgttgttcccttctttgtgtccatgtgttctcatcatttactcccacttgttaagtaagaacatacagtatttggttttctgtgcctgtgttagtttgctaaggacaatggcttccagctccatccatgtcctggcaaaatacatgatcttgtt

SEQ ID NO: 12253 - DNA, 1306 bp, Homo sapiens
ctaataaaactggagggaaaaaaaaaaaagaattggaaagaggccaaggctgcaagtgaataattcagtcgagttgtatcttacttaccattaggttctctcaattagtatataaactgaaaatctaagatatagtcagaattacccttgaaaactacctcaggaaggcacagtgttagaaactgacatattattgcttattacatttagtgtggccattttttccttccattgtcacaagtatttggtttcttctcttgagtttcatatgatatccctggcatcataggggcttagaggttgtattctttgaagagggtgtcttttaaacaccagatcatacccagcaagaaatgctgatactatgagagacaggcctattttcctcgttttggtatcccctctttggcttcccctgtttagttgtgtttgtgcgttttgcatgaaccagccataggactctacatttgttctcactcactgcctaagctgttgaagaattagtggactcctagacaaagaataatcccactatctcctagttctgactgatttaactgttaaacgtatattaaattcaaatctccaaattgtctctgtttcatcaacaggttgctcgtgggggccccgcgggcagaagcgcttccactgcagagagccaacagaacgggagggctgtacagctgcgacatcaccgcccgggggccatgcacgcggatcgagtttgataacgatggtgcgttcctttccctcactcagcgttcactccggcagcttgcctgtactgtttccatgagggaggagagtggggacaaacatttattcttgtagagaggacttcttttaattgcatcagacttgactgttttttatttgccctgaaaatatttacttactttacttctgaatcatactgggatgccgcgtgttttgctgctcctcctaaccgtggtttctaaaccgatatggtgtagggatgttgccacctagtgatgtgttgaggttctgcaggaggttgtggaaaaactcatttcatagcaatgaagagaatgaatgagcgtatcttgtattcatcagccaaaagttctcacatgctgttaaaatatttgggagaaagacagttttaaatatcagacccctttggaatgagagctggctaacagagataaagttttccctcctgtctcagatagagacttgttttgttaagggctctggataggtagaagataccatgaggtaggcatgttgacatccagtgtacctggcttcttgtaggttgagcagagcaattagtgtactgaga

SEQ ID NO: 12254 - DNA, 1142 bp, Homo sapiens
ctggtcaaagtgttcttcaaacacaattttactaaaggacagaatggaaatttgatgtgtggcaaagtacatttaaagcttgaattctgcattggtaattgtcacacagggaaatgaactgtgtggaatagccagtcacctacatcgatgccttcctgagtcctgaatggtgtaaattgacaatagttttcgttttcctacaggttcacttcttaaaagagggatgtggagacgacaatgtatgtaacagcaaccttaaactagaatataaattttgcacccgagaaggaaatcaagacaaattttcttatttaccaatgtaagaatcgttgtgtagcactagcaaaaatgattctggcttcatggtggctttgtgttaagaaagtttactggaaacgtattgaggactttgcctttttgttcttgttttcttatttttaatagtcaaaaaggtgtaccagaactagttctaaaagatcagaaggatattgctttagaaataacagtgacaaacagcccttccaacccaaggaatcccacaaaagatggcgatgacgcccatgaggctaaactgattgcaacgtttccagacactttaacctattctgcatatagagaactgagggctttccctgtaagtattgttagagaccagctgagaggggaaaaaaatcaacactgtgtggcaaatgagtggattgtgacctagcgtgtgtttcttttacaggagaaacagttgagttgtgttgccaaccagaatggctcgcaagctgactgtgagctcggaaatccttttaaaagaaattcaaatgtaggtgatgccttcatatactgtattttactgttttaaataccattgcagtgtctgtatgcatggcctgtgttaacagctatttatgtttttttaggtcactttttatttggttttaagtacaactgaagtcacctttgacaccccagatctggatattaatctgaagttagaaacgtaagagttacatcaacctctccattcagaattatttcatgaaaatatgggcagtcaatgaattggccctgatctacctcataaaagaagtctaattgtagtgagaaaactgactggtaaaatacaaccctattgtttccttttcattttcaga

SEQ ID NO: 12255 - DNA, 1101 bp, Homo sapiens
agcaggaggatcacctgaagccagcactttgtgaacaacatagaccctgtctcaacaaaaaaatttttaaaaaaattagctgtgagtggtggcatgcgcctgtagtcccagctacttgggaggcagctgaggtgggaggatcacttgagcctgggaggttgaggctgcagtgacccatggtcacaccacttgcactccaacctgggcaacagagtgagaccctgtctccaaaaaaaaaaaaaaaaaagtatgattgttctcaaaaagataccaggttagatagatagaacagactggctgttagatctatttaactgggtatctttttgagagcaatttgtttagatacacagactggctgtatattgataattgctggaacaggatgatgaatacttaagggttcattatacagtttacttgtgttgataacaaattttttttaagatacattaacaaagaagtaaccactttgtcagaatacaacccagcattttcaagattctggggaaagatcttcaaggaatgtctcttgaagcaatattctgttaagagaaaggatcttgcatcagaaagtcatctcatccattcacaggctgcattgtccaaaatatattcaaaagcagaattagaaccataaactcctggtgtgaactcttgccgctgtatgtagtaatgctgctttcttttctgccctgtaggttcgagtgactgtgtttccctcaaagactgtagctcagtattcgggagtaccttggtggatcatcctagtggctattctcgctgggatcttgatgcttgctttattagtgtttatactatggaaggtaagtcatatctggcatttgaatttcataacaaactttatttcatgttttaaaaaatgggaatcagcactgatagtacgttttctttttcattgcttccttttttctaacattatgaaactcttttgacatagcaaatttgaggaaaattttaccatgaacacctgtatatttaccgaatattttgtatttaaagtatattatttgtacacaataagtttcttcatttgtctctcacacataatttagcatgtttagcaaataacaaatttag

SEQ ID NO: 12256 - DNA, 1225 bp, Homo sapiens
ctgaatctgctaccaaaacagttaatcagtgagtcgatgttctattttttgttttgtttcctcccctatctgtattcccaaaaattactttggggctaatttaacaagaactttaaattgtgttttaattgtaaaaatggcagggggtggaattattactctatacattcaacagagactgaatagatatgaaagctgattttttttaattaccatgcttcacaatgttaagttatatggggagcaacagcaaacaggtgctaatttgttttggatatagtataagcagtgtctgtgttttgaaagaatagaacacagtttgtagtgccactgttgttttgggggggcttttttcttttcggaaatcttaaaccttaagatactaaggacgttgttttggttgtactttggaattcttagtcacaaaatatattttgtttacaaaaatttctgtaaaacaggttataacagtgtttaaagtctcagtttcttgcttggggaacttgtgtccctaatgtgtttagattgctagattgctaaggagctgatactttgacagtgtttttagacctgtgttactaaaaaaaagatgaatgtcctgaaaagggtgttgggagggtggttcaacaaagaaacaaagatgttatggtgtttagatttatggttgttaaaaatgtcatctcaagtcaagtcactggtctgtttgcatttgatacatttttgtactaactagcattgtaaaattatttcatgattagaaattacctgtggatatttgtataaaagtgtgaaataaattttttataaaagtgttcattgtttcgtaacacagcattgtatatgtgaagcaaactctaaaattataaatgacaacctgaattatctatttcatcaaaccaaagttcagtgtttttatttttggtgtctcatgtaatctcagatcagccaaagatactagtgccaaagcaatgggattcggggtttttttctgttttcgctctatgtaggtgatcctcaagtctttcattttccttctttatgattaaaagaaacctacaggtatttaacaacctacaaattgggagttgtctttggactgaatcctcctcttcactgcctgtccttgtaaggatagggaattgcttagcaatgataacctggcattaaaaaaaattctgacagctaagctgcttccttcttagaatatgttttggatgtgggagca

SEQ ID NO: 12257 - DNA, 1161 bp, Homo sapiens
gaccagcctggccaacatggtgaaaccccctctgtactgaaaatacaaaaattagctgggcgtggtgacccatgcctacgtagtcccagctacttgggaggctgaggcaggagaatcgcttgaaccagggaggtggaggctgcagtgagccgagatagcgccactgcactccagcctggttgatcgagactccgtctcaaaggaaaaaaaaaaaggaaaggctttccctggttgggggcagtggttcatgcctgtaatcctagcaccaaggcaggaggatggcttgagcctgggagttggagacaaacctgagcaatatagggagaccatgtctctaccaaaaaaaaaaaaaaaaaaagcagactttcaccaaactatcaaagtatattttcttctgtagagagttcaagactttgatttgtcaataccattgccatcttaatgcgtgaaagagaagtatatttattaaatccttttttgttttgttttgattcacactagatggctatgaaaatgctaggcgtctgtgtgatttgtattatattaactctcccgaactagaacttgaagaactaaatggtaagcctgatgttgtctttttctcaataattagtgctttgattacttgataagggataagaatttaaatgttttaatggaagatgactttttatcaacttcgttggatatgaaggctaaaggatagtaatcatgtaaaaaatatatctataaacatatgtaatttagtcagattctttatgaaaagatttggctttttgtatcacattttctttatttttaattgataactttgattctttgcttattttttattttctgtttagtcatagaaagaaaatgataccaagaaagttacatttgacttttacatgcacttcactaatgtaagacttaccctttttctacttcctgagttgtaaataattttctgttgttgaggacatagactggggttataaaagaggaaagaaagatgctcatctatttgagaatctgtttgtctctgatggttttctttttaccctgattagtgccttttggacaaaaagggtttagatgccttgaagagggattgatgagtctctttttcctgaaagcatggtagtttgacagaaaaaagcatttcctaagatgacactt

SEQ ID NO: 12258 - DNA, 1226 bp, Homo sapiens
atatgttggcactgtgtaccctatttcctttagaaattagtcaaagcagctttacaatgacaatacccttaatttcaaactagagataaagggattcattgctccatcaaatacgaccatcgctgttactactatatgaaaaaaattgctttcctttaaagaaatttatgacagttttttaaatagttctaaaaatatagctgaaactacattttcaaaaatgttttgcccatcatttactaaaattataaaagtgtttgaacagagttttctgctttaatgtaactagttaaaagtgttttgaagtctgactttggaaaataagcaaaatttagttggagtctttaggtcagaatatccttcaaatcccccccaaattgactccattaaaaaaaaaactttaaatgtggttataagaattgtgattctttggcatatttccatcaaattttaaaacttcaaatagtgcatatgtacttgaaaattacactttctcttttctaaaaagctgtatttttaatacaaccctaatgtatttcagaatgcaatgagagccactatggaacaccatgccaacagaggtgtttacccccctattcaagttcatgtcacgctgggtaatgaggatttgactgtgaaggtaaatgtgtttaatggtttgttttcttttttttttttttgtaattgatgaacagacatgcaaaggtaaccatacgcataatttctaaaagacataatctactctcaggggaaaagaatcttgtctgtaatagataataagcacattgcttcattgagctggtggattatagttatcccttgagtcttttctatgcaggtcccccgtcgaggtgattcaagttaaaataaatcttggagacagacaatttatcattaatatctctttgataagtaagatctaaaatatttgggtagttgcagtattatggagatagtattttatatataatttaaaaaattttaaaacagtgctttctaatctactggtttcatttgattctcatgacgtaggtaattttatcctcacttttacaggtgtggagactaagacacagtgattagctcaggatcacacagggcagaaatgctatgggacatgatatccagtcttctgtccccagtgctaggccttttctattacattgttcaggtggcccagtttcttcttttacattttattaaaaattgttttctgtcacccaggc

SEQ ID NO: 12259 - DNA, 2615 bp, Homo sapiens
atctattaagatacatatatcgatttgtatgcttttacatttaaccaacttcttcagttagccaactctgatctgggtcatgttttgtgtaaaatttcagtccagcagcttccaggatggctggggaattactgtaagcaacaaactcagtcaacctgcacatcagtcagtgccatagatttcataaataacacgtttcaaatatacataccatttaaaagtatatttaggtggtataaggattaataagatactaatagaatattatttaatttgtcgtaacctttttgccattgtctattttctcaaataatgaattctaaaaaatgccagacttaataggtcttaggtttttctttttcaggctctgtcaacagactcaatagaaagactcccagtgtataacaaagctgcctggaagcattacaacaccaaccacgaggctgatgactggtgcgtccccagcagagaacccaaagacatgacgacgttccgcagtgcctagacacacttgggacatcggaaaatccaaatgtggcttttgtattaaatttggaaggtatggtgttcagaactatattataccaagtactttatttatcgttttcacaaaactatttgagtagaataaatggaaactgaattccatttgtgcccgttaaacctcctaaaggatgaaattgcacctattttacacttatattttcacagttaattgaacatatttttaaacaactgtagttttgggcaacttttcactttgtggtagacttcagaagtgtggaaatcttcgggtttctataggaaactagttttttttttttaagaaatactttcatttatgtttgctagaaacattttctaaatgatagtgattagctggttagccatcttcctgttatttggaggagttctgccatcttttattcggtagtgacagctgtaatatggtcttcatgtttatcagtgacttgactacaagtaaagcagaaaacagttggcctgtaatcacagaaccagccacccttcggcgtctacatgcattgtcttagctctgaggttaatttaccatttttaaattttattgtaaagaagtgtaatgactagctctctgtggatctatgccaaaatcatgggccatcttttctaagtgtacttctgattaatgcaaggggaaatttttatactgaaaacaaacaaacaaactagcagctactaaaatagagaagaaattgagggcaaagtaatatgtctccaaaactgaactgattgcttgttgagattacctagaaagcttttggaaaaaaatagagcttttctgcatcctactccagatacactgaatcggaatccctagggctagagcctagaaatctcactttttaaaatgcttccaaggtaagtctgatgcctaccctaggttgggaaccactctttcaaagtaaacagtgatgacacagcatttgctaaagtaacatctgtaggttttggtttccacctatttaaagtcagatttatagactcgaggagacagaaactgaatcccacacctggtgcaattagaagcataattagaagcagaagaacaaaatgccacgtaaccaaagcatcagagccatcattgcacgtgtctttttttcttttttcttttttttttttcaagacagggtctcgctcttttgcccaggatggagtacagtggcatggtcaaggctcactgcagcttcaatcttctgggctcaagtaatccttccacctcagcctcccatatagctggaactacagttgtgcactaccacacccagctaattttttgatttcttgtggagatgaggtctcagtatgttcccaggctagtgttgaactcctgagctcaagaaatcctcctgcctgagtctctgaaagtgctgggattacaggcgtgagccaccacacatggcctattgcacaagtcttgacaaacaacatatattttctaaaactatccagatttcattatcagggaaaagtttgcttaggtttattacagcagtccttggcatttgtatggtaatttgtactttacaaatactttgatatattataactctattggtctttgaaacaaagcgatacagtgtaggtggtatcattctctttctcactcagtgtggcccagagttgctcagaattggagcagagcctgagacgtatctgcagatcctgtcatcagctggcaagtccaggagactgtgtcatttagagactgtgttgttagttatccctcaacatcttctaaggtggcaggaaataatattggaaataacattttaaagtaaaaattttaaagtttaaagaagagttttgccacttaaacaggggagctttgtctggaaaatacactgagttgaaacacttcatccttggaaggattatataagatgaacagttgtgataaatgtgtagattagagggatgtgaatgggcagttagtccagtgccctcatttaagaggccaagatcctgattcagaggaggcatcctttgcccagagctgcttagctaatctgaccaaatgttgggaaaaatgtctcacctaacccactattccttaattatggattttgtgaaaaaca

SEQ ID NO: 12260 - DNA, 1222 bp, Homo sapiens
gaatctaagtatttgtttcctaaatgaaacatttgtacaacatttgatgtttttacttatgaaatattctcctcccccaagaaaatttaaactttttctctctatttaaaagctaagaaatgttttaaaggaaaaatgaaattatcttcctttagcttatttttaaggtaaaacagctttttactctgttattgtggtaatggacagaatattacatacaaaaatattctgggagagctttttcctagttggttttaaatcattgtgccacctgaaaggtttttagattttataggagctaatttgtccaccagcattaatgtaacacagtgtagttatgaaaatatattgaaggacaggaagtggacacgaagtgatttttgtaacctgagcagttaatgaatgtgccaacattttctaggaagggacagcaagaatattctgctctgtagttaaaatactggctggcttttgatgtcttcatgcttaattgtgatcactttcttgcactgtgatgtttttacgtgaatatgttgaagtagaagtctaccatattattttataaaatgttttctgtatggcaataaactgaaaacatggatcaacccttcttttgaaaataaactgagtcaatttagccttttaaaaatatagtcatctcttttaaatagaatcctcttccaccatcaaggctcaacattttgtaagcatccaaaaaattggtaattagggggcttgcactaaatttcactatcttcagtagagaggaactgtttggaacttagatttccaatgtgtatattctaatggagaaagcaagaggtagagtttgtatgtttgacttaccttagatttttattttccatacatactgcaaatgattgacttgttgcataaatgaagatcttctgttgtgtgcttttcaaacactgtaaataaatttgaaatttgaataactttccacagtataactgtaaaaaaaaaaaaaaaaagtcttaatttaaccagcattaccctctgcttgtaccaattgaatggcagaactactatagtcaaaaataaattcctatcctatttttaattgatgggatataggcagcacaatttcccttcattgttgaagccaacaagttccgtaacagaactccagaggtaaatagctgggaaaactgttagttttaaggtcccactgttgctctgtgaatgactaatcagaggaagc

SEQ ID NO: 12261 - DNA, 1162 bp, Homo sapiens
atgtaagtctaaggatcaggcaggtaggagaaccctaatgtactataaccaccaccccttacaaccaaggaaactgagacaggttagtcaattgattgcttgggttactcagccaatgtgtagcctaaagtgtcatctcaaccacttactgatggtgtgttgttgaccacctaacctgaatatcattttcccacctatactatgagattaatacctgtttcttgggactgttaatgggaataagatgagatcatatataacatcacttatgaactgtaaaaagctagataaatgtaagcatttactaaatggctgtaccaggacaccagctccataggttatgctgcaccccagtggcccttcaacactttgttgaaatattttgagcttatttttccaagctagaaactacccttgatatttaaggacatgaaagattccttctcctccggcagttacctggttgattttaaagcaccagcatgtgtcttttactttgattagcattctgatggacccactaagcgcttgatgtctcttaagtaaagttgagacttacaccagctatccccgtgcaggtgcgaaattgaggcaactcttgagaggctaaagaaactagagcgtgatctcagctttaaggagcaggagcttaaagaacgagaaagacgtttaaagatgtgggagcaaaagctgacagagcagtccaacaccccggtgagtaccctcccccttcgccgtctttccacatgcggctctaggctgcgcagctgagcatggcagcatggcacctcttcccctgcctcccgccgccccctcctcatttcctgcctcgcgcccgtgtattaaagggcccgcgtgtggactcaagcagcgttcatacctaatttcaattaataaaatgccagagatttaaaagaaaagcttatcctatttctggctccttccttaagaactgttattctgtcagtgtgtttatatattagaattacaataataaaatccgatgtattttcacaccatctgctcagtctcagaacatgcacctcggtgctgattaactccttctagtcactcagtcattaataactgtaactccagcagctcactgactaacagagtctttgatgtgtcagaacttaaccatgttttccttctaaaatgg

SEQ ID NO: 12262 - DNA, 1225 bp, Homo sapiens
aaggaggacaaggcccatgggtgggtgttgaggtttttaaagtgtggtcaggaaaggccccactgataaggtaacatttgagcaagtctgaaaaaggcaaggggatctttggggctaacttcgggatccctgcactttatgtaagaatgtaaacctggagtctcatttaagaatgatcagcaatacgtttagaacatatgaactgaatgaaatggacattttttcttaatttatgtataaatccatatgattatacataaagttctgatgcattaataaaagcagccaaatagggccaaagagaaaaataacaggactctgtactggacctaactttatcattaattaggtaatattttcctcatttctttactgctgccattttcctcaccagtattccagagatggtcatagctcattactctaccaccaagaacctaaaaggaattagaatacagcagaattggcctcagtgaagagcttaaaattgttctcctcgtagaactggactattgatcattaccacgtgacgttggctctattactttctgttcccaatgtccttctagtggtttgaaaatgttaaaacatccctaaaatctaaatcatataatcagaattctatagtgtcccactctatctgtaaagatcatttggaagactttagactctattaattttaaaaggaatatttattagccatatgcagaatttctaatgatgatattgtacagcttctaattcacttttcagatcagtgtttgaaatggcaattatcagtgttggatttagttccaactacttgatttacaaaaatgtacatttagaggttaaaagaaacagtgagaaatgtaaacattcaaaatgataattgaatctctcagttgtgggaataattatcagagacatgcaactgaaaatgtctcacctttcatctttttttcttaattcataaagttatcttgtagaatttgatgagaccctccctagtcattctcaactggggcggtgctgtcaccgaatggtgtttgagagtgttggggctagggcacatttttggttgtcacagcaactggggtggcatttgctgcccagtgccaggaatagtaacattatgaatgccagggacagtgtgctcagtaaagtcttccatccaaaaggggcagggcacggtggctcacgcctgtaatcccagcactttgggaggccaaggtgggcggatcac

SEQ ID NO: 12263 - DNA, 1343 bp, Homo sapiens
atctgcaactgcagtttctgccggcagcgagatggacggtgtgcgactggggtccttgtgtatttagccaaatatcatggctttgggaatgtgcatgcctacttgaaaaggtagtgggtgtttttttttcccttccacatctgaattttatattcatttatgtcttaatgagaagatgatagatgtcagaagagtggttatctctggcggggtggagactgactggaacggggcacactggaagggatgggaacattttctgtcttcacttaggtggtggtaacccgggtgggtgggtgtgtatgaaaaagtcaggtaatatacttgaagatgcgcacacttgaccatagtgatgttataactcaataaaaatggttttaaaaatgaattaggctttcaaaagagaattctttggttgaaaactatgtcctgacacatttccttttgtttttcacagcctgaaacaggaatttgaaatgcaagcataatatctggaaaatttgctgcctgccttctacttctcaaatctttcttgtaaaagtttccaattttttcactgaaacctgagttaaaaatcttgatgatcagcctgtttcataagaaactccaatcaagttaatcttagcagacatgtgtttctggagcatcacagaaggtatattgctagttacactttgccctcctgcagtttcttctctgctcccaacccccatctcacagcatccccctctatttccaatgctcctctccaaccgcttagtttctgaatttcttttaaattacagttttatgaaagcatattttatttacttggtgttgaaatagccctcataaaacctaagcacttggaaacacaataatagtattaactaactagatctattgaatttcagagaagagccttctaacttgtttacacaaaaacgagtatgatttagcattcatactagttgaaatttttaatagaatcaaggcacaaaagtcttaaaaccatgtggaaaaattaggtaattattgcagattgatgtctctcaatcccatgtattgcgcttatgttacaagttgttgtcacagttgagacttaatttctcctaatttcttctgcccgaagggtaagtggtgcgtccagcttacacaatcataattcaaaggttggtgggcaatgtaatacttaattaaaataatgatggaagagctatctggagattatgagtaagctgatttgaattttcagtataaaactttagtataattgtagtttgcaaagtttatttcagttcacatgtaaggtattgcaaataaattcttggacaattttgtatggaaacttgatattaaaaact

SEQ ID NO: 12264 - DNA, 1227 bp, Homo sapiens
atttaaatataccacaaatatatcacctttttgttttcttcatccagacaggtgatttggcttctgcacagttaggaggagcaccaaaccgatgggaggttttgtcagccacacctacaactataaaagatgaagctggtaatctagtccagattccaagtgctgctacttcaagtgggcagtatgttcttccccttcagaatttgcagaatcaacaaatattttccgttgcaccaggatcagattcatcaaatggtacagtgtccagtgttcaatatcaagtgataccacagatccagtcagcagatggtcagcaggttcaaattggtttcacaggctcttcagataatgggggtataaatcaagaaagcagtcaaattcagatcattcctggctctaatcaaaccttacttgcctctggaacaccttctgctaacatccagaatctcataccacagactggtcaagtccaggttcagggagttgcaattggtggttcatcttttcctggtcaaacccaagtagttgctaatgtgcctcttggtctgccaggaaatattacgtttgtaccaatcaatagtgtcgatctagattctttgggactctcgggcagttctcagacaatgactgcaggcattaatgccgacggacatttgataaacacaggacaagctatggatagttcagacaattcagaaaggactggtgagcgggtttctcctgatattaatgaaactaatactgatacagatttatttgtgccaacatcctcttcatcacagttgcctgttacgatagatagtacaggtatattacaacaaaacacaaatagcttgactacatctagtgggcaggttcattcttcagatcttcagggaaattatatccagtcgcctgtttctgaagagacacaggcacagaatattcaggtttctacagcacagcctgttgtacagcatctacaacttcaagagtctcagcagccaaccagtcaagcccaaattgtgcaaggtattacaccacagacaatccatggtgtgcaagccagtggtcaaaatatatcacaacaggctttgcaaaatcttcagttgcagctgaatcctggaacctttttaattcaggcacagacagtgaccccttctggacaggtaacttggcaaacgtttcaagtacaaggggtccagaacttgcagaatttgcaaatacagaatactgctgcccaacaaa

SEQ ID NO: 12265 - DNA, 1603 bp, Homo sapiens
agcaaataaagcagcttttaactagttatatagtctttttctttctgcctggtttgatctgttttgttacagtgacttgctggatgtttgcagacacatcagaaatgtaccataaacagcgtgtaatgaaacttaatgatattggtataattacatttatgtaccaacaatttagtggagaatacattatgattatgtatatatggaaaatctagttctgcccaaatcaagaatactttgcttctctccaagtctagttttgaacttgtatgccttcctatatttcattttttctttttttatatcacccaagtagtataatactttttatatctgctgccaccatttaccccatgtatttagttgtaaactaataacccatttcctctatattttctgtttgcaggctgctggaaagtacagacaacaaggcagaaattatattgttgaagatggagatattatcttcttcaaatttaacacacctcaacaaccgaagaagaaataaaatttagttattgctcagataaacatacaacttccaaaaggcatctgatttttaaaaaattaaaatttctgaaaaccaatgcgacaaataaagttggggagatgggaatctttgacaaacaaattatttttatttgttttaaaattaaaatactgtgtacccccccccccccatgaaatgcaggttcactaaatgtgaacagctttgcttttcacgtgattaagaccctactccaaattgtagaagcttttcaggaaccatattactctcatgatacttcattaatctccatcatgtatgccaagcctgacacatttgacagtgaggacaatgtggcttgctcctttttgaatctacagataatgcatgttttacagtactccagatgtctacactcaataaaacatttgacaaaaccagccttggtgtgtttggggatgtctgtattgactgactgtggtgtgctgaatgcgatacggcacctggtggttgctgattacagaattttaaggcgtgtgtatgacacagtaactggcagtgtggggcagctgcaattgtatcttaaaagtgagtctttcatgggaatcagaagaatagtataccagggatttgtctcaaaaaagttaattaatttatagatcaacatttattgaaagatgatagcaatgatattatgagggatatgagataggtgactgaccacaaagaagaaaattctgtctcaaaaattaaagaattttgtttgttattgttgttctgaccatattgaaaagaggttcacttttaatctttcctttgaaattattaaattgtaaaaactgacccattgatgtctggtgggttatgttttgcttcaattcagcaatgtgtataaaagttcctacactgattttgaaatactaagatcagactttgaaaattttaaaaattctttcattcttacttttcagatatttgagagcagtcgaagtggtagtatgggtaagttaagcacttcttaacattgtagcagaaaattccaaaagaaagactagaacaaattggtaatttggagaccctttgccacttagccttctcttgtgatgatggcctgaa

SEQ ID NO: 12266 - DNA, 2711 bp, Homo sapiens
gtacagagcctgctctttcacagatcgttatggctccttcctcccagtcacagccctcaggaagttgattaaaaacctgcagtacaacagttttagatactcattagtgacttcaaagggaaatcaaggaaagaccagtttccatttatgcgaaatctgtggttgtaaattttttttttttacttgaaattaaatttggctctaaagttggtgtagcagcagttgatcagactgaaaaacggtttttagtctctggaaaaagactgattttgctttttttataaatattattagatttattaatttttctgtgctcaatgtgtaaattgtattataattcattgtgatttatttcacttttaatttgctggtgttttaataaatgggggtgttactgaatctttcttcccacttccatttcttttgaccaccccttaaccctcaactgtgacggtagtagtattatcatttataccaaagttttgcatagtccctgttgactttgtaatgttaacggagtcataaaagcactaggcaagagaaagatagaaatttgcttttaatctttttgccttttattttgcacattatgcaaaaggaaaaacattaaagaacacttttttttaagtgagtgaaaacatggtaaagacatacagtgcttttatgcacattgttaagctaaatcaaggtcatttataatcattttccttttttatttaagattttaagtaaacaaattttagaattttcagcatttcaaaaatgattttatttttcaagtcttaaattcaatattttacacctatgttttgaggctaaaaatatgaaattatataatgtatgatacagggttatcaaatatctaataatttttgaaattagctcttgtttttggtttttttgttgttgtttttacagatttcaggttacaaactgcaaagtttatgcataattaagtatggtatggttgccagaaaagcctaaaattactacttagaaaatttaagactgtttacccccattgtcttgtacttgcgagctaacttgtactattcttgtgaaagcactgtcatcttttagtagcaaattttgataatgtttctcgtggaaaaaaaaatcagtatctatctttagaacaatgtaattataatgtgggaagtgtgcatgaatgagagagagtgtgtgtgtatctgtgtgtgtgtgcgcgtgtgtgtgtgtcttttaatagtttatgccagcaatctttgcttgaatgtttaacgatgccttcagtgtgatgctggccaatagatgattgcagtttaaaatgtcattattgtgcaggcttggataactaacattccatgatgtagcttgtttctgatgagatgattgtaggtacatttttctcattatccaatcatctgtgggatacttagttttctaatgtgccattatctatttttattctgcagttatgttcaaaatacagtacatattttaaaatagaataaattgttaaacataaaattttaaaagtagtagatgtgcgtaagaaaactttgtaaaatagttatgagtcctacccagtagcaacttctggcattcaagcaggattccactatgtaaatatctgtaatgcatttataataagttgtgtagtttgtcctgcatccatactacactatttgctaaagtctcagtgccatctcctaatgagactgacattttaaaagtctgtatggaatatccttgataattcaaggaaatatccctcctgcctaagttccaaactgggaaacattcaaattatataaatgacatttcaggactttaagtatgaagataatgggaattttattgttttgctttttaaaatgagagcatttttatttgataattttttttaaatttttaatttttaactaatttcattattttaaagtaatcagtttttcaaatcatgattttgatatcattattctaaggagttatctcaaaggcacaaaatatgaattctgcaagaaggctattttttattgtagtttgaatgggttaggaaaagcctcaatttttcactcttaagtccttcagtacatttttctttcatcttattacttatgcaagttaaggttctttggtaacagaattcttgcaactgtaaaataaaactacatagatgtaagaagtcatgtaaacggttaacaagcttaccaaggttagcaaaactttcattgtaaatcagtctgtactgagcaaataaaaatcattattagttgtataaacacaaattccattttgactttcaggatgtcatactacttctgtacctagcattttcagtccttatatttgcaatgttacacaaactgtactattttcttttatgtgcagtttgcatgagtaaaccatcagagaataaattctatctttaaattatgttcataatttgcttgttctcttacctttccttcataaagtaacatcaccagataatgattttttttttccttcaggacatttattaactgagaagaacctgagattctttctagttctgtgataaaattcattcattccttttaactgcagggtacttgggccttattcctctctgcactcactttgcatcccatttatatataatgaattatataattatataattcatatgtaattccccacacccctgaactttagtcacagatccacctgcctttggcatcccttgg

SEQ ID NO: 12267 - DNA, 1252 bp, Homo sapiens
aagtgccgttcagccttttcctccaggggtgctttgtaaacacggctgtgctcagggctcgcgggtgaccgaaaggatcatgaactagtgacctggaaaggtgagtaacgatgggcagaggtcagcagggctggagactgtagggatacggagaaagaaggcgctaacatggcgacgtcgctcagcacagtccccaccccccgtttcccatcacctcgggtgctcctgacgtgctccttagcccttggggcgattgtggctgtgctgccacctcggcggcccgcgcggtgtgggctttgggaacctgactggctgggccggaccgttaggtaaccagcgttcgttgttccggcccctccctctcgcgcgctttcctaaggcagaggaaaaaggaataacggctccctcttagacccctccctccgaattatcttcaccctacttgggtcagttcagaggtcctcggggcgcgcgtcgagtcagccgtgtgcgcagggagacctctcccacccacagtccttgggttgggcggggagagggcccactctggtctccccacccagtattcaagcgattgaggaccgtgtattggtgatggtggcggggaggaggatcgggaggcgcggctgaaaatagaatcagggtccctggctgcggtgcagcttgaaggaaagaatggtgtggagaacctaggagctggaagtctcggccttttccgtcctttccgccaccctcacaatcccgctacccccagctttttcccggtggggcggggcttaggtgtgggtgcagactgattctggtattttcccttatttttttttttttaaatctctgggtggacagcagagcgtatgtaaagaaataatttgcttttcatcaatgccctagggaccagggccgaaagggagtgtgtgtacgtgttttctatgttcgctcgtttaaccgaacctaggaggaaaaagagaggaggagctgggaactatttttgtgcccctaggtagtataaaattggctttctttaatggagagtcttaaaactggtgaggccaagagcaaaactactgtgaatatcatggagtaaaagagattactcctgatggaccttaggcatcagaaattttagtgaaagaaatgtttctcttaaaattcaacacctattttaaatagtgatgtaaagcatttctttacatgtaccttcaggttttctaatgctttcctggctattatttaactggtactaagggattga

SEQ ID NO: 12268 - DNA, 1252 bp, Homo sapiens; identical to SEQ ID NO: 12267

SEQ ID NO: 12269 - DNA, 1257 bp, Homo sapiens
acagaggccacattacttgcccaggtcatagctagtaaatgtcagaaaatgaattttaactaagtctgacttcagagtctgcattcctaattgttaagctattttgggaataaaattattagagcacattccttaaaaggatcaatttattttatttaagacctaaactgtcagatcttaaaaggtatagatcatattttcagatggataagaatgtcagaacccatcaaaatgaatgaaaactaaccatttatattgacagacagctccctacctttacaccatattatcaggattgaaggagaatagtgtaagagagatctaggcaaatactcttccagcagacttttcagtttacaaaaatccccacactagtaatctgattctttaacatttaccaaacatgttgaaattaatatttcaaagtaacagtcatatgtggtctcttttagaaacccttcgctgaagcagcagctgttctcatatgctatcctgggatttgccttgtctgaagctatgggtctcttttgtttgatggttgctttcttgattttgtttgccatgtaacaaattactgcttgacatgttggcattcatattaattacggatgtaattctgtgtatcttactgtgactccgaaaactgtagtattggtgtcatgggaatgtacgttatttccaaagtcatttcattaaagatgaaaactttaatttcttctgtgatttgtacttacactaagtttagattatcacaaagaagaacgtgcattcaggcagatgctgtcccattcagaggaagctacagcagttgctccactgatgaaaaatattccaatgtaatttttatgggaattcttttatatagtgttctgcatattgtaattcatagggcttttgtttattcatataaaggataaatatttgggtgttttgagcttctataaaatatgattaattaaaggtagttaatactcaagatggtcttgagtttttaaggtctaacatcagttagaatacttcaaatcagaatcaccttccaagactgacttgacaggtggttctaaaaataaatcacgtcagctttttaggaaatgaagccttaagctagggggtaatgtgacttttgtttttcagtaagtctcacattaagcaattgtgtgcctctaatgaatcttccatgtcttttcagaacaggctcagtccaactagcagctagtttcttacttgaacaagactattaaaaaccaaatatcaaaa

SEQ ID NO: 12270 - DNA, 1462 bp, Homo sapiens
taagtgttggtgttccttaagttctacctagtgtcatcatttcttcattctgcatattctttccctagggtttcttcccaacaccaaaggacttaccatctgtctctctgaatctcagatctccagctttgatctgtttcctttactttagagctatatatttgcctgcctactggcctgtctctcacaatccatatattcaagaatgaacactatactttgcttcaaaccttcagaacattcaaaccgtttatgtttctcatctaatcaaatagagttactctctaagccagaagctgtaaactcatctcttttccctttattcaagctgtcaatttttgtctcctaaacatcttctagttatattctcatttctctgttcacattgcattaataatgatgataaacatttgcattcttattctgtgccaggcaacatgctaactgctgtatatatattattatatttgtactttggcaagaatcctgtgaagatttttatctttggactactagaagagaaagctgagttgtagagagagtatgtatttaagtccgtttgggctgctataacagaataccacagactgggtaacgtgatgaacaaaaatttatttggctcacagttctggaacctgggaaatccaaaggcatgatgctagcatctggtgagggcctttgtgctttgtcatcccatgccagaaggcagaagggtaagagagggcaagagtgagcaagagatggaagttgcaacctcaagctcttttataatgagcattaatccattcatgagggcttcaccctcatgacctaaacatctccattaggctccaccttccaatgcaacagttagcataagttttcaacacatgctttttgtagcattcaaaccatagcaggaagcaactttgcttaaaattgtatacctggtaagtggaaaaagagggatttgaatataggcaaatgacttcagaggatttactcttaatttctgttgtactgccttctaatcttggcctccatcatttcagattaccaaagctgtctcttaactggtttctttgtctccaaccttgtgcacttgctatctattctgtgtgctgcagcctgagtttttaaaaaacagaaaatgaggggccaggtgtggtggtggctcacgcctgtaatcccagcaagttgggaggctgaggcgggcagatcatctggggtcaggagttcgagaccagcctgaccaacgtggagaaacactatctctactaaaaatacaaaattagccaggcgtggtggtgcatgcctgtaatcctagctactcaggagcctgaggcaggagaattgcttgaacacgggaggcagaggttgcagtgagcagagattgcgccattgtactccagcctgggcaacaagagtgaaactccatctcaaaaaaaaaaaagaaagaaagaaaatgaatctgccacgccat

SEQ ID NO: 12271 - DNA, 1445 bp, Homo sapiens
gtttctttttgatgtcttttattttacaactgggccaaaggcacattatgtatataattagtttatatttacacactagcatataggaaatatttctgcacttgaccctatttgaattctgagcattatttataagtataaaatgatgatatataagtgaattttgtgctcttgtttgtattttattaaggaaaatgaaaataatctggcatcagtttcattttgctaaatatctagtcttcttcaaacagtatcttggtgggtgacttggctacctgaaaaatcttaggaggaatagctcacaatacaataaatctgtagattctgcttagagcaaattatggtacttttattcagacttgtttcctttctagttaacagaaatagtgacatttagaggttttaatcagaagttaggtttttctgattcaggaacatcgtaggccagccatttgtaatttttaactttgagaaacaaattttgtgagaataggtagtgggttgctggtagttaattggatttaatatttgtattaaggattaactggaaaaaatgtgtctcagtgctaattcttggacctttaatacagtgtgcttatctgttacggcctccttttatctctcttctccaatattaaaaaaaatggaaatcaaattattatgctgaagggaaaaatatacctgtataagaatggtgtgtttggctaatgtttctaagttgcacacagtttattaacaactgaacaaaacatttttatcatttaaaaatctatttttatgatttaatatctcatatgtgacagtttttttttttttttttttttggaactcaatctgttaacagtctgggacatccggtatagtaaccagagtttttgagcctgccgtattgggcttaaatttcaggtctgtagtcttgggcaagtcacctataaactcactgagattattttttcatctgtaaaatgggaagagttatgtttatttttgaagggtattaggataattaaaaataatgtaatgtgcctagcacactacctgaaaacgatggcatttgttcttattaatgtctttaaaatatgcaaggaccataagtttttcctcttgcagatgaggaaagtaaaaaataatacgaacatgtaattcagcttctcagattcaagccaatgttttttgcatcaacttttctatattgtatgtatgtatataaatacatagattaaggaaataggaaactgaaactctgtggaatataaactttttaaaaataatttcatcaggttttttgtatgttactgacccatatggattttagtaacatcttgcttagtcatgttgttataaaacattcaaattctgatatacattgcttgaaaatgagtgagtacctcagagaaatttgatagactcaaacagatagtatgagaaatatctttgaaagaaat

SEQ ID NO: 12272 - DNA, 1129 bp, Homo sapiens
tctgagctagtgatttgcctcaacaacgtaaacttcctaatgattagcacttaataattgcatataaaatgctttattaattaaacaagtgcacttgaacattttaatatttgtggtgagtaaattaaaaggagtttattaattaaaaaaaattatgtctgcagaatactttatattatttgattacaatgtattatttatggattttttattctttcctttataatgaatagttcgggtgcgttttgtttactcctaaaaggtttctttgcgtattttctaaatgtaatatctcggggaaaatattagaaaagcacgtattagctgaagaatgtaacttgtagtccagctctgcagcttccttaaacttaagaaaaagattgggccagtgacaagaatttaaagacaatgtccaagttgacaattatttttctatagtccatacaaattaaataatctggcaactctggcaaatcgccttgtaaaatgcgtctcattttttaacttgctttcgttttgaaccgcccttgtaatcgcctgaaatcgctagttctttatgcggtggctgccgctgtgttccgttattttcagtaggtgtcatatttatttgtattgcctttgttctgttcgccgctggttttaaaccagcttgctgtgtgcatctcagacgtcggttggtacgtcctccgctgttcttcaggaaagcgatagcctcacctatttgaaacaagccctgagaggaaacgcagaaaaacctgagtgtaaacaactccggaatgtcgctagctccttagtaaataaatgaatctctttctggagctagtgtctttgagcgccgcaaataccccttttccatgaatcactaacaatcgcctgggctcgcacgaaggaaaggactcgctcaaggcttctgtttaataagaaaggggtggggttacacacattccgcgctgtttaaaaaaaaaaaaaaaaaggccgcaggggccccttctttttcagagaggactggctagtctatcttgctctaaataatcttgctaagatgctctgagagctttgatcctcttaaaggactcaagttgtaggcccagtgggggacaacgcaaagtccatgttacaccacagctta

SEQ ID NO: 12273 - DNA, 1102 bp, Homo sapiens
taaaggcaggtcatcgtcctcatcttcctcctcatcttgctcctcctcagtcgcccccagccagcatttacagccgatggccaaagaccaccacacggacctgacgaccttatagaagtggggaccctgggcccatctctccctgcgcaccaggctgagccgaagctgcgggggcaggccgggcctgctgtcacctcgctgggctctaaggtactgtggggtggacctgggacaagcaggccgccctcggactaggttagcatcctgcccgagggcagccccctccctagagcgggatggggatgggagggggggcgggattctctctctaagtatattatatggcaggagctactgagaacataaaatcttggcgagtcattaaacttatgaaaatcaccgctcttggattttgaatttgcaaatgaaggttggatgctttatcccactgtgaatttggacattctcccccactccacccctccagggtgctttgtggcttaataatgtgggggagttgaggcagaaggttggccacccctgtgctaggtgctttcagtggaagccagagagctgggtcaggatttctggactttctgggttgtctatggaatttcatgtgattaaaaaatatatattttgctcccagtggccccacctccaaagaaatgggtctaagaaggaagtaaaaatgggttattttatgtttagatatttgcttaaatatttatttgttgggaaatgtggtacagaaataactgacaccttcatgccaaaaatcttaaaaaggtgaaaggggctgaacttcagggagcagaatcagagatatgtgcacttacttctgaactccacccctccccactctctggaaatgtatataggggggccttaacccttccagaaggaagcaaaggattcactcaaagttgcattcttgaaaatatatttccacatgtgtttttttcagcactgtgcttacaaccagttctgggtgattaaaggaaagggaaaaaaaccaacaaatggtccaacattttccttctggggaaagaaaacaaaacctctatgcactgggtcattagataatgactgaattttctgt

SEQ ID NO: 12274 - DNA, 1459 bp, Homo sapiens
aggtatacttttcttattactttgctaatcgtgaattccacttttatcaacacaattcagaacttgtttccaactggtaggatgaaaattgaacatatgtgacactcaaatgctcaattccctgttgaagaaatgaatgatagaccttatctatcatttatttgactcatgtgtacacccatgtatatcacagacatttttatttaattattcaagaattggcacatgagaagcattatctaattcctctgggaccttccactggcaaaaataaatgcaatgactgtggctaccagatgaattttgccctttttcttatatttgaaagtaatgactttattatttctgaatttaattatttaaattttaagcaaaacagaaaatcactacaaagaaaaaaatgtcaacaaaatcttactatgtagaagaaaccgaccccttccctcagctgccgccaagctgctcggtccttccgaggaagctaaggccgcgttggggtaaggccctcacttcatcctgcgactagcaccgcgtccggcagcgcctgccctacactcgcccgtgccatggcctccgtctccaagctcgcctgcatctactcggccctcattctgcacgacgatgaggtgacagtcacggaggataagatcaatgccctcattaaagcagccggtgtaaatgttgaacctttttggcctggcttgtttgcaaaggccctggccaacgtcaacattgggagcctcatctgcaatgtaggggctggtggacctgctccagcagctggtgctgcaccagcaggacgtcctgccccctccactgctgctgctccagctgaggagaagaaagtggaagcaaagaaagaagaatccaaggagtctgatgatgacatgggccttggtctttttgactaaacctcttttataacgtgttcaataaaaagctgaacttaaaaaaaaaaagaagtaaccatcattaatattaggtgaacatctttcttgacagctctatgtagacactcagatattaggagtgatcggtgcataaataacttggtacatagaaataattttataaaactggatacatattatgcatgctatttttaaataaaaatattaaatttacatttacttagacgtaataagagagagaaaccagatgaaactaacagataactgtttcttcttcactaagagagccctctagaagtatgggagaaaaatatttacaagtttggatttttttagcaatccaaatgtgttgttgaactttattaaagtgttcctaaaattaaaaatataacaaataaatcagttgggcatggtggcacacacctgtagtcccagctactggggaggctggggcaggaggatggcttgagcccagaagctagaggctatagttagttatctataattgtgcctgtgaatagccactgtactccagcctaggcaacata

SEQ ID NO: 12275 - DNA, 2217 bp, Homo sapiens
attgtggtagtggtaccaggaataaaaaattaaggaatttttaacttttcaatatttgtgtagttcagtttttctacattttagtacagaaactttaacaaaatgcagtttcgaaggtgtttccttgtgagttaacaagtaaagaagatcattgttaattactattttgtatgaattttgctaaagttaactgtaaagaaacacctgctgacttgcagtttaaggggaatctattctccccatttccaaaccatgatatgaatgggcgctgacatgtggagagaatagataatttgtgtgtttgcaatgtgtgttttagataaataggattgggtatttaaattagcatttgtgaatttaatagcattaagattaccttcaaatgaaaaaaaatctcaaaatttctatttggtttttgtgcattttcttttaaaatgtaatcatatgattttagtgtgttagacttgctgagtcctagctgtgtttagaacatctctattctacatttaccttggtcaaatttgaactgctgccataggttttgggtgtaaagaatgtttactgccctccatttaaattctgaaaagggatggtggatgttttccctctcctacgttagaaaccattcttaaaaacttttgaaaatatagaaccattaagcctgctatatctgagcaaattagtgggtaccttttttttcttatttaaagcacaagaggcccataaatcttgagttactttaaattcttttttttgatacaagttttcagagcaagagaataaaaatcatgtgttattaaacccctaactggctggcatgctttcctgtttgtattctatacattttgctggatgaaaccaaggatagttcaggtataattgtccaaaataacctaactgcagcagaaatgtagcacagttgcttagtacaggcttctcacttcctacagacctgaattcaaatttggatagtctgagttcttaaattcccaaagaacacactgttatttcttgtgtatatttcaacataaatcatgttgttaccaatttgtttggaaggccctggttgagaagagttttagttaataaggtcatatatacatatattaatataaaccaatgtctactgttttgctccagctagtgcttacagtttcattcgagccctgagtatgtgccctgctgttactctctttggtagttgaacgttgaattcaagtcttttgttttaagaagtactaagcaaacaagcaataaaaaggggaatggggtgtgctagtgtttgaatatgctctcttgttgctctaattctgtgcctctgtgcattaatatttggatgcatgcaatgccagcatggaaattggtcttcacacatactgcagttttccagaaacattcacaaaccaataaatgtaacagacattccatttgttaatgggcatatatgtgaaaagcagtgtagaaaataggctaatattagaaaatggttaagtcctaaataacttcaagtgtggttatataatggacactgtcaatgttcataacttaaacctgggtacctggtcaaaataatgcttgggaaacattaaaattgagctaaattgtctcaagttcttttattcatataaataaagtttaaaggaatgggggagattaacatttcctgttttatgtttgtgaaattgtttgacacaaccttgacagtatcctttaatggcatgaggttaattgtactgttaaccaactttctatgttctggaactagtattatagtgaaaacatttacagtaagttgatgtttacaacctataagcaggtgaaatctgtgtatgtgacctgtttataagttgtattagcttagctcttgtgaacagtgtggaaaagtaagccatgaggagagcgatttaaccacctttaaaggacctaagatgtgctttttaagcacagtgtggatcacagaaactcactaagacaggacttcagcagccttttgtgtttggacaagtcagcataaataaagaatgacaaggcagcagcaagagcttcaactacagagaagtgaaggcataagatactatgatgatagtgagcaactttccaaaagctagttaaatctgcttattacaactgaaatatcgaagaaagtctagcaggaaggagctcttcgccttttggaacatcaatgagagatagttgccacagtcactaggtctagca

SEQ ID NO: 12276 - DNA, 1613 bp, Homo sapiens
taaatatgtattggaaatgagaattatctctgaattatagataataaattatagagataagcctgaagataatgtgggtagggagtttatctaaatttatcacgtattatcatggattaactttgatttatatagtataaacttccttctcatgcagtgtcttaatattgaaaatgacaagctggttgagactaccatggttccaagtccagaagccaaactgacagaagttgacaattatcatttttactcatctataccctcaatggaaaaagaagtaggtaactgtagtccacattttcttaatgcttttgaggattccttcagcagcatcctctccacagaagaccccaaccagttgacagtgaactcattaaattcagatgccacagtcaacacagattttggtgatgaattttattctgctttcatagctgagcccagtatcagcaacagcatgccctcacctgctactttaagccattcactctctgaacttctaaatgggcccattgatgtttctgatctatcactttgcaaagctttcaaccaaaaccaccctgaaagcacagcagaattcaatgattctgactccggcatttcactaaacacaagtcccagtgtggcatcaccagaacactcagtggaatcttccagctatggagacacactacttggcctcagtgattctgaagtggaagagctagatagtgcccctggaagtgtcaaacagaatggtcctaaaacaccagtacattcttctggggatatggtacaacccttgtcaccatctcaggggcagagcactcacgtgcatgatgcccaatgtgagaacacaccagagaaagaattgcctgtaagtcctggtcatcggaaaaccccattcacaaaagacaaacattcaagccgcttggaggctcatctcacaagagatgaacttagggcaaaagctctccatatcccattccctgtagaaaaaatcattaacctccctgttgttgacttcaacgaaatgatgtccaaagagcagttcaatgaagctcaacttgcattaattcgggatatacgtaggaggggtaagaataaagtggctgctcagaattgcagaaaaagaaaactggaaaatatagtagaactagagcaagatttagatcatttgaaagatgaaaaagaaaaattgctcaaagaaaaaggagaaaatgacaaaagccttcacctactgaaaaaacaactcagcaccttatatctcgaagttttcagcatgctacgtgatgaagatggaaaaccttattctcctagtgaatactccctgcagcaaacaagagatggcaatgttttccttgttcccaaaagtaagaagccagatgttaagaaaaactagatttaggaggatttgaccttttctgagctagtttttttgtactattatactaaaagctcctactgtgatgtgaaatgctcatactttataagtaattctatgcaaaatcatagccaaaactagtatagaaaataatacgaaactttaaaaagcattggagtgtcagtatgttgaatcagtagtttcactttaactgtaaacaatttcttaggacaccatttgggctagtttc

SEQ ID NO: 12277 - DNA, 1144 bp, Homo sapiens
tattctgatattcttaaattagatagtgattgctatgttaacacagtgcagatagtatttgcacaatgccaggacctgtatatgctgtttttttacatggagtacctcatttaattattgtagccaacactttatgtattattactattttacattttacaaatgaggaaacaataagcttagacagttaaataatttgcctaaggtaagagaaggaatttaaattaacctctgaataaagacagagtctatgttttaagccaacccctgcataatatgctgcctttgttactatgttgtcatgttgtatagtctgggataagtggacttggtttccagtgtgggtggttgaggggaacccttcttgcttaatcactgtcttaccacttgttgctttgaattaggaagttatatttcctgagaaaatattagtagttcctggagatcagatttctttcttcctttgcaacagaatcgaattctctgggttgatgagaacaatttgacagctcatgtagaggctggcataacaggacaagagttggaaagacaggtatgttatttatttttcttatttttttaaattaacttattctaatatcaattctgatgttatttctttaatgaaagttttcaaaactgtatcccctctatgaatgaaataccttttatgatacattcattcactcaaagaatttgtttagtttctattatgggtcaagcattgagctagattctgaggacatgatagtgaataaggcattgtctgctaccttcaggtagcttagattaggacagaaagttcgataaataattaattatttggagtgaaaattgctatgtggatgctaaatgcagggtattatggatcatcaaatggggctaggtgggaacgagttgggcaaagaaggtatcacatagaacctggcattttttttgttgttgttagtactgagtcagtggcaaaggacacagcatttaaaatgagacttcaggatgagtctgagttagcaaaaaaggaaagaacaatccagaggaaggagcatacatgcagggcttctcagggtgactgttactttttttttttttattttttttgagacggagtctcactctgtcgcccaggctggagtgcagtgacgtg

SEQ ID NO: 12278 - DNA, 1137 bp, Homo sapiens
agtttaggaaattatgtacaatttctgtttttaaatttaagcaaaatgttgatactggagcatattttaggaaatggcccaaataagatagatggaaatagattttagaagggtttctttactggaaatacatacatacagtattggttagtgacttaataaaaactgattaggaaatgcgaaatggtttattaatagacctgtgagttgtattataactcatccagtaataaaaaaaatcctcaaagagattgtctatacaatcccttattcaaaatgctcaggaccagaagtgtttgagattttagaatatttgtattatatatttaccagttgagcatcccaaatctggaaatttcactggaaatcactgcagcatttcttttgatcatcatgttggtactcaaaaactctcagatttgggggcatttcacattttggttttttgcaggatattcaacctgtatatttttatttgtttctagtatactgatattttacttttctttataaaatttataaagtactttaaatctacaatgaagtgtataggacggaacaattccctgtgaatctacttcttagattgcatatcttaatattttggtttcttccaatccctcttttttcccccagaaaactttttacttttctacatgcagtcatcatctactgagttagtacgctggtgttcgtattccatgcattgttagctagtaacccagtttatgttatactatcactcagtcattcacaattttttttattttttaagtcagatttctcaagttgaaatgttattcacaaattttgatgctaaattttaacaaggggaataaatcctttcaataaaaaaattatcaagtcatcagcctttgagtagtagaaatagtttggcagcggctgggcgcggtggctcacgcctataatcccaggactttgggaggccgagacgggcagatcacgaggtcaggagatcgagaccatcctggctaacacggtgaaacctcgtctctactgaaaatacaaaaaattagctgggcctggtggcgggcgtctgtagtcccagctactcggcatgctgaggcaggagagtggtgtgaacccgggaggcggggcttgcagtgagccgagatc

SEQ ID NO: 12279 - DNA, 3752 bp, Homo sapiens
gatacatttgtttctttggtttaaaataagtttgttttcattctgtagtttgttttgtttctacatctatggattgacagatagtattcctaaatctctctcattgtaggtacatcattttacattcagcggttgtcatttcaaattttagtcaggcagcacaaagctgtcaattattccagaggaagctgctgccagctgttttgtattgttgcttcctcttggggaacaaagacagatttggtatcattgattgctcagctagcctctttttaaaagaacgtttctgggaatcagatgtctagggaaggattccactgaggagtgatacacgtgtacattgtttaagagcatagtctagtgtgagtaggccattaaggggaaggatattcatgaaagaatttaggcaacctgttatttagaaagccttcacgtctgtaaggtgcttggcctacttttttttttaaattagtatacatgcataaaaccttgtatcatcaatatacaaattattctgttaggggacatgtttttgttctccatgtttctgtttctattgtggtatgagttgtatttgtatcactgagataacctattgttatattctaattcattgataatatgttttgtaagaaaagctgacatccttcattgcaagtgaagaacaggtttaccatgaaatgaatgcctttattcaacttagagtcctaatgtttctgatttcacattcttgttgctgaaatgcagaagaaacagctacagcaagagcagaaggaaaactcttagacttaatgtctccaattgcaagaattgtttcactaaagaaacagtcatcattcaactactgaatttgaaagcctcagcagtttcaatgacaaaaatcatttttgattttttaaaattaatcccaatggcatgataaattttcatataaaaagtaaagtttcaatttagtttttaataatggtttaatgccttttttgaataactggtttaacctaattttttttaaatgtaatgtattaatgcatataccataatcaaaagtttgaaatatcctgtttcttaaataatgagaacattaatcacatttagcaagcatttgtacattcaaacctggatattaaagtgaaatgattactttgaatcactgtctgccaaggttcatgattcacattttgagatggattcttttcttaatgcaatacctaacttttgataattttttaaaactaatatttgatcagataatgtaagtcaaaatgcagacgatcctttaaaaggatgcattgtctgtgtatgtagcaacagctccaaagtatttttgggcagtttgataccttttatatctgaagtagccttaaccagaaaaatggtaatttaaaattgacaaaatgatatttttaagacttcaaaatgataaataatttttaactattaaaattggcctcaaactaataaatctgtaattaaattagaattaaatatcagtttaacaacaaaatgaaatatttattttttagaagctgcctctcttcattggtcatttatttttaattataaaatttccaacagatctttgctttaagcccttgatatttgacctagttggacacttgatgaggaagttgcctctagaattataaaaatctcagctttataaaatgcatctgttcacgaaggtaatttctttaattggtgatcaaaatataaaattaaggtactaatgtctcactggaagtatatatatatatatatatatatgtatgcatgtgtgtgtgtgtatatatatatatatatatatgtatatgtttctgagtaatttttaaaaaataaaacaggttaataagaagatccattcctttgcatgtgattgttataacattctttcccagggagttcaatttcagcaacctcagaaatccatacttgatattaggaaactgtaaatgtaacacctgaaattattatgttcactattctacatgaaccttatggaaattcatgatttatgtctttgtttttctttttccaagtatatgcaggactccccaaccttgattttataatggtgactgcattttgtaggtggaatcatttctaccgaaatcattttgaaacacaagaatattgatcagtactgtttcactctgatttagtaaatcagaaagcctccccctacccccagcccccactttcacataccttctgggaggtgcctcagtatagacttggtatctgtgaaggactgagttcatgaatatgcacagaagcacttaaaccatgcctcttatttctataatatctgaaaatggcttcataaaagttaagtcaggagaacactgtttacatgacacttcttaactcatttttaatgtttatttttaatttcaaaaacttgttgcctatttggttttcagtactgcataacactgactttcttaaattagtcatagttgcaataatttacttaaatttggtaatgtcacatttgggttggggtttcagtgggaatagtaacttgccgctagtgagaaatggcattgaatactaaagactcaatatgaacaggctttatagacccttagagaaactgttgccttaatgtttggtgcaatttctagtagtgcataagtgaatttagtcttatgataagtaactttgagctgtttttagcttagtaagaattgtggaaaccacatgtttattgtgcccatcattttacacaaagaaaagaggattatattatttcttctaaggaagtaggagttttcttcctaaaagtgcttacatattgtagtactattacttaaaagttatttatgaagttgggagccttctagtttgcctgtgttgatgtattttgaaaacaaaattgcaataaaggatgagcttccatcggtgtgtatggtataccagatacagatggttgcaaggaaaccttttcccccactagaatagtctattagtaactgctaagtcctagcttgcatttttgaaaatgcctttctgcatgttagcacccagactttcctttgtcatattcctttatagctacaacttaactgtagcttatcagagaagctctgtagtcctacactgaagtgtgttcccttggctgttcatatggggctgggtttggttgaacttccattctgtataaatgctagaacacagttactacagattgattcacaaactgcatgtgctggtgcttgaggcagccaaaatggaatgctgtggaaagcatatctatatcttaaaaaacactcagacaggagttaaggacagctttaataatttttttgtttaccacttaatctttatcaactttgattttagttagggcttagctcatggttgaagaaaagtggaaaataacaagtgcccatttaggtttgaagaatccagaatgttttacctttgactttatgagttatagaagcttggctttgctctaggcttcatgttcccaaatgagccatctgtcagtatattcacttaattcttactaatttcagtttcctgtaaaggaaacaacttacatattgatgcttaaatccagaaagtgtaaaaggttttcttaaactgttaaaatatagtgtctgatataaaggatgtaagttactcagctttctgctccctaagccaaacagtgtttgtcttcagtgtgaaatttaactgtaaaaactacttgtaatgtcaagagattatagatcatattattaataaaatggacctgggtctaatat

SEQ ID NO: 12280 - DNA, 1178 bp, Homo sapiens
aggcctggatttagcagtggcattggaatgaagtgaaaggaataaacccctaagtagaccgagggcggagttcttcaaatgaacaagttctggatgctaagacctaggttgctatgaagtcaaccagataaatacttattgtactccaactgtgtgccaggctctatgccaggagctagatatataatgaggaacaggaaagacatgtcccgagggcttgttttcccccactgtggaaatcttacatgtaaatatataatgcaaagtaatatcagattatgttacatggttttgctactgaattgtgtgagcctggacaagttacttaatacttgcagcttcggtttcattaactgtaaagtaggaataatattacctactaaataggtaatacatattattttgtggttggattagttaagcttgatagccgcctaatagctacgcaggagcatgactatcaagtttaattaattcacccattcacttaataagtatttttgactatctactatgtgttaggcactgtgttatactgaagggatgtagtattgaacaaaataattactcttcttcccccacagagttaatcatttagccttatatagttatgctcatataagataatatatatggagttcatagtttagagatcaaatgagataatatttgtataatggtataattgagattaattttcttgttccctttgactatggtatccactcccccaccactgatattatacagttgtgtgatgactactgagagtcagggattgtgggttgtcaccctggatttagcactaagatttttataatttctccttgtattacattccatatctgtagtgagggttctgtttaccctgaggctgaacaactctaggaagtatcttttcttgactttccatttctctttttcctacccacaacaatcaaggtaaatgaaaataatttgatagtgtgagttttgttgatgagaggaactgcaaagcaatattatttgcaaaccagtgccatctagtggaaaatgtgtaattttcttaaattgtcctgactgggcaatctctattctttgtgaaataagactactgattggtgtcctgaaaattttaggctgttattgagaacagttaattcttttctcaaaaaaagataaaagattgcataaaacaa

SEQ ID NO: 12281 - DNA, 1302 bp, Homo sapiens
ttttttgtttgtacaagcaaaacaaagattgcgagtggtgtagtataccatggaggcttaaaaagaaagacaataataagaattgtattgtttttacaaagggatccactttatacatattggacattaatcgtcatccttgaatgtgtcattacagatgaactgagcgccaatggacaatatcaatgtcttgctgaactgtccaccagccccatcacagtctgtcatggctccggtatctcctgtggcaatgcacaaagtgatgcagctcacaatgctttgcagtatttaaagataatagcagaaagaaagtaaatctggagcaacttaaaaaatctttcagtagcacataaaaagttcccctctggccccttcccaagtaaaacttttaccgtagtgtttatgtcttgtttctaaatctcttcatagattccatcaacactccagatttaattatctcctcatagttgttattaagctctttttaatggcttcaactttgtatcagtatactgtatttataaactttgtaccacaagagagagtgtagcacccattttacagtgccatgcacatcagagaaagaaactgcatgtttgttgttgatgatgaaataaaaatgctagcgacagtctttcttactggtgcttaagctcttctttgcacaaagctttataaagggaattcaaaggaagccctttagaattagagtcttgagggacagcactaacaggcctttattaagtatgattgattgttaaatttcagggaacatgattggtctgctgtgtatttgaattcatgtaacaaagaactgttacgatgggattctgctcattttattaaaaagctactgacttgactgtcatcctgttcttgttagccattgtgaataagattttaatgttgataattctgttatttacatatctctaatttactttgaaattcaaaggtgaaaataaaaaatgatggcctaagtaaaatttacaaacatacatgtaatgggttacttccttactttctctaagcgtatgcaaccttgtatttttctttgacataaccatacacaggtgaattactagtttaaaaagcatttgaccatgcatgttggctcatgcctataatcccaactctttcggaggccaaggtgggaggatcccttgaggccaaaagtttgagaccagcctgggcaacatagtgagtccccatctctaccaaaaagaaaatcaggtgtggtggcacactttgagtcccagctactcaggaggctgaggtgggaggattgcttgggcccagaag

SEQ ID NO: 12282 - DNA, 1384 bp, Homo sapiens
aacagcattaaaataggctgaaaaagcaatagttaattaataaagattaaattcaattcagcaaatatttattgactacctattatgtgccaaccatgattctagcagtgaacaaaacaaaaatctctacttcaggcaatttcatcatttatcttatgaattctgatgtttctccttgtggctgttgatactctagtctaaaagttaagttttcctgcatgaaacaaacaaggaaatacaaaattagccagaagctaaaggaatttcatgtccctgaacaggaaatttaaaatgttctttcacagaggactggagttaatattgacaggatgtttaacgtttttatcaatgtcttcataggacctgttcactgttcaaaaaatacacttaatggagatttggcatcagcaaccattcctgaagaaagcagacttatggccaaaaaacaatctgaatcagaagatactcttccatccttctcttcctgaagaaactgaagtgtccaacttcctctaagtattgctatgcaaaagctgctgtaattaaactattgttatagggagtagttttttcccttaggactctgcactttatagaatgttgtaaaacagacaaacaagaaaacaaaccacatacttttgaagtgtattttatctttatatagtttgtttgcaagagtattttcctaataacttcacagtatgaatgtgcatcttttttttttgaacaaatgatggtgtaacattttgacatccataaggacaaatgtagatatttttcttaaaaactctgaggggactgacagcatggtcagggtgtattgtagcttataaacatgaaatcttataaggtttcagtttgacagaagtgtgatatatgtaacttgtgccatggaccaaatggtcactttaccacagctaaaaatgagttacgatagcagcttgatggtgattgtattgtattcctttaatcaaaaaggaaacacaatattctaagtatctttagcccaaataccatgacatattgagcatctttaaataaccagactgtattgtccttcatatgtgaagttgacactactgatttgtcaataccaaattttgggttaaagtgtttaatttttatgtatttattttcttgttgcctcaaaagatgattgcattctaacttttgtgacctaccaaatttaagatgtgtatacgttgttctttacgttgttctagaaaagagattttaatgctgtagtgactttgctcacttacactagagaaataaacaactttcaatggaagagaattttagtgctttttttttcctaaaatagatattaagctgctgttgtaaagtattgtttgcagctctttccaatatctagagacatttt

SEQ ID NO: 12283 - DNA, 1522 bp, Homo sapiens
caatcacattcaccgtgaaagtgctagacactccaggcccacctggcccaattaccttcaaagatgtgacccggggatctgctacattgatgtgggatgcccctcttcttgacggtggtgcccgaatccatcattatgtggtagagaaacgagaggcaagtcgccgtagttggcaggttatcagtgaaaaatgcactcgtcagatcttcaaggtcaatgacctggccgaaggtgttccgtactatttccgtgtttctgcagtaaatgagtatggtgttggtgagccctatgaaatgccagaaccaattgtagccacagaacagcctgctccacctaggagacttgatgttgttgatactagcaaatcctccgcagtcttagcttggcttaaacctgaccacgatggaggcagccggatcactggctacctgcttgaaatgagacaaaagggatctgacttctgggttgaagctggtcacaccaaacagctaactttcacagtagagcgtcttgttgagaaaactgaatatgaattccgtgtgaaggccaagaatgatgctggctatagtgaacccagagaagccttctcttctgtcatcattaaggagcctcaaatcgagcccactgctgacctcactggaattaccaatcagcttataacttgcaaagcaggaagcccatttaccattgacgtaccaatcagtggtcgtcctgcccccaaagtaacatggaaactggaagaaatgagacttaaagagacagatcgagtgagcattacaacaacaaaagacagaaccacactgactgtaaaggacagcatgagaggtgactctggaagatacttcttgaccctggaaaatacagctggtgttaaaacatttagcgtcacagttgtggtcattggaaggccaggtccagtaaccggccccattgaggtctcatctgtctcagctgaatcgtgtgtcctgtcatggggagaacctaaagatggaggaggcactgaaattactaattacatagttgaaaagcgtgaatcgggtacaacagcttggcagcttgtcaattccagtgtcaagcgcactcaaattaaagtcactcatctcacaaaatacatggaatattctttccgtgtcagttcagagaacagatttggtgtcagcaaacctctagaatcagcaccaataattgctgaacatccatttggtaagaaaaataaaaatcctatttcaaagtctctattattaaatgtttcccctgaattttataaaattgtattcatacttaatacctttgtttatatttagtcccaccaagcgctcctaccagacctgaggtctaccatgtgtctgccaatgccatgtctattcgttgggaagaaccctaccacgatggtggcagtaaaatcattggctactgggttgagaagaaagaacgtaatacaattctttgggtgaaagaaaacaaagtgccatgcttagagtgcaactacaaagtaactggtttagtagaaggactggaatat

SEQ ID NO: 12284 - DNA, 1239 bp, Homo sapiens
cagatcaaagtgatcttctacatccatgcacctccacatgcttaattctatctcctccccctcaactgtaacaaatccacaacacctagatattcactaaatcacaaccaccacctgctcctagctaagctttccattgaaaggcttacttgttctgggagaaaacaactcacagattgggatagcaatggttctcattcttgactgggaagtgatagcagaacacaagggtacacataattctagatttatctccatttagagcaaaatgtttctgagcccattaagccataagtccattgggaaagaaggtggtggaaaaggaggcagtaaactttcttcactttctgtttatgcccagtttacatcaactagacccagcaagtatcaaatattatccaacaacattaaagcacagaaataagtataaataactcaactttaatggtggcctggctctgaagtggccgttcctgtaggccacacatttacagaccacaggcaggtgcaggatggaccatggctggaaggaaaaccagaggggaagagagcaagagtggctacttggattctgttaaacaggagggaagcaggaactgacatctgataatgatgttcatttcagcggtgtgctacaggactgtagagtttcagctcataatttgtgttccagggagttacttttggctagagaggcgtcgactcttcggggttgaaccggtagtgtaatttgccctctacttgatagaatggccacttccggttcctatgctgctgcttacacgtcaatcacatcttgttaaggaaaaccgtcagagcacgttggtctccccaaggctacaaaatgtggattcatggttatggaagctattcctttacagtctttccttaaagtgatcttctttattcctctttctctcttctttcctcccctccccctttcttcccgttttccctccttctcttcctcctcctctacttctatttgtaaacctttgtcttgccaaaatcctccctctttgcagtgatggttgggctctacatttgctaaagcgcaagtggagcaggctgaggggttttcccagccccctctggctccgtttctagctccctgtagagctgtgacatttatgaagctgggtctccctgttcaggcccttccagcaggaattctatttatagggactgcctcatgatgagactgtgtttggagccagccggccgggatgacaaatttcc

SEQ ID NO: 12285 - DNA, 1206 bp, Homo sapiens
aaaaggaaatagtaggccaaaccataattaagcccaacactcttatacttacacttgcgtgagcttttattgaatctagtgaaaagactaattattttttgtattatcctgtttccaattttgtggatcacttcatactaaactgaagacaaactcctatataatccttatgtcccctttgtatgccaaagccatttttattagtgatataagagagtggagaaaggaaaatactgataaaagtaaacagaactttaggaaaactttttctgagtaaagcattgtttgcttattggtttatttatttttaattttataacaagctgaaatataaatataagttaaacagtgaccctggaactttttctaatgttctgcaggtaacaaacaaactacctgctaggaattttcttttctttttgaagattctctttaaataatattttaaaaatcagttattagaaattgaattagagatgtaaatgatgtggatatgacccccttattgaattatgtgcatgtaggagtttttgagaaatgaaaaattactaataattgcatggctgatcattattacaagattatttcaggctcacagacataactgtcagttgggttattctcacctcgaacactgtgctataatttaggaacactgcccctgattggcagcagcagatgtccatcaggttgttctaataggatgacagaggccttccttgcatttccaaaacatgtcccatgctcttcagtctctctctcatcattctgtttcacttataattggatttcatatggctgttgtaataaactacagtcgattgtgttaatcaaatagttacattaaaatattaagaatccccaaattcaaaaatgatagtttggagaagacttgaaacagaagataagtaccgtggtaagcttctatgtctgatacttttccttaattagtttattctaaacccaatccaaaggtggatatattaaaatgctcatataaattgtgataattactgttgaatcttagtgctaaaacaagccaactatttgtctaccactatagacatactgtgacaggataatcaaatatattttgccattctaaaatttgtttctaagattattttcctgagcattttaacatcacgttaatcatctctctcaatctcccactgcctctatggagaaaaagaaaaaagacagacc

SEQ ID NO: 12286 - DNA, 1761 bp, Homo sapiens
ttcctgtccctacttgaccctcaaaggcaaccactgttcctttttctaccataagatttttctgttctaaaactttatataaatagagtcacgcaacatgtacgcttttctacaaggcttcatttttttattgctgttcttttttattgctgagtagtattccactgtatgacaatattacagtttgttttcttaatttcctattattgatagatacctgggctgtttccaggattggccattataaataaagctgctatgaccattcttacgtaagtctttgtgaacataggttttcatttctttgcagtaaattccttggattagaattgctgggtcacagggtagttttaaaagaaactgccatacctttttccagttcagttttattgtgccctgtattttgtattttgatgtgcataaaggtgtaaactatttttatgatccatattgaagtattagaagaagtgagtttggaataacaatggcattgttcatggtcaaggatgacaattggaactatctgaggaaagcaaagacctgtctgccccagacagctcctcaaggggttcctatgcctgaaactttagcaatatttcactccttgaaaggttaaagcccaaccatggtgatatgttagctagaagaaacagcactggtttgtttatgttactaactttcaccacccgttttcagtaggtaaagtaagactgatcattgaacagaaaaggttatttctgtgatgaggttgagggggtagtggaaagcatgtattgctagtaagccccaggtacagctatgtgagagagagtcacctggacagggaagtcccccaaatggtggccagaagagcagaaaacggggtgggaaaaattctacctcacagttttgcataggggatagctatgcttttacgggacattttagcgtttaaaaatattttcaatattgtctctttattcaataccacccagctgtagttttttcacactctgatgactctcttatccactcttttacctctcccagctgttctattacatacagcattcacctgtattagtctatagaattataatcatctgtgtgtttctaatgctcattttcaaaaatatgtatggtttattcgatttttcctattaaaattttaagggctgggaaatttggcttctactgtaaatccttataatgttccacacattgtaaatatgcaataaaaatgttaacaactataatggcagcaggttttggtatgtatttctttgatatattgtcactttggacaataagtttgatttctgttaataaaagttgttcataaaatctagggagaattaagtcacactggtctctataagataatctgatgaattctgcatctttgaatcaatttgagttattttttgtaaaggtttaaattgtttctaacagtgttacctaaaacctttcattaaatcaaaaatgtaacttgtatattctgaaataacctggagtcttagaagacagaggcttctgcttccctctcccgtgaccccaacaatcccttcccacaggcttggcacagaagttcagtgctttctctacgtctcatgttgtcagaaataggttctcaccataatagacagtggtgaaatttccattgttcctactgagaagtccatttttaaggcatcaaaggtgaatgtgtatttagggatggaggaggcatattacaacaaagctgtatttaaaataacacaatcatatcatgctataaacaat

SEQ ID NO: 12287 - DNA, 1309 bp, Homo sapiens
actcctcctttcactttaatatttagaggccattgtaggattattgattggcctaatttcagtattattgtgtctcctgggatagagaggcctgaggagaaggagagagacaggagaagccccagtcagcggagcagtcagaatacacacaatatgtattgattaagttcgccatcttatatgggtttgattcatggtgcccccaaacaattacagtagtaacatcaaagatcactgatcacagatcaccataacagatataataataatgaaaaagcttgaaatgttgtgagaattaccaaaatgtgacacagaaacacaaaatgaacacatgctgttggaaaaatgagctgacaaacttgctccacttaggattatcaccaaccttcaatctatgaaaaatacaatatctgcaaagcacaataaagtgtattaaagtgagatatgcatgtaaatatacctaaaattcatggcaaatatatcgaggcaaacagattaatatagtggggactagatatggcaagtaggttttatttcatgggctagctttgattgatagtgaagactgcctggaagactgcattgagaagttagttggacgcagcttctggattagtgggaaaggatactgtgatcattgagcagtgtttattgttatgagtaggagtagtgatggcgttagtgcctgtatttgctgtccctggtgtagacagaatattcagaatgctaaatagcacataggtgggtggcttttaagtttaaagttaggttttgcagggagagatgtggatttgaggaaaaatggctggtgactctttggaattagcagtcagattggttcagctagaataaaaagtctgtagtgcgttaaggagaaaggaggttggtggaaaaagtgaggaaggggttgtagaaagccttaatggatagatggagtagattaggttttcttttttagctcctaaattttttttctcattaatcctctacattatttccatagtctttgtcttagttcagttcctggtcatcctttttattttaaaagttaattattttttgaatagataatacattaatatgtttcaaattttattttttattattttatttttttttcgagacaaggtctcactctgccacccaggctgaagtgcagtggtacagtcagggttctctgcagcctcaaccttctgggctcaggtgatcctcctgcctcagcctcctgagtagctgggactataggtgcatgccaccacacctggttaatttttgtattttttatagactcagggtttatgccatgttg

SEQ ID NO: 12288 - DNA, 1173 bp, Homo sapiens
atatgtgtatatatttatctttctatatgtgtgtgtgtaaaaaaagttttttaaaaacctcctacattgtataatgatagaaatcaagtttggtacattattacttgaccctactcatttcatttagatagcacgtagcctaacctaataaatgacatcaactagttacttggttgtatttcatttagtaatttaatatatgaaaaatctgaaaaatgactaaggattttacctttttatctttaagcaatgtgttctcttttgtttatttttttcctttttagaactctgcagccattctttgaaggattattaccccgagataatccaagaaacactcggtttgccatcaacttctttacttctataggtcttggaggtttaacgtaaggattattctcagaatttatgttcagattataaaattatctcataattgtctttgaaatagaatctaacagattatattttaaattagggatgaactgcgggagcatctcaaaaatacaccaaaggtcattgtggcgcagaaaccagatgttgagcaaaataaatcctccccatcctcttcctcttcagcgtcctcctcttcagagtctgactcatccgactctgattctgacagcagtgatagcagttcagagtcttccagtgaagagagcgactcttcatccatcagtagtcatagctctgcctcaggtattgaagcttatgtgtaatttggcttgctcttttctaataaatatgttgctgatatatatgaaggaagaaaataatttgattgtttatttgtcttagagatcagttgtttaaaagccacaattaatacaaatggtcccatctatcattcttgcagtctgtaatacaacatttataatgctgggattaccttttgacatcctcatcatagaaatgaaaatatttcattcgcagatacttatctgagtgatgactgatatgaaccatccattcataatgtttgtaatctagtttataggagctatcctgatgtttttattttaaataaattttagttttttacttttaatattaaagctgtttgtaattgagatatatcatacattcattgtggatctcagatgctatatgaatttttataaagggaacacatcctcatagctagcacacaaatcaagatataccggtacccca

SEQ ID NO: 12289 - DNA, 1209 bp, Homo sapiens
atggatccaattgtgaaatgatatggagagatagagtaagttcaatctagcatatatgaagtaatttggtaactgacttttcttttaacaagatcaaaagctaacctgctttacactttcatgtctaaggacagccaaccagagagatggcttcacacactagcccactgctaagtgcttttcattcactttcatatttcatcatcaaagcaccctcctgccttatttatagatggggaaacttcaggaagttgagatacctagatatttgcattcctgtcttcctttcttcattcaggtttttctttcattgccacttcctcaaagaagcttttactgattcccatttaaaatagcaactgacttcaactccaccaaaatcactgtattgcccctccctctttccagagcatttgcctatcaaatgttatcttatgtatttacttgtatagcttaattttaaactatctatctctaggtcttctgagcacctgagaaacagagacaaagttgtctcttctgtgtgttgctgttcctctggtgcttagaagacctagaggatcctcaataaatattaactttccaagggaactgaagagcactaatgtgatgctaaagcctgttgccttaaccactatgctataagtcaaatcagttgagaatggagaggaccacaaattattttcagtccagcaagtgttataaacattaattctataaaaagaaaacaattgaaactaatttcttattatattgcatggcaccaaactccccccacttcctttttgaggatcatgagttgtctgtcattgtttctttttattgatatcaattggttaaatataatctggaattggaataaaagaaaaactattataggctttttccagaccatgtatttcaatgcatattattttttcctttctgttcattattctttcagtaattgcacttgttctatttttagtgttatgtaaaattactgtagctcataatttctattttgaagggttcagtgtataaacttagcacatcaatactatctttttagtgttcgcgctcaatggtgtcagttaagagatcaccatcacttttggtgacgtcaatgaaggggtattgcaatgcttaagagaactgttaatccctttccactggtgtcactaacaattgtagtgcttgtttattcatagcaggtacgtgactaagtaa

SEQ ID NO: 12290 - DNA, 1200 bp, Homo sapiens
ctgagtggaagtggttggagagaagttgaaagtaagctcctccctcgcttctctgaaatcagcttgttatctttattgttcctcctaggacaattgccactcctaggacaaggataacagaaaagctcaaatttcacaaaatgtccctcagttccttttaatttctgctttaatctgttcattccttattcttcatcatctgtcttctacttgttttagctgctttacagggaatctcttaaaatgacaaaacaaataaggtgaggaatcacgtagggaatctctgactgtgttcgttggggttagctcttttctgcaactctagcaacttgagacaatgaaccctttataagggctatttattccccagtacacatgtgtaaacatggtaaaataaataatggtttccagagcagaagctgagaaaaaagattttatcacaggaaatcagtaatatgtattcatttataatgtggtgtggactatcaatttattttatattttcatgtttccttttttgccccctttttttgtagtgtttcagaattgttggaactttatgaggaagatcctgaagaaattctttataatcttggatttggacgtgatgaaccagatattgcttctaaaattccttccagattttttaattcatcatcctttgccaaagggatagatattaaagtatttttgagtgctcagatgcaacggatggaagtagaaaacccaaattatgctttaacaagtaagatttttaagtgttaggcatattattttcttaaattatagcatctacagcaagatggtcttattttaaagccttaattttcaggaatagcactggaaagtaaagagattgattaacgcaaaagccatttttacatgttaaaattaagctattttattactccatttatagtggttaatttgcctatttttcccctcctccccaattcctgacttaagtgctaccataacttatttgcagaaccttattgttgtctacagattgcttttattcaagaagaaaagaagtaggagaggagccttgttaatcttaaatgaagtcagtctgtttcaggaactagtctggctaatttgatcagtttcactcatatctttgcttgttttctttctgttagccaaagattccaaaaataggattccaatcctgcattgttcatggatcagttttaagag

SEQ ID NO: 12291 - DNA, 1210 bp, Homo sapiens
ttcttcccattttaaatgtgttaggttgaacaatatgtctttagataccttgctgtcagttggcataaacaggcagtatacctgtatactattttgcctctaaaagattttctcagcaatgagagcacttgtgtctctgctgattaccttacaaagttagacaatactaaaaacatttaagaagtccttccagattatttttttgacatgaggtaaagtatttactagaagttttttaacttatgaaataacattttctaatgtcctcaccttatgaattgtgatatttgtaatctagttagctgaacaattctagaccagtccttgggagtctgatctgggttggatgatagatggactcgattccccactccctctctgtattgcagggagattcacatgaaggtgaaattaagaaattgaatgctatttgtattttttccaaaaacaggaaaaaatgaattccattcatattggtaaatttttgttttattgtttttccaatctagattaaagagtctattgttggggaaatcagacgggaaattgtaagtggacttttggcagcagtatcttcaagtaaagcgtctaattctaagcaagattatcattaaacagaaattataggtaaatttttctgagtttctttgttgagctaaatgtaaatagtaactggcattttattctttgttttgttagtatacaggtttggttctctagttaaattttgagttttagaatgtatgtaatatgttattttacaatgtgaaaatttcacacaagcctatttgaagtgtaagtcaaatcccataatacaaatctccaaggaattacttatattgggtcattctactgaaatttcattatagtaataaatcctggaattggaccttcaaacctgaatcttattttgattataatggtatttcagatgtatagttttaaagaacaagattttgtgaattaatcacaacttccttttttttttttttgagacagagtctcgctctgtcgcccaggctggagtgcagtggcgggatctcggctcactgcaagctccgcctcccgggttcacgccattctcctgcctcagcctcccaagtagctgggactacaggcgccagccactacgcccggctaattttttgtattttttagtagagacggggtttcaccgttttagccgggatggtctcgatctcctgacctc

SEQ ID NO: 12292 - DNA, 1198 bp, Homo sapiens
aagacgtacatagaaacttaggcactttgctatttcttttctaaactatcaaaaactctagcagtttgaaaagcctaatatttatttgtatgtcagtatttttcatttgattccctattagaattaattttaaaacttgaagacttccagacttatccaacttataaataacatatttcttcagactaacatcttaaaacactgacctctatgaggtatttactgtgcaataactgattcatttttttcagagcttgaagcatccaatgatttttccctccactgctgttaattaatgtcacttccaagaagaaaaactgttctgttgtaaaaaatataattgctcttaattcttggggaggttactaatagcagtaggatagaattttatgaggttacctacaactacttaatgtacttacactgtaagccttgttgctttacccaagacaaatgtaattttatcattgcttatgtagtatttttcttttggaaatgtgccttatgttaaacactatgtacttttactttttgcattgtccagacttctttattagatggagatgtttctttttctgtcttctagactaaatagagtatcatccaaataatggggcctatgacttgaatgaatagaaatgaataagctggtgtttgttttttcaaaatggaagtaatttagatttgttctcctcatacataaaatgattttagttcagttttaaccagtgaaaactttgtttttatgaaaaaaaaggaaaatggtttcccatttggttttatatgtgttaaataaatgtgtaaagtaaccaccaaatgttattagaatttttcttctagcatttataattttttcaactcctattgtgtttctttgtgtgtgatattttaatcaaaagtggttgagttgttaacagtgttctttgaaagaatctctaaaaggcttataaatgtttgaaatatcacacaaaggctgatttctaaaatatatatatattaaaacaataaagtatttattttgcctaaagtgttttagtggtttcttaaactgcaacatgaagattttgaattagatttgataggtaacaaatgaggtccaaaagaattgcagcatataacccaatagagtgatactctcttttcctagggaagtgttatgatactttaaaaaaacaatgctttaaaaaatgctgtttaa

SEQ ID NO: 12293 - DNA, 1106 bp, Homo sapiens
accatattagacaataggttctactgtaatccagttcaaactgcagaccccaatagacaaagccttacaacctacctcaagaatattttttacgaatctgaaaggtaggaaagagttatgagtctgtattttcttggttccactgaacaaacatgtttttctagtgtttcgctatattagttttctcaagatattttattttgaaaggtgtaacttttatctcattaaatatttgaaatttaaaaattgtcataatctaaaatatcatacctgaaattaagttaaagagaatacccaatatgcttgaaattatgtaaacctatatagttagtaatatctgctgtgagcaggtaagaactaggatattcttttcttttttattgttatattttggcaaagtatatttcatgtcatgatccattaaataagaatattgagtatttctgaaaaagtaaaatgttggtttgtggtatttcaccttatttttaacattaccaactcatactttctcctttctctatcgcctttacattattattataggatgaactttgataatgttgaagatgaagaaaaagtttaaaagaaattctgacagatgacatcagaagacacctatttagaatgttacatttatgatgggaatgaatgaacattatcttagacttgcagttgtactgccagaattatctacagcactggtgtaaaagaagggtctgcaaactttttctgtaaagggccggtttataaatattttagactttgcaggctataatatatggttcacacatgagaacaagaatagagtcatcatgtattctttgttatttgcttttaacaacctttaaaaaatattaaaacgattcttagctcagagccatacaaaagtaggctggattcagtccatggaccatagattgctgtccccctcgacggacttataatgtttcaggtggctggcttgaacatgagtctgctgtgctatctacataaatgtctaagttgtataaagtccactttcccttcacgttttttggctgacctgaaaagaggtaacttagtttttggtcacttgttctcctaaaaatgctatccctaaccatata

SEQ ID NO: 12294 - DNA, 1435 bp, Homo sapiens
tccattccttacaatggatcttttggaatcttgttttccttatgtcttgctgagaaatgcataccatgctgtctacaaacaaagtgttacatcttctgcataaaattacctacttaatcaagataagcacgcatttttgttgccttggttttacctgtagactgtggaactattttaccttaagacctgaaaaagttttgtggattataaatttctttcatacggttgtattttctgatcattggtttcttaatatggttgtactacagtatacttggttgatttaggttgcacattcactgaattcactgagattattcctataattttaaagtatcatttatttgaaaaacatacattatcaacatgtttttgatatttgataatgaaaaaaatctttgcttgtttatttctgaaaaagaactgtatttagtgattattttagatagtgatattatagtattcatctgtgtgtaaattatttcatatagggaagagttctgatctgtacctatggttcttattgaaaacaacattggatgtgcatttctgtgatgttatgaatacatttctactttattttgaaacatttgccaaactaaatactgtaacactgtataacatttaaaaatgttaaagaactgcttagtattagaagcagatcatttcccaaaattctaagagcagcagcatatgttgttgcttgtataaagcctagcgataatttttagactaacttccatggtgccctgttggcattagcactaccattgtaccctgctgtataataaacaatcttagacatttatcaactgttgatacaaatgttagtccctaaccactttttatatatgttttaaatttttgaaattcaagtgtacctgccataacataaaataaacactagactgtatcacacttcgattgatttctttaagatccttggatattcgttcaataataataaagtttttgtttaaacttagtttgaaatataaaaaataatggtttaggaatgtctaagtacagcattcgataccaggtcagctattatatgatttgtttaaatgttttaaaaaacattttattgaaaaaaataccaaaattagaaaataaaattacacaatacttcttaaaaattaagaacttaaagaaaacttgtatgctgtcaacttgctcattttatctgtaaccaaatagagttatttaaaagaatagggaaaaaaaattgagtgatcatgggactagtgagaatgttgagaactgctgcattagtcagtaatgaatgggaaagacataaaagggcctattgcttaatagttggcatggagggcaaagcagctcatttagtttgaaaactaacccaatgttttgctctttgattggcattgttgaggctgtttctcagcagctttgtatatgaatatcataaaga

SEQ ID NO: 12295 - DNA, 1099 bp, Homo sapiens
gtatttttagtagagacggagttttgtcatgttgcccaggctggtctcgaactcctgagctcacgcagtctgcccaagttggtctcccaaagtgctgggattacaggcatgggccactgtgcctggtcaccatcaagaacttcatagtctataaagtgcttaaagctacatggtactaaaattggataaattattcataaataaatagctagatgttgggaaatgcttcttgaaggactggtcttgaaggttgggtaggattttgatagatggagaataacaaaagaaacatagtttaaaaagcaacataagaaaggcaggataaatgtaagattagaaactcacttaacgatagacacatagaagatgatttttataggaactttggcttcctaaaaaaagactttggaagttgcacctataatgctagttactttaattgccaataataattttagtagaagcagataaactattatggtgtctttccccatagtggttcaatgcacagagaaagacgcaagtttttaagatctgcactgaaggaattggctactgtcctctctgatcaacctggattgctaggtcccaaggtaattcatttaattattatttcaataattgtgccatattaaaattttaaaaaacgtttctaagtgaaattttactgaaatttgagtcagggactacataaaaggatttttatatttagtggagaatgaatttgctgacttgacattcatacatcgtacctccctgcattcttctcccttatatgcatgctctctctcatacatacttacaggttctcttgtgtcctcttctgttagtctcttcactcttttgaattgatattatcacttcttgccaatgacttttcacatagaaagagattaccagttttgtttttaatctttgaataagaataaacacttacttttttttaaacaggcactttttgtttttatggcattatcctttgcccgtgatgaaatcatctggctacttcgtcatgcagataacatgccaaagaagagtgcagacgactttatagataagtaagttagcaacatttaaaaaaatattttctgtatataga

SEQ ID NO: 12296 - DNA, 1469 bp, Homo sapiens
atcagttcttgctggagtaattctggggaaatggctttcatggagaaaaggaaaagaggaagtgtagtatcagtctatgttgtctattgctaatgtggaatggtgttttctgcttctacgccttactgattccagtttttatatttagaaaacaaattaagtgaagcttctggaggtagggctgaaaatggtgaaagaagtgacttggaagaggacaacgagagggagggaacggaaaatggagccattgatgctgttcctgttgatgaaaatcttttcactggagaggatttggatgaactagaagaagaattaaatacacttgatttagaagaatgacaccaaacacatcgctgaaaaaattaagtcagctcagcacgagttgaaattgactacattaatttctttccacctagaatcaacaggatgtttatttcctatgctgattctggaggagttaacctcctgcaaaaaaggcatcttgtccctacatcttctcttctgactttggctacatctcatagtaagttcagagtagttcatgataaattgaaaatataatggtcattgcagaaaatgattgatgttgtaactgtccacccaagtaagaagtgtatctgcctttccatcttttggttttcatttgggcatgtgctattaccagaaacaacaaacttatatttaaaatacccttcatttgacacagtttttaatgagtgatttaatttcctctgtatttgtatgtttagaagactgcctaaaacatgagcactgtacttcataaaggaaactgcgtatgcagattcagtattgtgtatctttggacaattagatggacatttaaaatggaacttcttttatctgacaggatcagctacaatgccctgtgttaaattgtttaaaagtttcccttttcttttttgccaataaagttgtaaataaagaccatcatacattaaaatccaaatatgggcctttttttaagtttttctatgaaaaatttaacatttctagcttgagaattttaaatacctgttataatatcacataggcatgttttcttaatatttactacagaagcatctagagtacttgacagtactacaatgagtttaataacacaaatactaagcttccaaaaagagactttaggagatgttatataaaagagtaacttctgaattgatacaacatcaaccaaattaaatatcacctgcagttgaatcaagtaatgcttaagaattgtttgttgagattcatggtgttaaaatagtacatactactgtaagtataaacaaattcaccagaaaactttgggctgagggtctttggcactaagagcccctgaaaaattagggtgataatacatttaaaatggacacaatttgctaatgacatatttagtactagctacaccttttttattgttatgttttgtattttcaaataatatgttgcttttgttattt

SEQ ID NO: 12297 - DNA, 1148 bp, Homo sapiens
ctggaccgtatctccccgcccccgcccccacgcctcctcaggtgctcagcctgaggccttcgtccaggagcgctgccgctgacccaggctcaggagctgggggcccctgcacagacgcccaggtctcgggacaggcggcgactgcactcacggaagtacgctgagctctcccctgtagaagggcgcctctcctcccccacttcctcctccagctccacagcagcctcccgggccggctcctcctccttccaggtctcctcccagtgccgccgcggctctcaggcctgaggtgcggcgctcaccccggcagtccccagcctcagacgctgcgtggagcggcggagccggagggaagcaaaggaccgtctgcgctgctgtccccgccccgcgcgctctgcgcccctcgtccctggcggtcgctccgaagctcagccctcttgcctgccccggagctgtcccgggctagccgagaagagagcggccggcaagtttgggcgcgcgcaggcggcgggccgcgggcactgggcgcctcgctggggcggggggaggtggctaccgctcccggcttggcgtcccgcgcgcacttcggcgatggcttttccgccgcggcgacggctgcgcctcggtccccgcggcctcccgcttcttctctcgggactcctgctacctctgtgccgcgccttcaacctagacgtggacagtcctgccgagtactctggccccgagggaagttacttcggcttcgccgtggatttcttcgtgcccagcgcgtcttcgtaagtggccgcacttggaactggagccggccccctcccccaccgcgcgcacccacccagcgtttctccattgggattgatttccgagagatcccggcgtctgtctgtctcacccatcctacctctcagagtggtttatatcctgggtggaggaaatatttggggaaatgaactccctttggtacccatcacccagttacaccccgcttctcacctcttaaaattggttaggggcagcgggagagctttgaagcagacctgtgcttaaaaatcggggaaagtgggaaatcaacaaaggctggtcttgccggactccccgcctcctgtgccagtgtcgaggatttggtcaatatcatccccgaacttcttttt

SEQ ID NO: 12298 - DNA, 1050 bp, Homo sapiens
cgatttgatttctgtaggccctccatggaaaaaccattaaaaattctgttttcttttccatggggatgttgagatctggttattatatcttacaaatatcaccatgttatgggtttgcctaaagaatattgagttctagtcatagagtgaatcttttaatattatggatcttatctttctataacaaatcacgataaaaccaaccctttcatttacaaggaactacatgtgtggcaaaagaagaaaaagaaaagaaacataccaaccccttcacaataaaaagcattcatagactcaactattagcctgtttattttcaagacagaagaatctggataatctctttggccatcacacaaaaagaaaaaaaatggcaaattttcaaatgttgaagagatgatagaatgaccttttcttataagtaaaggatttgttttggcagggttgtggagttgctcagtgcttgaagattgtctgccaagttgggagattagacagaggaaagagtgcaatcttgtacgtaaagtcattactgtggactgagacttttatgaatgtaagtagacaggtgcagcatttagcaaacatacccagtgttttcaaataaatataaaaggcctgatatctgggaaatcatctaattgttatttccaaacagaaagaaaatcagaatcattcctattctctgaagtcgtctgcttcatttaatgtcatagagtttccttataagaatcttccaattgaggatatcaccaactccacattggtaagtcattggtttaggcaaatagaataaatttactcaattcaaatgctgtacatgtttttattttgttttttaaagaacgacagcttaacttttttgataatttaaactaatgaagttatatgatagcattataacctagtttaatattatcattttactccttaccccgaagtgattaaagctagaccttttagtttagcatcttgtccagtgtaagagatttcttagtatatactaaattatattggagaaattttaggaattttcgtttacaaagttag

SEQ ID NO: 12299 - DNA, 1253 bp, Homo sapiens
aagaagtatcttgactttcataatgtgttctaagaccaagaagcacaggaacatccctcataatctaaagatgcctgcatagtaaatctggagcctcatattctgattttctgacaagttggctttccaaaaatagataacaagttttggacagcacccagcaagttttctacttcctgacaggaatgctgatgagaaacaaaaatgtggcacttcatctctgccaaaatcactgccatcaaaatgcagtcaccctagatgaccactgtctacttttctaatccctttcttcctggaccatctttagtcttaacacaagataatttgttgccccagtcataaaagtcctccagagaagtgtttctcaagcttgaataatatatagatatctttaaaaggaaaaaaaatcacagacttccaatttgtaagccaaattacttaaaataactttcattttgtatgaaccagtaacatagtaggaataaattcattatgatcattatacaactataaaccaaaaattgtttacaagttaatactatgcaagctacaaactaataaataatactaatttgataagacttcttttgcttaaaaaaaagaaaaatccttattgtaatatgaatttaatagtgactggtgtagggcagcttagtaatgtggtagaaatagcttagacaaacttgagctactctaagttgtgtgtaattctctaccttttttctatttgagtaatggaaaatctttgcagaaatgaaattaagaagtattaatacaaaatggtggctgggtgcagtggctcactcctgtaataccagcgctttggaaggctggggtgggaagatagcttgagcccaggagttcaagaccagcctgggtgacatgcagagaccctctctctacaaaagataaaataattagctcagtatggtggcctgtgatcgtagacccacttattctggaggctgaggtgggaggattgcttgagccagggaggttgaggctgcagtgagctgtaattgtgccactgcactccagcctggatgacagcaagactctctcataaataaataaataaaatctgttgatcaggaaaattccaactctgcctcttctagggacacagtggagtggggtttccagtttttgattatatctaatcaaaagtggggtttccagttttgattatatctaataccactacatggatctgattgaccagtgcattacatggatctgagtgaccagtgcag

SEQ ID NO: 12300 - DNA, 2652 bp, Homo sapiens
attatactcatctgagtgttaaaatatatatctaaagattaatgcagcagtttgattttcttcaaattaggcttccgaagatgagtcaacagttatatatatatgtgtatatatatatatatatatatatatatatatatatatatatatatatattataaatgttttagaaagcaatagttattaacatgtgctttagaattttaaacaggtctaagtatgacaaaccattaccactttctacctttgtgactttgggtgaaatactttaagcctccaaggtattgtgggatctaaataagatgctatgttaaaagtgcttagccaagtgcttgggccaaaatcagcactcggcaaaacagaagctatttttctaaaagataaacattctttattagtagcctgttgttaattatcattggtactggcacagtgtgtgtgtttatatggtttgattttggtaaacagcttgtgttgccctctgaattgctaggtaaaagtccaagaatttttatgttatttaatatttattctccttccctgcaacagatatattggatgaactgaaaaaagaataccaagaaatagaaaacttagacaagaccaaaatcaagaaatagtcaacctgatttcacataacaatgtgtggcatttgttgttctgtaaacttttctgctgagcatttcagtcaagatttaaaagaggacttactatataatcttaaacagcggggacccaatagtagtaaacaattgttaaagtctgatgttaactaccagtgtttattttctgctcacgtcctacacttgaggggtgttttgactacccagcctgtggaagatgaaagaggcaatgtgtttctatggaatggagaaatttttagtggaataaaggttgaagctgaagagaatgacactcaaattttgtttaattatctttcctcctgtaagaatgaatctgagattttgtcactcttctcagaagtacaaggtccctggtcatttatatattatcaagcatctagtcattatttatggtttggtagggatttttttggtcgccgtagcttgctttggcattttagtaatttgggcaagagtttctgcctctcttcagttggcacccaaacatctggattggcaaatcagtggcaagaagttccagcatctggacttttcagaattgatcttaagtctactgtcatttccggatgcattattttacaactgtatccttggaaatatatttctagggagaatattattgaagaaaatgttaatagcctgagtcaaatttcagcagacttaccagcatttgtatcagtggtagcaaatgaagccaaactgtatcttgaaaaacctgttgttcctttaaatatgatgttgccacaagctgcattggagactcattgcagtaatatttccaatgtgccacctacaagagagatacttcaagtctttcttactgatgtacacatgaaggaagtaattcagcagttcattgatgtcctgagtgtagcagtcaagaaacgtgtcttgtgtttacctagggatgaaaacctgacagcaaatgaagttttgaaaacgtgtgataggaaagcaaatgttgcaatcctgttttctgggggcattgattccatggttattgcaacccttgctgaccgtcatattcctttagatgaaccaattgatcttcttaatgtagctttcatagctgaagaaaagaccatgccaactacctttaacagagaagggaataaacagaaaaataaatgtgaaataccttcagaagaattctctaaagatgttgctgctgctgctgctgacagtcctaataaacatgtcagtgtaccagatcgaatcacaggaagggcgggactaaaggaactacaagctgttagcccttcccgaatttggaattttgttgaaattaatgtttctatggaagaactgcagaaattaagaagaactcgaatatgtcacttaattcggccattggatacagttttggatgatagcattggctgtgcagtctggtttgcttctagaggaattggttggttagtggcccaggaaggagtgaaatcctatcagagcaatgcaaaggtatgacacagtgtttcttctcctgagaattcctgagacctatttttgacccttaaagcttttagcattttgattgtaagaatatagcatattttaggtgcatttatcttattttctttactgtgtagttgataacatttttatacggatttctttaaacctcataggtagttctcactggaattggtgcagatgagcaacttgcaggttattctcgtcatcgtgtccgctttcagtcgcatgggctggaaggattgaataaggaaataatgatggaactgggtcgaatttcttctagaaatcttggtcgtgatgacagagttattggtgatcatggaaaagaagcaaggtaattctaatcatttgagtgttcttacggtatttttataaaaacagcagagtgtaaatggagactttaaagtttgttttctctttggagactgttcacatgaataagagcagcaataatagcttggctttgtattataaacaaagtcagaaacagagctgggaagagccaggagagcatttattttctagaactcat

SEQ ID NO: 12301 - DNA, 1216 bp, Homo sapiens
accataagtgttttgcaggttcaggactgtggagcccttctatattggttccatatccctaaagtgtcatttctttagacctgataaagatcagacacagattgaatagttagttaagatcatgctcgtaggctaggtgcggtggctcactcctgtattcccagcactttgggaggccaaagcaggtgggtcacttgagttcaggagtccgagaccagcctgggcaatgtggcgaaatctcatctctaccaacaaatacaaagattagctgggtgcggtagtgctcacctaggcaaaaaaaaaaaaaaaaaatcatgtttgttttcaaggcctccacaaagataccttgtaaaacaatttgaaattatttctggacacaataaacctaatttatttattgagatttagactattttgtagtatatgtattaaaattagtcatgttgtgaaacaatttggttaaattttagctataaaactgtgtataaatcaaagcaggttgattttatttttacatagtggttatattatctgtctattttagatttcctttcctggatgaaaatgttgtctcctttctaaattctctgccgatttgggaaaaagcaaacttgactttaccccgaggaattggtgaaaaattacttttacgccttgcagctgtggaacttggtcttacagcctctgctcttctgcccaaacgggccatgcagtttggatcaagaattgcaaaaatggaaaaaattaatgaaaaggcatctgataaatgtggacggctccaaatcatgtccttagaaaatctttctattgaaaaggagactaaattgtaatgtgattcacaatgtaacaatataaaaataagtttttatataattatataaaagtaagatactctgctgctttactattgtataacatagtagttttaaagttcatttggttgaattttcattttttcctgtcacagagcttctaaaaccatggaatttccttagtgatagggaatatcttttgttgttcataataagccccttttgatcacacctgagtttatgctaatgcgttgacttagggtgaggtctctaaatagcctttaacacctgcagcttgggaggccaaggcagagggatctcttgagtccaggagtttgagaacagcctgggcaacatgatgaaacctcatctctaccaaaaaaaaaaaaaaagtacagaaaatt

SEQ ID NO: 12302 - DNA, 1173 bp, Homo sapiens
acacaaggctgctaaaccaattaagaaaataattaatttctttcaagcaactaaaaaatatatggtaatttaaaggtgtctgcttatttggttgaacaatttaattgggaaagtttgtcatcatttgaaaaaggaaatataaaaggaacaaccatatagccaacctgtggtctggcagaaacaacgtctctagcaatagtaccaaagtaagtaatggagtcttttttttggcaggtctgcagtaaaagataacattttcttttcttagtcctcctgctctcaacccccatattttgcctttgaatacgtgggttttagtatatatagcccaaaatggtaactgtctccagaacagcaaccacattgaattcttgtgacttaggaaagcttcttatagttgctgacattaattgcaagaaataactatatactactttgagaagtaaacatgtcaaaaaaaacaaagttcagatatgggacaaaatttaaaaattcagtaacatttataaacagaattgaatgaaaagagttacagaccaacttaaacatcaattcgtgtcagtaaactgacttttgggggtaatgatcattgttttgtatctcaaaagtattgagtttagaaatcagttgtatgatactacctttgtatgtctgtcttttcccgtgtatttttaaataactggtgatctataatttaataaaatttttcgttggtgtaatattatttcaaaagccctccaaatttagtcatcaaaattaaaatgacatttttcaagtttatttttaagcaactgaattcgtaaaattaaagtaacaaaaagcattcatttttctttattttaaagttcctctcaaaaggcttacatttttttaacatacttcagagatagaagtctccctcttagacatgctttcttcactgctttctcccgtcaatgttttaaaaatatttactcagtagatatttgaagggcccactctgtaacaggaattatgttaggtattgaggatagtttgtagacaagaaaaaccaactcccttccctttggtgcctacattccagtttaaaacaaaatctaaaaatgactattacttggaacaaaataaattgccatgccataaatgctcctgacttcaagtcaggagacataatggcaatttctaaggagtcat

SEQ ID NO: 12303 - DNA, 1227 bp, Homo sapiens
tggctgtttgcagaaaaagatttagaaagttataatgtagtaaacatagatttttatgtaagggagaaagtattaaatattaggttgattcctgccatagaaaagcaaaataagaaaacaaaaaacaaaataaataaataaaaatcaggttgaataatgatacttgctaggttctgcctgactagaacatgtgttactttgtcgctgatggagttctgttctgttctgttttgttttggggccatgcataccaaaggtgtatgtaattcagaagaatttttttagtcaaatttaaacataaattattgtttattgtaaatacccatgataatgaaacagtgaaaagcaaccttaaagatcagcctaacctccttattcaacagttgaatctgtgtccagagaaaacaagggagttgcctgttgcaccataactagaaattagtagagctgaagaatttaaactcttatatccataatgctatgcttccataaaagtaaataaatgtcaaaattctttcacttgtgtttctttctaagtgtgataacagtttaatatttttacatattaaaagtgttttttgacattttataggagaactatggatttgataaaattgaggtgcgagataacggggagggtatcaaggctgttgatgcacctgtaatggcaatgaagtactacacctcaaaaataaatagtcatgaagatcttgaaaatttgacaacttacggttttcgtggagaagccttggggtcaatttgttgtatagctgaggtaaggtaattatattggttattttagtgatttcatattcactgaacattacagttaaaactaacccagtatttggtgaagtatggttttaattatttttattatggtaaaatatacataacataagccgggcgaggtggctcacgcctgtaatcccagcactttgggaggctgaggcaggtggatcacctgaggtcaggagttcgagactagcctggccaacatggtgaaaccccgtctctactaaaaatacaaaattagctgggtatggtgcctcacgtctgtagtcccagctacttgagaggctgaggcaggagaattgcttgaacccgggaaacagaggctgcagtgacccgagatcatgccactgcactcccacctaggcaagatagagtgagattctgtctcaaaaaaatatatatatacataacataaaatgtatcattttaatt

SEQ ID NO: 12304 - DNA, 1197 bp, Homo sapiens
gagttaaggggtcaaagaagcaaagcggaacaattggagttgtctctcttgtctctggtctgacaccagcccttcccctatcctttagggaattaggttaacataaaattgtaaactagtaaatgttcttatcaaagaccatctttttaggatctagtgtatgtggcagctctctcagggaaatttttagataagaattcggaggaatagggaatctacttttattatgacaaagtataaatcaaaccaagatcaacagttggctattcctttttccctttggatgaggctgttttcaaacacctaacatggctatcataaatagatggcaaataacattatttaggcattctgctttcaagcagaatggtctggaagaataatttcagtttttaattttgttttgccattaaacaaaaattataatcattacttatttaggtccacacaatgttgtaacaaaaggatgctttaaaattgtagaccaacctccaatccattttattatctcctctgtagcactcctgacaggccagccacattttgattgaacacttcagtgacaggaagctcattacattttgacgggttcctccttttctgttgttagcaaggccttgtttacgctgaactgacaatcacttaggaagcagtacctgtttctcattagtcctacctggccaatagcgctccaactgtgaacttagaaacaagatttttctgcaaaaaggatctgaaactttagtcagtctgaaaagggtccatgacccaaaaatagttaagaaatgaaaggtctaaagtgatacaaaataatatttttgtctcctttgcttgacagcctttcagatccctgagcctcagtttctcatctgtaaaatgggaataatatactttgtctaaccctagggttactgtgaggattaaattaataatattaataaagtacttagtagaggtgcctaggagtcagtaaatgttagttatcttcaataaatactagtttttatgtttccttccttacctaagacccctctctgtgctaaagatccttagcccaaaattgaattcaataagtcagtttaacccaaacagtgcagggtgcaatgagctgccatcttcaaataaaataatctattgcttaattggcatttgtagtaaatactcagaagttgactaaaaacctcacctccatacccc

SEQ ID NO: 12305 - DNA, 2065 bp, Homo sapiens
tatataatagaaaaacaaccaaacccattcatacaaggatctgaagttataaggttaagggcagaaagtttcccataagtataaaacatttccaggtcatgaagagtagtttaggttgagtgacaaaagcctaggtgtggttgtttttcattcattttgcatctcacaccaagacatttttgctgcaaggtcatctgctgcttaaaatgtacaattaggtatataaaataagtacaatggtgaaaacacaaagccaggtaaagcagcatgccccactaaacttttcagtatacatagggacagacaagtgagttttggttgtatctaaatattttaatttcaggttccttctgtgccctgggccactatttcccaggggtgtgacagagatgcctgccagatccatatcaactagaagtctgatttctgttgctgcccttcctcagcaactatggcagtatacttttatcaccaagcaccactcccttgtccctgaatcacattttaatagagtacaatatcttctgtacaatatttctgaaacacttatgtctgaaatatatgctgtattgtatgttaacccatgacatatatgaactacaaggcttgcataatcagtgagctagtggataaatcaagacaggagcaaatgggagaaagatgaataaacaaatgaaaaaagatgaataaatgaataagagagatgaataaacaaatttacattacatgtgatagttatcatggtatggccttcatgacaagatggatgagaatatcactgataggatattagccttctttcatatctttatattgaaatatgggctttacttcaatttgaaggtctttcatgaacaataaaagagagtagaaggactgtctgagaaggcaggagacatataaaacagatgactgaaagactgactagctcctggaaagggaaacatttggaacatccagagtaagggcaaatgggcttctaccagcacaacaaagagcctccaggtggcaacatggaagcaggttatcagagaaaataaatgtgcaaattccttatttacaatgactcacttaaccccacaaacatgtttcactgctgccttccccagttgtcgcttatgtactgttgttacctttcagttacatgcctttgatcctaaaattctctacttttgttgccttatcagttctttgcaatctgcctgtggttatcagcacttaaagcacaattttgaaggggaaaaaaatgataatcaccttagtcccaaagaaataatttgtcaaactgccttattagtattaaaaacagacacactgaatgaagtagcatgatacgcatatatcctactcagtatcattggccttttatcaaatggggaaactatacttttgtattacatagttttagaaatcgaaagttagagactctttataagtaatgtcaaggaacagtaatttaaaaacaaagttctaacaaatatattgtttgcttaatcacaatgccctcaacttgtatttgaataactaaataggacatgtcttccttggagctgtgggcattagttcagaagcactacctgcatcttaattttcaaaacttaagttttattagcaaatcctcttctctgtaagacttagctatgaagtggtatattttttccaaatatttttctgaaaacatttgttgttgtaactgcacaataaaagtccagttgcaattaactagtgtgagctcttatttaactgaagcaaatgctttctgacagtgtgtactttgaattttttaacaatataaaagacaacattttctgcattgttaacaaatatagagaacaaaaatccatttatacaaataatttcttggatcattcaggtccaatttaggacctttaagagtataaatgtaaatgtatccgatatcatggcatctttattccagatctgttactgaattatttgaaagaaaaatgcttcacataaaacagattaagaactgagaaaacataaagcaataccttctgggctgccatttcctcatctatgagaagggtgcaggacatgatct

SEQ ID NO: 12306 - DNA, 1135 bp, Homo sapiens
atgcaactgcaaacgttacaactgcagccagaacaatggctgggtggatcgcacgtaaagcttgccactaaaaatcaaagcagaggttaacaggaaacctggggggagtgtggaaaagggaaaactgttttagctgaataaaggtgaattatataatttataatagctgtggatgagcacaggagagagaggaaagaaaagaacagtcgaaatgagcaactcaccttaccctctgaccctgattagacaggatcaattgtaaagtgagggcttctccatgacaccatagttctgcccaatactgcatttgggataagaaattctacacttggatgtctcgcttcacaataaaacacagcttaaaaataaaataactgaaagaaatagaattcagcaaatagttattttttgcacttgaactgaaacgtactgtactgtaaattatgactcattttaagtgacctttaaaatcagatgtatttattatgcttgtgtaattatagaaataaagaaatgggtgacaggcttaacctcacctatgaatgtacagtatgtggatttgtgaaactgactgtaggaagtcaaaaacttgtactgtatcttgtgtttacagttctgatttattcctttgaaaagcctgctgttttggaaatgcacagttgacatgttgaaataaaaatgaataccatttttaaatgtttcttaaatgataaagatgtgaccaaacaaaagtcctatactctaatgaatgagaccaaattcaacatgcctttgttatggaacatttactgtgacagcagaatcgataatgcagtcatttccagccttgtgagctgacaccttcatgggtttgtggactttgtgactttttcttcctgtccccaaagtgccatatgctaccttaaaaaatattaaagtgaattcaaattacattttgatttgagattttgtaacccctcttgagatccctcaacacacacaggggtgtcacagagcccaggctggtaatcactgccttaatgacttacttcctactctttctcctatggttgtagaaacagtaaattaccgagtgctgagcttgtgtggatccaaagtggttaactgctaattattgaactattcctcaagtttt

SEQ ID NO: 12307 - DNA, 1224 bp, Homo sapiens
ctgttactgctcttgatagttctgtattttgttgttacccagttcctgctaatgtttgagcttctagttttagttacattgattacttgcttgagttcatattaagtaccatactcaattaaaattgttttattttccagtcttttatattttacaaaaactagagtatgaccttggagtgcatataaaatatagtagattgtaaccagagtacttatttatattttaatgtggctttacacttatttgatagaagaattctttcatggggccggttataaaccctattttgtagaagatgaaagatgatttgattggctgagccctaggatcatgttagtaagcagtgttcttaaaacttatatccatatcttactctgattttagttctcttcttgatgcattatactactttattagcatgtagtgatgatttctaggctggacgatataagcagagtttgttaaaatatggatatatataaccaatgaatagccaatttcttatacctgctctgtataactgtttacaggatcttgtttctctgtgtaatttccataactatgataatttgagacactttgcaaaaaaacttgatcctcgaagagaaggtggtgatcaaagggtaagcaaaattcttatttagataagtatataaaatttttaagaagagaaaaagtgagatttgcctgtataaataaaatcttagtttgttagtggcctcgggtctttgctaatcataaatgagtgtaaacaaattgttgacatataaatccgggatcaccagtattaaatacttaaagattgtttaatagatagttaatagatacagatatttaaatattgctgttttgttatttaaattgaaactagttagcctagtgtcagggatttccccttccattttctgctattttaagcaagatttttagaattgattctgttaaaaaaagaacaaaacaaaacattggaatgtgctgcatgctataaagaaagcatcgttttaatatttgttcgtcctaaattgaagtttaacttcttgcatactgtgtagatggatatgtaaatggaaaaggattatcatattagtgagagaccgtatgaagcctcaaaagttttataagtcactgtagatgaaatatttttttccaccgtgtttaatgcaatattcctaataatcttacggtcctatttgtttgttacgagtttatttggcttcatac

SEQ ID NO: 12308 - DNA, 1129 bp, Homo sapiens
aaagccttttgggctaacttaagtattaaatttatatatttaaataattatattttaagttgtagaggattttcccaaggattttatgcttacttgaatgttctttgaatgttcagatgcatatcctaactggatgcttctcaaggccttactgcatatttgtgttgcatatttatgttagttgcaccagggccatttgtagtttgggcaaccgaatgccttaattggaaaaaaggcattgtggtttcccctatgatctaaattgttacattttaccatttcattccgaagttggttttactttattaaatgaagatttagttttcatatcgtatacatagctgtatagatttcaaaattaggttgttaatttgtgtcacttactatttttgtgttggtaatgctttaaatgcatacttaaaaatgaagtactgttatctaagctactgtgtttagaaaatgttaagaatgagcagaaatttttatagaaaagtataaacggaagaagagataagatactgcgaataggccctcaaacttaaaaaagaaaaaactttgccagttttaaggacatattttgattctttcagtattcttaacacctttttaaacaaagttcttgatagtacccactattattgggtttgttttatgccattattgattcttgatattcaagcatttacaatgtagcatatttgattttcttttttctttctttttttggcatcattaacatttcatttgaaatgcatattgttcttgaagtactttgtttttagcataaatgttgtgcattttatcttagtgtttggatgaaaacatttgtgttgtttagctttcatttgctttgtatatttaataatgtacctttattttccagtatgcctacattttgtattgcacaataaatttattttaagctgattttattgttttttttgttttgttttgttttgtttttataaaagcaacttcaacattttaagtacaaatacagttgggattttaacttagaaaaaattattctttatgaagatactgttaaagtgtttgctattctgaagctgcctcaaagtaaactagaaatattcaaaagggctttatttgattttttaaaatgcaatat

SEQ ID NO: 12309 - DNA, 1316 bp, Homo sapiens
tgagcagaagcacgtttcctcagtggcctcatggtgcggacaccagtctggagggatctcttggaatcacaacccgctcctctcctgtgttcaaactttccctgaatgtttccccatgcaccttcgttaactgtttcatgccctgaggctcgggacagcttctccctcccctttccctcagcagagtcctccaggctgggcccagtgactccaggtccacctgccctcaagtggacgtcaatctctgagctgtcaatccctgagctgacgagggagcaggctggggccctgagggcggctctgaataccctcaggcacctgagttgggctaagctttcgagttaggtagagcttcctagctacgaggcttgctggatcacaaagtggtctctagtgaaaaaggatgcctttaacctcctgcaggttctgggcccagggaaagcttcggactcagcacccacagagcctcacagcaactggcagcccccatgttcacagaggaggaaagatggtgcacccacacagagcatcctgctgggtctccactgcctggggaatgagccctactgccctggagaaaaggtggtagagtcaggctggcgtggaggcaggggctgtgggcagggccaccaggaaggggaacacgggggctgaggagtgaaccctggtgtacaggaccacacttggatcacagtcaggacacgggagccataacctttgagaaaactgcaagcgtaggtgagtgaccgtggggatcatgcaggcagcaagtgcaaatcatttacgtaaacacaggcttaggaaatatttttactgcaagtgatacagcccagaaaacagagtgaacagtcgtgggataaggaggagaaaccaaaatgccccaagtactggcgacaggaagacaccagccacaaagtctacaaaccccagcaggggggcgtcctccacatggcaatgtgccaaaaagggctgctctattgtcaaaagtcctaagaaaccagagacaacatagagaggaaactgatgtccctaccaggtgccgaaattcagccgccagactgccattggtggactcctccatgttcatcacttttgtgtgcgtgcccaaaatgttgaacttcctaaatctatacaatataggaaagaaatgctgaaaagtcttccaactattaaataaataaaaatatagcacagtatagcgtaaagtacgtcacgtacccttttactgtatttctctcattcacatctctgcaaaaaaaatatatataatcacatatgcgtatttaaaatttgaaataagctttaacaaaattata

SEQ ID NO: 12310 - DNA, 1787 bp, Homo sapiens
ttaggtagcccatagactgtacttgcattatacttaatgtttcagtcttaatctgaaatgttccagcaagcatttcctttaagcatcatgtcagtgctttaaacatttcagagtttggaggtttcagattttcggattaggttagggatgcgcagcctgtactcgtcaagatcagtatccattaaaatacaaaagcaagtgttattgtaatcatgagctgttttgtgtatactttaatttgttttattcttttctcctaggttcctggtacagttcagacaggacaaagtatgtgtgaagtttattcagggaaaccagaaaaatgggagtgtcccaacatgtaaacgaaaaaacaaccgtctccttgaagttgctgtcccttaactggcgcctcctctctactttcatggacttgttcctttgtaatagtgcaatttggttttgttttatttggggttcattgtatgtttgggaatcaccaaaggcttttagagttctttggcaaaataaaaatatttgactaatcaatttttattattggaatagttttaacctttcaaatacatgttctgtcctggagcaggattgtagaaactaacagtgtctattttcatgtctgatgtgttcttcctttagtcatcatgttaggtctgtgtaccctaaatcagcatattactcataaatcattaattaatataagcataggaaatggtcttaaaagatactgcattcattcatcagatatttattccatgcctactctatgctaggcactgtgctagatggtatgaaaacttattaggaacctttttgtttttgagaccattgcattctggctggtttgtgctggtttaacgacatctaagaaggtttagaaatggtgagaccaaaacaataactgttaatgatggacagcattattaggaaccctgtagtatgatatttaacaatataggcttcaagaagggctggtcctaagagggggcagaaatgaatgaccaggttaaatccctctacatgtggtttctgtttgaaaaaaagaaaactgacatttgaacaggacttttaatttgtttaaaactctggtaattacttgtaacagtagaaaatagaagtcattcttattttagaaaaagtgacagaagcagtccagtaagattatatgtttctgtttctggtaaataccatatatgatcctcgaaatgataatatctccagaatattgttttcacccaaatttgagtagatattttaaacacctaacaaagtaaagggctaaaagccattcagatagcagtaaaacattctgtatgatgtgcaataaaacatccaagatcttttttgaaagttttatttataatatacatttttgtatgagaaaggtgattggtacagggtgcctattttagtcatggatcaaaatttgtgtaacttgcagggctttctttctttttcttcaaatttacaagggttcattttggaaactacattttaaactttggaatcaaattgtttcttatttgggaggataatgtatatacattggtattatgttaaataataaaattgttctaatttggtgccatttcctgaatcacaactgtatttttgtatctcaagctattttcatatgttgtgtgtcaatgtatcatctctcagaaaggttttacaatccaaacattatatgttctctgtgtaactgaatttcacttatcttttataaaccagaaacattaattgaaaatattttctggggattttctcttgacttgtatttttaaaaattg

SEQ ID NO: 12311 - DNA, 1195 bp, Homo sapiens
atttattttagagtagtgctcctaacatgtattatcaactttgtggattacattggaggaaaatttaaaactggggccttgaatatttattttttgaaactaccatgttaaatactgaagtataatttgggggagttataaagttatgataaacattcatctgattattttaaacaatagttgtggtagataaacatactggaggtgagtcaaattgaattcatatagtaacatgcagtctgaagtcctagttacttaataggtactcagcctggagtgaaaatcctgggtactgactttgagaggagtgagtgtgcatgttgtcaaagtttctgaacacagttcacatagccttattagcaaaagttttaagaaatggctctatcaaagaagcaattgcagctttattcagaaatataaaagtggaatttatgtacatgtcataagtggtacccacttcccctttttactgtagggtggataactcttaggatttaactctttgaatattatctcttgaataaagcatgtgttaatgttaacaaacctacgtaatttttgccctttcaatgacttacagtggagagccagtacatcttaactactgttgtagtgatggtatcaacctcatggttacttagctctgcatttgttgctttgttttttttccacttcaaatcacaaaataagtagattttgttttctgaaaactccatagcatttgaatacaaaaagttgtgccagattgtttgccctaattcactgtgtttaacaaatatttcagtacacactatgtattaggcactgtgtggaaagtgttaaggggtagacaaaataccgaataatctccacaagtttatttgtggtctatagtacttttgtaactggggttacaaaaattatagaaatttttttcctttgttcatatgcatattcatgattataatttggctttgtttgtgattaatgttttcttaagattttcacattatagaatacctcaaaagaagttgtctaaggactgggatagagagtatgtttcataaaattgtagatgtttagaatttttaaaaaccctacaaattagtatatgattgttttatataagtaagataggagcaacactttaaattatttgtgggagaatacagcattaaaggtgattttaaaagaaaaaaatttggaattttagaaa

SEQ ID NO: 12312 - DNA, 1096 bp, Homo sapiens
gaaaatagcaagagaaattgagaaaaattatcagagatataggaagacaatcaaattgtcatagttcctctggaactcaaagaataaatggttcaatagaataattgataaaaccatatactgactgcagttttaatatcaaccattacatttgcaactaggagattatttatgaaattttgagtgttatttcaatttagtggtatgaataaaaatcatattacagggtcaatgaaagcaaggaggttggcaataaaaaagagggaaggaggaggaaagatagtcattaagaggtaaaagcatgaaataggagagaatggggttacagttgtagaagaggagatataattgattttttcaaaaaaatataaaaaaggaagtccttagagaaagcagagacagaattaggggcttggatggttataaataccccagcatatttacacacccatttacagtcataagctttgatatgacttttttttttctttttcaagagatttgaatgtaaaagcaataggcttacaaggtatggcaggctgttgatgagagttttcatcgaaactggcaggaacattgggaaccagctgttggtgtaggtagatcatttaaagtagtttaaacacctaaaggataattttaagactctgtgcttcaggtcatgagaatttcctaagtatttgttccaagaaaattgtatatattttagacatagaaatatttatcagctgttgtgtagcttttcttttctttatgatgtattttgtcagtggattaaggaaagcaatgtgtattctgaaattggttattataatgattattcaatatgtaaaagatgataaagggaggtcctgatatttcacttagttacttggtaaaaacatcttttactaaaatttctatataatatgttattataaactctaatacttacagaaaattatatccctagatatatgaatggaagtcacttgcaataagctctaggcaatgagactttcagttatggtgtagaaattccttctgttttaagaatctgcagattcttacaaaactcttcagtaaagtttcacatttgctaggttgcttctaggtg

SEQ ID NO: 12313 - DNA, 2840 bp, Homo sapiens
ctttcttattgagtttaagatacattagtaaatgtgggaattgtggtgatcggtttttggagtgtcttattggtaataagttgctttatgctttagcataaagtaaaatgtcagaatttataaggtcagtggatagtaactgtttgaaaaatgactaatgtgcatattttaagtgtttgttgtgggggatgaggaggagggaacagagttagtatttcctagcaaaagcataaaatttcttcagtatttgactaaaatacatctggtgggtagcattgtgttcaataaaataattattttgtctgtagttacacttcagtcactaattttcttaagtaggaaaatgtttttaaaaactgttttgagcagaagtattatacaaagtttaatgtgaagatttatttttctagcttccagaaatgttgcatggtgatggtgacaatgaagaacatggcttttgtcctgtggggcaattcatccttcagaatttaggattgctctttggatttgccattatgctggtgattgccctctatgaagataaaattgtgtttgacatccagttttgacctttcccagtaatcactgttgattacgagaatgttaccatgcagctttgcatctgttccttgtactgtatgcacattgctcaaaggaaagtcagtggcttgcactacttacaagtttcatagatttgagcctaaccacaagaggctggtgcttagtactgttttccctgcacgtaggggtcttttaaaaatataaagcttgtgataaagagaggagaatatgggactccatgaaccagtgttgatatgtttgattaagacttttcacaaaataatcatataaaacactagtctctttattagtagaaacttctgtggctatgcagaaatagagatcgaaccaaaaaaaatcatttaaactttaaaaatattttaaatggactttggggagacattttttgtgtgttttaagaatgaattgtagtgctctttaattcagctacatatattcatgtggtgatagggatcaacttgacacaactttgaaactgcataaagtagacataggaactagaggaaagctcaggctgcattagagtatgaatttagcattgggaaaagcccttattcttgaatctagagttactatttttgtatatatttgcatagtgtttaaacctgcagcctaaactactgaaatttgtgattgtatgtttgtgtgagcttcagtttaatgaaagattcataatggttctttgtattattataatacttggtgttggggtgttctttctgttttgttttttactttaattttgttttgattttttttttttttttttggcgggggtaggtgagggtttggagcatgtggtctttttaaaaaattgtaaccctctagaaaatatcaaagaaatgaaccagacgtggtttaaatagttgattttcctattttaacagtaccaactagttaattgggaaatgtaagttctgaatgttcacattgctttaccagtttggcactggaaccaagagcacatgtcgtggctggctacaaggttgtaaagcagaaaatcgaagtttaccatgtctgtaatgtgtacatgaagtgtcaatttagaacagttactaggataaactccattattgccatggctgtcatggtacccaagtgacttggaagatgcatttaaattactcagctgaaatcacttgatcatcttgtgccaagatatgctgttggtgcctgatagggattagtcttttaggtgccctgttctcctaccataattgtgaatgatttgtgagaagtgcaagccatgtttatcctgaatttttacttaataatttgtattactagtcatatgcatgtagctttctgtttacatcctatgccacatggtcttcatttatgccaggtaaactgtatttgaactatgtgcagctagctttgttttaatctgcttggcaaccagtgtagctgctgtaacaatctatcttattgttcaaatatataagagccaaactcttttccattccatctaaaatgttttcatttagtactcttctttcctcctactctatgaacttcaaaacaaaaacaaaactttgagagcagcacatgcatccaggtatttatagattattgccagtgtcttttctgtatgctataagcaagggagcttaggtgttatttctttaatttatgcttgaatctgaaaaattatttctgacttactccatggcctccttataataagtagaagttttatatataattaattttcagcattgggcactgaattaggacagtcctcatctcattgcttggcccttcaagcaacctagctaaaaggtgctgatattttatttagtactgccaacttcaagtgatttagatatctatctatctagatttctgaaccaagatatatttatagttcacttttgggtttttatacccacggtaggattctgcattccagcattaaatctgcttcattttagaacctttataaaagcaatagctggaatatactcccagttttaaaataaatgcctgattgatttaaagcaagtaggttatgctgaagtatataaagaagttttatattctctcaaaaatggtattatctttctttatttgctagattcttacaaatcttttaagagggctgtaacagttgctgctagtattagggttccacatcattctaatgtatagtttcaagtcttaatagacaatctgaattccactacatttcttttggctccaacattccttttagcttgaccagtctaatttaaaatgtgtttgttggaggtcattaa

SEQ ID NO: 12314 - DNA, 1195 bp, Homo sapiens
ttaaatgtgattatggtcctgcaaggtgattcttgctaaaatatctaaacttttgttttgttttaactgaatcattttttaacttaaaaagctggaaaatatcaaatgctgttttttttttttcattgtcaacagtggtgtgtcattttatgtatgttcctaatgcttatggaactcctccaaaataaagttactcaaagagagcaaatatgccagtgtgttttctttagtctttatttcagaacatttccttacatttaagtatgagtcatattaagtttagctgcatttgctcataagtaaattcataattataactttagtcaaatgtatttaaacaaacaaaaaaaaaggtttaagtagtaaaatatgctttctctactcagccagccaacaagaaataggaacaaggaaatgatgtcttctggttatgaattaagttgacataacagtgctacacctcgtccaatccagtgttccttgggttggtcagagggaagagtcatggcaatcacaaaattcgtggaatggccagtggtggataatactcctctccgctcacttgtcttatacaatggagcaacataacttggccgttttggtatatctgccctcttacagggctttagccacatctggaagaaagtacataacacctctttaagtcaaggctgtttgttaaatgtacatgtgtttgagcctactatagtattctcagagtaaggttatgcatgcagatttctgtggcccaaatttattttcaccagcagtgttgttgtgattgctcaaaacattttatagaactctcataactgaaaaaaatagttttcgccttctctttctaaaagcatattttctacctatttatctctcactcagccacaattacctgggaaatgacttttagtgcttacaatgataaaaaaaaaatcagatacactttcaaaggagagaattgccacactgatactgagaatcatgtgcctttatattaattgaaagccagtcccaaaaaattctgaagggatttttatcaacagctgtatagctagagaaccttcccattttaggagactattataaaggagatagatactatatatattatgctgtttaaaatataattgcattcctttataaccacaatctataccccattctttttagtcattaaattcctacaatttgttattag

SEQ ID NO: 12315 - DNA, 1566 bp, Homo sapiens
ttgctctgttagcacttttttctttgactcatttggactgaatttgaaattttatatccactccagtgagattatgatttgtagcttcatatatgacatgtttatattgtaaatgcacttttccatggaataatttagggaagtgttttaatgttaaattactagttgctagcatgttatgatttcatatcctgagatagctctgcagataagaaaatatttaaatatatgacaaaaagtaaaattgtacatgtgagtttacatgttaatgaaataattcaacttcaaatgaacttaccagaatgttttgcatatcaacaaaaaaagtggcttgagttttattatagttggtgtaaactgaacacagtgaagacattggaatttaataggttctctctctaaggtgactcttataccatgcctctatcaacataatttgtttaggaaagcagtatgaagtttaagccaaaataatttctactttatagatgctcaagagacattttacaattgaaaatgtctttcaattacaaatattttgaaacttcgtaagattttcattctctgtggtctgttatatgagagagatcctttaactagagcaaagagggagttagaaacctgatcagggatattctttacaagttggagcagaggaaagagtagcatgccttcgtattttaacgcaaatgtctttttcctcctcccaacctacttgagatctgataaggtctggaagatggagatatttggtatgcaagtgtagagttttttaatcctccagaatttctagagtagaagatacttaggtatagttaaatattctgtatttttagtcaaacatatttattaattgaatatagaagaaaatgttgacacactcagacagcttactgaattttagatgtcttctgcatcttagaatacaagccagtcattcagagttctaaaagtatgcataaaaaattacagcaccggtaggtctattaacacagtgcccgagtcagcggtagcaagactgatgtgatcataaaacatgacatcaggctcgtctgaagttcttgtgtgaaattcctagtgagtgaggaggctcagcttaaagccatctgcagagtggcccctcattgtggtcttttgctgggaccaatgcaagagactagggagagcaaaatgtttgcttatggctagagactatatccagccctaatgatggggaaagttagtccttttcgggtaatcttttatgaattttcacctgatgaccgttatattggtctgttatcatgttacgataactgtgatctcatgaccatgttgctgtatcagaagaaatagtttgacaaatggtaacaacaacctgatgttccccctttagacctttaacttctcaaaattttggtaagtttccaaattctttaataataacttaaaactttttgaataactatcaggtcactttatttgaccacatggtgaattcctttaatgtcttcagcatttgttaaggaaaagttttctctacttgtgtgtgtatgtgtgcacatgtgtgtatgtacaggtgtatgt

SEQ ID NO: 12316 - DNA, 1167 bp, Homo sapiens
aggataatcatggtctctgataaaagatgcccacatttctgtgtactcacagttgttgtatatttttcaatttcaattttgaaagtaaactcaacacattgttttcccattttacctccactacctactcgccagacaaaaatatagatttctctaaaaacacatacaaagaaaatgtctttccttaaaacatgatcttattgacatgaaggtagtttgagcaagggtatgtaataaaataaatggctctcaacctgcatcaatttttatactatagttaaaaaatttatagaggacaacctatgtgttatgctgagatagactcagtaatcatttgtttgcaaattgattatttttttctcatccatccagaaagtacagtgcataacaacaacacttaacaagtgcagaggaacctgtcctgtagtatataataaaaaatgattgtcaccttgctgatctttccatttaaacatgcatgatctccagtactttgtacaatgtatagtatattaaatacatttatgtgtaattttgtgtgtatttttatatggtataattaaaattattacatttatgtgattgtaattcacaaaaagtactacttactatattctgtagagtgtgttgtgaatgtttttacctgtgtttgagcattatggtgtaggtttaatagatgaatatttgccttcagtctctgctcaggtattaatgtgtagtaatttttggtgctttctttttaatctgtgataatctggtgttctgaatgttcaaaaataaatttggttgaatacgcacatggtaaaaagattgcttaccaattgacatactctctataataccatcttggtaaaaactctttaaaaaggatttattggccgggcgtggtggtttatgcctgtaatcccagcactttgggaggccaaggcgggcagatcacgaggtcaggagattgagaccatcccggctaacacggtgaaaccccgtctctactaaaaaaaaaaaaaaaaaaaaaaaaaaaaaaattagccaggcatggtagcgggtgcctgtagtcccagctacacaggaggctgaggcggggtaatggcgtgaacctgggaggcagagcttgcagtgagccaagatcatgccactgcactccagcctgggcaacagagcgagact

SEQ ID NO: 12317 - DNA, 1098 bp, Homo sapiens
tgatgtacattgttgtacaagccattttagtacaggtgtctcatttatgtagttgaaaggtgactgtggaatttcttttgttttttatgtatttccattcagtctctttatatagtcacatgtttcacaggggaacttgtccactggaacctaacatagtacaaccttttaatatgcgtatcttaaaggaaaatattataaaacaagatattaatactaaagtgttaacattaatatgttgttctcatggaagaaaagtagaaaatgtgataggcttagaaattattttttatcagcattaagtgcttcaatttctccccataaagattctaaggaaatttcagttcctcatattatagttttccccataatttaatattactaagtatttctctgcccagtaatgttgatgcagtttgcataaatagccttggaagtaaggaggcaggacagaaagccaaatatcgaaatctctggccttgatttagtgacagtttattctaatggggaccataggtgttattagtaaaaagatagtgtacaaggcctaagttcagtttacattgttctttgaaatgagttcatcttttgtgttgaataattgtattctaagtaggagatgcctgtatttaacataatcatgctttctatataatcaaatatgtatttgttggaatactggtagaaataaccttcccttcctccactgtgcagtggaaaaaaaactcccgatttatactgtatataaattaggaaattatgttacatatttacatttttaaaaatataaaaatgacatattattttgaagtgattgtattatagtttctgaagcttatgactggctataaatataacaacatacccatgagaaaccagaccaaaattgaatatatatcatcactgtgaccttgaacttatagtcatttgggataaaacagagtgtgccttgaaatgataaagagtgccctgcaattttataactgtacattttattatgggtggtcctctcaaattggccccaaatccttgtcttcgaggttggtgaaataaaagtttaaaataaaagttgactggtatttcctttagtatttccag

SEQ ID NO: 12318 - DNA, 1250 bp, Homo sapiens
tctcacatttagtatagtgcattcatttcatcttgctgtttattagcaccctttgtggccaagggaaataaaaggtggtaaaattcagttttcagtttagttcttgaaagctctgggaaatggaggaaacacaaaactatgaattaaactagggctgttgatttctgaacccccagataaatcagttgacccacattttcattttaggtgttaggtccaaattagcataatgtcttgcattattattaggttcagtgtgaaactttacagtgctgcatttgaagtttagtaactggttattattaatcatttgggaaaaatgaaaatgtgttgggactttctatgactaggcatttgttgattatttttcatgattgctttttgttttctcattgtgtaggatttgtgaacttgtatattacaggaaacaagatactttgtaaaatttactggggaaaatccatttggagtgcatgacatttgccaggataagaaagcagtaatatgtttgtattataaaattacaccctgccagaaaactttctttcctagtaaggtaaatgtagaagggacttttacagcatagtaagttgattaggagccaaaattttattccagtttttttttgaactaagaatgttttaaattctgtaatgaacttttatgtttacccattactcatgcattctttcacaatatgtttaatagcctgaggaaataggaaagctgtgaagctactaccattctttacttttaataagaataataggaaagaaaagtcaggtcagtaatccaaatccaaatatgtatactgcaaatgctcaagaagtcacattttttgataaattgtattgagtacagaagaacttatatgaatttattatctgttaataacttagttttgacaacagaataacatttggaaattgtgagaataatcaagctgtttttccattaacagtgtaaattcataacatgtccttcaaaaggtgatattctaagctgtcttaattgtctacggttgataacttttaaataaagtacaggactttctgaaagtgtttggcatgttatgctgccaaaaacaatctgtgttttgaaataccaattaatcagttaatttctgaagactttgtataggacttgatatatgagtcagaatctgtctgtactcattctgtacattgtaactttgaacacttatgaaaaactgtatctgttggtgtgttttgattagttagtgtagattt

SEQ ID NO: 12319 - DNA, 1194 bp, Homo sapiens
aagaactcatccgttttattgtcttgtaatatgaagttagagtgcctttttatatttgtatattctgaaaatgttctgtggaatgttttgtattttttcatttgagtgttatcagagcaatatgataccagtgagttttcatttcaacttttctttgaatgtataaagtgtcttttttcctatttccccttgtacttgcattgaaatgaatatgaaaatgcttaagttttctataggaattgtttgattttgcagtgctaaaatgctttcgtcttacgaaactataaaccataggtcagtattataggggaaaagcattttaagatagtgacaatctgagtgtttgtataaaatgtaattctatgcgtttcttatgtgatctaaaaattcaatgcaaatatcttttatttggtagttttgtctacatattttatgctctagcatgtgcaatatatctttgtaaagcacgatgatacaaatctggtgccagtgttatattttgcataacatatttgtaacagcataaaatattgtttgatgatttcagtgggattttgtctataatgttttcttatgtaaattggagttgaatgactctggtaaatgtcatgactgtaaaaatggggaaaatgacttttagttcagtgaatgactttgaaacaatctgaatcttctcaagcacagtttaatacttttgcaactactgaatgctctaataacgtaatgaagtacttaactgtaatatactatggaaatgcattcagatggttatttttacaaataaaaacggtacaaatattgttggaatttgtgttttaatttttccaatttatgctttttctaaattatgctaatttaaatctttgcaccccctcaagccaaattaactttaaatttagaaaataatcaagataaaagtgtatctccagattcacgatttatgtttgtgttatcacaattagagaaaaaattcaaacatatatgcttgtgtttattatatgtatttatgcttccaacttttttccataaagggttttgttttgttttgttttgttttgtttttttctgctctgttgtccaggctgatgggcagttgtgagatctcggctcactgcagcctcgacctcctgggctgaagtaatcttcctacctcagcctcccgagtagctgggactacagatgtgcaccactatg

SEQ ID NO: 12320 - DNA, 1164 bp, Homo sapiens
agtggtttaagtcttgtccaacacttgacaggtctgctgtgtttagcaagtgaggaatttaactttacttcaaaactgctttctgcctattaggagtgaggatacctaagtaatgctgatagaacaggacaatgttgggcttttctccatgttataagccactactcagcaatgcatcagtaaatacctattcacccactgtatgccagccactgtgcttatatgcaggggatgcaaaggtgcatgagacctgccctctacctttaagaacagtataatggagaaggggagacaaaccttgtgacagattccttatgtactgtgataatacacagtggcagcagctaaaatgtctaggtttgcttagctttgtattcagtaataataagttgatctaagagttcagcataaactgaatgaaatgccatttaatggtagaggaaccaagcattaaggcagtactacacttaattttttaagcaaatatgtaaagtatattttcaaacttttctaatgttatggccccaaatttcttagttttggcctttttactacctatactatttttactgttttgttttgtctccatgtggtagtacttctgtgaactctaaagggaaaaaaaattctgcaagcagcattagtatataactactactgtaagtaaaactgcctattgacactttaggagttcctgcttcagaagcttagttaagaaacagcttgtggccgggtgtggtggctcatgcctgtaatcccagcactttgggaggctgaggcgggcggatcacgaggtcaggagatcgagaccatcctggctaacgcggtgaagtcccgtctactaaaaatacaaaaattagccaggcgtggtggcgggcgcctgtagtcccagctactagggaggctgaggcaggagaatggcttgaacccgggaggcggagcttgcagtgagccgagatagcgctgctacactccagcctgggcgacagagactccgtctcaaaaaaaaaaaaaaaattgactttcaacaaattgatagtgagcattaagggtttccaagttggatttgtaactcctcatcattccttgtatgacaactttctgaatatatgtcactatgtagtaaaattaaacactccaaactcatctttctgttgttagaag

SEQ ID NO: 12321 - DNA, 1932 bp, Homo sapiens
cctgtactttgggaggctgaggcgggcagatcacaaggtcaagagatcgagaccatcctggccaacatggtgaaaccctgtctctactaaaaatacaaaaattaggcaggcgtggtggcacacacctgtaattccagctactcaggaggctgaggcaggcgaattgcttgaacctgggaggcagaggttgcagtgagccaagatcacaccactgcactccagtctgggtgacagagtaagactccgtctcaaaaaaaaaaaaaaagttaattagaaaatatggcttaattgttgagccatagtgaatcttgagtaattaaagcaaaagtcctcaagtggaagctattctaaaggatatattagatatatgaaatgttagatgacttcacatctattcagtgcactgaattagtaatttagtttctaatgggccggtgaatatttcctgtaaaactaagactgtatctttaaggatttttccccctttcttataagaccgcatcttaaaggacttttttcccttccgttgtagagaccttgtacacagacagacggctagtgcagtggtacagcacatgtcacttggggtttatggatttggttgtgaagattcgctgaatcacttgttgaactatgtatggcccaatgtatttgagacatctcctcatgtaattcaggcagttatgggagccctagagggcctgagagttgctattggaccatgtagaatgttgcaatattgtttacaggtaagttaaagattttttttttaatcggtgattttttttttttaaataatactttaagttctgggatacttgtgctgaacgtgcaggtttgttacataggtatatatgtgccatggtggtttgctgcacctatcaacctgtcatctaggttttaagccctgcatgcattaggtatttgtcctaatgctctccctcccctttccccccactgcctgtaagttaaagatttttaaaagattacttagcaagaaaagtagtgtattgaattaagttacttttcctgattatcattagggtatattgtgccatatggtagaacaattgtgtggtgacaggggagtgagttttgtctcttccattgcagcttaagagcagtgtaattagtaggttcccccccccccaactccccaagggaaataattttgaatcatatctttatgttttcttaattttgttaaggttatgtatgttcttaaaaattgaaataatgtaaccgttcaattattttagggtctgtttcacccagcccggaaagtcagagatgtatattggaaaatttacaactccatctacattggttcccaggacgctctcatagcacattacccaagaatctacaacgatgataagaacacctatattcgttatgaacttgactatatcttataattttattgtttattttgtgtttaatgcacagctacttcacaccttaaacttgctttgatttggtgatgtaaacttttaaacattgcagatcagtgtagaactggtcatagaggaagagctagaaatccagtagcatgatttttaaataacctgtctttgtttttgatgttaaacagtaaatgccagtagtgaccaagaacacagtgattatatacactatactggagggatttcatttttaattcatctttatgaagatttagaactcattccttgtgtttaaagggaatgtttaattgagaaataaacatttgtgtacaaaatgctaatttgtgtgtgttttttgaacatgacttgtaaaatgcggaactttgataaagtattggtttatgtggaataagtggcttaatttcattttctgtcacatggtttatagaaagtagttagctgaataaaaactatataaagtgatggcatctttgtcaaaattccattgttgtgttaataatgacag

SEQ ID NO: 12322 - DNA, 1163 bp, Homo sapiens
ttgtgtggaggaaagataaaaggaaaagagattttatatggtttataatgggagactacaattcggatattcccctcaccactcctacctagttctagtgcccattttgacaactcagagaattactcactttaaacatttagttaaatttctttatatttcagaaagtttaagaactgaaaattacatttgaaaattgagttaacttaaaatgtttagaatttgtacagctatgacctctgatcttctcagagtcaacttttttaaactgaccttttaatttatatgaaatttttatatagaaacaacaatgccagtgacttgaaagtattgcattttataaaattactgagttccctgtaattattaatacttaaaagttttcatctttatgcatttttttcttccataaatttttgacttataatgtaacagcttgttgacccatttgtttttttcagccctcatgatgtattggctacacttctgaacaacctcaaagttcaagaaaggcagaacagagtttgtaccactgtagcaatagctattgttgcagaaacatgttcaccctttacagtactccctgccttaatgaatgaatacagagttcctgaactgaatgttcaaaatggagtgttaaaatcgctttccttcttgtttgaatatattggtgaaatgggaaaagactacatttatgccgtaacaccgttacttgaagatgctttaatggataggtaagtgacttgaactaaatacaagaaaataattataactcttccttcattttagaacatcgtgaaatagttattagatgactttttactgtaacatagttaaagaaaaaattgctagcctggagtcttaggacattgtaaatatgacttattattttaaaataatgtgcacgctgtagtgattccccagactttctttcaagttctcccatcccctttaaatctcttttcttatctattgaattaaataaattttgaaaagggttgattgataatcttttgttttcaaaattggtcaaatatagttagaggacatgatgagcagaagctaatgggcagagacctgatctttttagctttttgttgcaggtaaaggacaggtttctcttaagcctttgaattactgaacaatagcctgccagaactaca

SEQ ID NO: 12323 - DNA, 1198 bp, Homo sapiens
ttccttctttattgcccttcttaaaagctgtgtgcaaaagcaagaagtcctggcaagcgagacacactggtattaagattgtacaacagatagctattcttatgggctgtgccatcttgccacatcttagaagtttagttgaaatcattgaacatggtaagttgtaatgtaactttgtctttttttttttttctttaggagacagggtcttactatgttgcccagactggactcaaacctttgggctcaagtgatcctcctgctcagcctccttagtagttgggactagaggtacacacacagcctgtccatgtttaataggacagctgtcctaaaatttgggctactgatttggggagataaatggaaaggcatagctctacaaactatagattttatgatgggtttgttatattatctgctgacaggctatggttcatgttttgcttttacctaattttgtttaatgtgaacatattctgcagtttggctgaatagttgatatattgagagaatctggatgatattgtgtaacttaggtaatgttggggcatagttaaaacctgtgtttggttttgtaggtcttgtggatgagcagcagaaagttcggaccatcagtgctttggccattgctgccttggctgaagcagcaactccttatggtatcgaatcttttgattctgtgttaaagcctttatggaagggtatccgccaacacagaggaaaggtaaatccaccaattaccttttgatttatcttcattaaagttaaggcgacataaatctaaattactaaagtacatatattttttatttaaaaatagggtttggctgctttcttgaaggctattgggtatcttattcctcttatggatgcagaatatgccaactactatactagagaagtgatgttaatccttattcgagaattccagtctcctgatgaggaaatgaaaaaaattgtgctgaaggtaattattccagatttgttaatgtaaactggatatgtttcatggttctaacagaattttaaagtgtttttaaaaatcaacaaaaaaaactgtatgttacacgaatactgtttgatttgtttttaaattttattttttaaaatcacgtaatcagcaatgagtattctcttcatttcaggtcagttgatttattattactatttcttaaccttttaggtggtaaaacag

SEQ ID NO: 12324 - DNA, 1162 bp, Homo sapiens
attttagaacttgatagttttgagtataactgtttgagaataaagaatattattttaacagtgattaaaattgtggttttactcactctttctttttaaagatactcctgggcatggaagtggatgggctgagactcctcgaacagatcgaggtggagattctattggtgaaacaccgactcctggagccagtaaaagaaaatcacggtgggatgaaacaccagctagtcagatgggtggaagcactccagttctgacccctggaaagacaccaattggcacaccagccatgaacatggctacccctactccaggtagaactgtctcattggacataattgtttttttctccataaattatttaattttttcctttgtggtattctgtgtactattaatgtcaacttctagtaagaataaggagatatacaaatttaagtcttggtttgcgtttataatataaaagcaaataataggattgatcttaactgtcttttatctcaatgtatgtaataatacagtcttgtactatagattatataaaaatttgcttttcttggtaggtcacataatgagtatgactcctgaacagcttcaggcttggcggtgggaaagagaaattgatgagagaaatcgcccactttctgatgaggaattagatgctatgttcccagaaggatataaggtagtacatcaaatttgaatgaggtggtatttaggatatacatttattttaaatagtgaaaaaaattgattaagcttgcattggctttgcccaaatttactattgtcattccattctcttagctatttccaggtatatttcagttccatatagagatgaaaagaaatgaacaacatgaaacttttattactttttgaaagacatctcaaagacttgtgtatgggtctatcggttatactttgagaactgctggtgcttcagttttctagcagtcccaggaataagctcgttgagattgtggttattttacttggtgcttcaccaagattttatatacttaagtttatggattgtcagtggacacaaagaatttttttttttttttttttttaaaagatggagtctcactctgttgcccaggctgaagtgcagtggcgtgatttcggctcattgcaacctccgcctcccaggtttaag

SEQ ID NO: 12325 - DNA, 1220 bp, Homo sapiens
aatgaaaaatgaccttgaattacagggcgaaagatgggactgttaagactgtcttcgtaactaagcactgtaaagactgagacagctgcaagggaaagttttcctcgagctcttccagtgaattttgggaaaagggattgaatgtctgaggtctcttccagctctgaaaccgcagcgtttcgtacagtgttcatttttttttaatgggaggggtctcggggtcttgctctgtcgcccggtctggaggcttgagtacagtggcgcgacacgattacggctcacggctgcctcgaactcctgggctcaagcgatgctcccgcctcagcctccagagttgctgggactcagtgtctgttcttaactcccttcgtagaatccactttcctccagggcaaagttactcacttaaggaccttacggctcggctcggggatttcctgggtcaccacgcaggcgacttcagggcccaaccgtgtctcctcccccacccacaatgcacctcgcggttccctctaggtggcagttctgtcacgtgtcacccgacggagcgcgctcccgtttggcgcacgcgcagagtgcagcccccagctatttttctccgtggcggcggcgacgagcggaagttcttgggagcgccagttccgtctgtgtgttcgagtggacaaaatggcgaagatcgccaagactcacgaaggtaagcggtctttccctgcttacgtgttttcttcgttgctagcctaataaaagccttttttcctaggattctgcctttttctatggtttctttcgtaggagctgagcccgcgtttcggggccaagggtcgtctcctccgcgccagcggcgcaggccactgccccgcgtaatggcgtcctcctcttacacccccgacaggcgctttgttcagtgtttgggacctgctacttcagagtagcttctcttctctgaccagagggcctcgtttaagcggcttcctcagtaggattcgtgggcaagggatcggggaagcgggcgtggggagaaggtctcactcgcctctcgacactgtcgtccccatagtttgtgcagaagagggtcagaaaagcactgaaatacggcagccgcttttccggcagactgaatcgaatttggttaaaccgagattccgttactcctacccttgtgtgtcttcaagcgtcagttacttgtttatttttcttgcacgaaacgatttggggataaa

SEQ ID NO: 12326 - DNA, 2465 bp, Homo sapiens
catcttgaatgaagaggccatactaactggaattcttttcgtctttaggttggtgggacaagtgatgttgaagtgaatgaaaagaaagacagagttacagatgcccttaatgctacaagagctgctgttgaagaaggcattgttttgggagggggttgtgccctccttcgatgcattccagccttggactcattgactccagctaatgaagatcaaaaaattggtaaaaagttaccttttaaatgagtttgtggcctgattttagtttttcttagaataataatgttgcagtcccctaaatggaatagcacattcatttcctgaataacagaagtagaatagtgctaatgtcagagctaaacatgcatcacatctttttcagaggaaatgatttgatctgtagtaggattgggatttccctacatcaatatcctcacaacttataaatgtgttacaatatttacaaatgaaagtattaaaattttgctgaaatttctctgtaggtatagaaattattaaaagaacactcaaaattccagcaatgaccattgctaagaatgcaggtgttgaaggatctttgatagttgagaaaattatgcaaagttcctcagaagttggttatgatgctatggctggagattttgtgaatatggtggaaaaaggaatcattgacccaacaaaggtaaatggttgaacactttctaaaaattcttttgttgttcattttgttaatgtatcctcacatcccaaatctttgattttgtcaccagaaaaatagtctaatagcagtagcaacagcaatagctcttgtgcccatcaacaattctcatgtacatttccagcacctagatatttaatactccactaaaaggaagcaggatcccttgagtagcagttgagtccatgcctggaggcaggaaaaaatcaggatggatctggaacaccctgttcctgcctggcagtaagaatactttccaagatacgcagaacagggttttgttttgttttgaagacagagtcgctgtgtcgcccaggctggagtgcaggcagtgacaacctccacctcctgggttcaagcgattctcctgcctcaggctcctgagtagctgggattacaggcatgcaccaccatgcctggctaatttttgtatttttagtagagacggggtctcatcatgttggccaggctggtcttgaactcctaacctcaagtcatctacctgcctcagcctcccaaagtgctggattacaggtgtgagccaccatgcccagacagaaattttcaataagtcttgctcatattttactaagggaaaactaattaattaaatttttttctaggttgtgagaactgctttattggatgctgctggtgtggcctctctgttaactacagcagaagttgtagtcacagaaattcctaaagaagagaaggaccctggaatgggtgcaatgggtggaatgggaggtggtatgggaggtggcatgttctaactcctagactagtgctttacctttattaatgaactgtgacaggaagcccaaggcagtgttcctcaccaataacttcagagaagtcagttggagaaaatgaagaaaaaggctggctgaaaatcactataaccatcagttactggtttcagttgacaaaatatataatggtttactgctgtcattgtccatgcctacagataatttattttgtatttttgaataaaaaacatttgtacattcctgatactgggtacaagagccatgtaccagtgtactgctttcaacttaaatcactgaggcatttttactactattctgttaaaatcaggattttagtgcttgccaccaccagatgagaagttaagcagcctttctgtggagagtgagaataattgtgtacaaagtagagaagtatccaattatgtgacaacctttgtgtaataaaaatttgtttaaagttaataattgtgttagcatttccatgattagaagatactgaaaattgaaagccagttgaagggcaggctggcatgtgtgtaaaacattatcctatctatgatattttcatgtttctctttgttgcagactgaactacattattccattgataatggggaaagacagtttctattttccccggtgcaaggatgtaatctctcttggagctgtaaaatctgggaggttggagggaactccagctcctcagcatggcctttgggctgctgctgcaagcaaggcattgaggcaaatatttttgctgtccttaccttggacagaagtagaggggagaaataaagtccatcatcacatgaaaagtcagtcacttgaaatcctgtacctagaatacctttggctttggtaatttcgttgtgtttggggtacaaaaaaaaggatctatttgatagcacaacggggtgactatagtcaataataattgtacatttaaaaataaaagaatgtaattggattgt

SEQ ID NO: 12327 - DNA, 1097 bp, Homo sapiens
ggtttcaccatgttggccaggctggtctcttaactcctgacctcaggtgatccacccaccttggcctcccaaagtgctgggattataggtatgaggctctgtgcctggccaatttttgaattttttaatagagacaaggtttagccatgttggccaggctggttttgaattcctggcctcaagtcatctgcctgctttggcctcctgaagtttttaaaatatactttctaatatgtgtcaaactataggtattagttggtgtcatcctctaaaaaataaatgtatatattccaaaagttaatgcatatgagaaatgaaggaggaaaaccaactcactggtgaattttaaagtgtattggaaccttggtttcgcttttcatttaaatgtattgcagtcattttttgtatatttttgaaatcttcattatttttacaggtcagaaatgtgaattccaggatgcctatgttctgttgagtgaaaagaaaatttctagtatccagtccattgtacctgctcttgaaattgccaatgctcaccgtaagcctttggtcataatcgctgaagatgttgatggagaagctctaagtacactcgtcttgaataggtaataagcagtggtatttgttgatttatatttctcggtgaaagacagaattatttgtattgctgtttgcagtttccatcatgtgtacctccacatttgatccagttgggtttgtatctagaattgtaattgtgtaaatcaggtgtgctctaatgtatccttatggttgtgtttttgaaggaaccccaaagtctttactattttgatcagctttctcatagaatagactaatttagcacatgggtacctttctgtattttgcaagtgtttacagttgttttgaaggcacatgactgaatcttgtattttttttttttgagacagagtctcactccctggcccaggctggagtgcagtggcataatcttggctcactgcaatctccatctcctaggttcaaacagttctgcctcagcctcccaagcagctgggactacaggtgcgtgccaccacacctgactaatttttgtatttttagtagagacagggttt

SEQ ID NO: 12328 - DNA, 1369 bp, Homo sapiens
tgggataccgcgcctccagtcttgaccttgctgggggcgttcggaaagaaggacacgtgggctcgcgccgagtgggccgggccgccgcccccagcatcgcggccttgctggttgctctgatacagtagccttgggtggatccatggagacactttgctgagcggctttttgcaccgtcaggaatacttttaacttccctggtcacttggatttgtaacttgcctctctccggctgacttggtttctcaggggccacagttggagtgggtctgcccacaaggccgttttcgcggtgaaagattaactcgtttttggcggcagggataggtggccgtggggaaggagccgcatgtgctttgtgctggtgctataggtcaggcgccggccggggcggcctctttagcttgcgctagtggctgatgttccgaagctgcggcgccttccgtcattcaggcgtagtggctggcggaggtcagccaggctcagcatctcacgttgcttgctctgttgcacaggtgggcatgtttgttctgcagcgcaccacgggtggtagttctgatgatctttttgcttccatccccagaaatgcttcggttacccacagtctttcgccagatgagaccggtgtccagggtactggctcctcatctcactcgggcttatgccaaagatgtaaaatttggtgcagatgcccgagccttaatgcttcaaggtgtagaccttttagccgatgctgtggccgttacaatggggccaaaggtaccagtatttttattttattgtaattacggtattattaatagcattttactcacaaatagtcgcactgaactattcaacagtactttcatctccatttttgagagaactcagtttacatgtaagaattctgaagtattggttagcctttttttcttagacatgatcttaaagcttaaactgcttcagccagattttcgaaactattttgttcaatgtgtgatgtaatcaggtagtaacttacagctcaaggtggattcttaaactcgaggtagaatttcgctggcttaagttaaaatttggatcctttcccagtagttcatgccaagtgtagagagaagagtttaacttatcttccataattccttaggtatgtgcttgtagatgctaaatttttttttggtttattgtagtaaaatgtacacaacataaaattaccattaagtgtgcactttggggacatcaattacatttatgttgtgcagtcatcaccaccatccatctccaaaactttttatatggaaaaattgtaactttgtactcattagacagtagcttcccattctctcctccaccccaagatgctagttttacccatcggttttctgct

SEQ ID NO: 12329 - DNA, 1184 bp, Homo sapiens
gataagttatgttaatatttaacagttataaagttagctttagttaactaaagttagcttttccagaatattttcttgaacttttacgttggagtcaggttttagtttaagccactgtgtattatttcaaagtgtaactacagtggtatttttgagtgaagatctgtaattctagtatgagtcgtatcacttagccacgaaatatatttttaatataattggatttgagtgaccatgtttcattagttgtagtgatttaaaagttaactgtttatgttgggtgaactagatatctttgctaataaacatccttccttttttaagggtggagagattcaaccagttagcgtgaaagttggagataaagttcttctcccagaatatggaggcaccaaagtagttctagatgacaaggtgtgtaaacttaataattctaaaaagaagtcagatatttgcaattagttgtcttaactaatggtttttttcacttgcaggattatttcctatttagagatggtgacattcttggaaagtacgtagactgaaataagtcactattgaaatggcatcaacatgatgctgcccattccactgaagttctgaaatctttcgtcatgtaaataatttccatatttctcttttataataaactaatgataactaatgacatccagtgtctccaaaattgtttccttgtactgatataaacacttccaaataaaaatatgtaaatgagtggttaatctttagttattttaagatgattttagggttttctagtttatgctttttttctgtttttcaagtaacctgcagagaattttgggaaacaggattttctacgtaggtgcattttcacactgaatttagctttattaatacatgattgatactgataccaagccatggatttactttttttttttttttttctgagacggattctcactctgtcacccaggctggagtgcagtggttcaatcttggcttactgcaacctccgccttctgggttcaagtgattctcctccctcagcctccagagtacctgggattacaggcgtgcaccaccatgcccagctaatttttgtgtttttagtagagacaggttttgccatgttgcccaggctagtctcagactcccaaagtgctgggattacaagcgtgagccaccacagcaacatt

SEQ ID NO: 12330 - DNA, 1218 bp, Homo sapiens
gtaatgaggcagtaagggtgaaaacattgtacatgttgtgaagaaagtatttaaatccaacttttgaacagatttaacaaacatgaggaacttttttatttagaaggataattttgaagatgaaaatgtattcatcttaattgttttttcaaatttaagggaataatttataccatcttttcagacaagaatgtacagcaaaaataaggggaacagtagtatactgagagtgtgtgtatgtatagtgtatgcctttccaagcttgccagtctttttggctttgaacactgcccatcagctacagtcattactgttccccaacccacaactatcttttaagaagtcttagttcacagtgaaaggaatgatgactttgaaattatggatttatattaatggcactataaaccaatggtaatggtaatttttaaacttgctaaatattgagaaactaaactactaagttaataaattatatatagcagtgtagctgttctctctagatggtgtctcacaatggatttctgttgcttgactattttcttagtgaatatttatactaaggtagtgactgagatttggtgatctggctgagtattttgaaacacattttgaataatatggcttagtgttaacggggacttaaatatgatttttttttcttactcatttcaccttccctgtactgtatgtttggaattgatcataaaacatctccaaaagaaaataatcagtttgtagtcttgcttttgtattcatgttgataatcttactaattgtgaagttgattcactactatactaggtaagacctaagtgaaacagttcctgtttttccttaatactgttttcagaattttgaaaatgtacttatatatacataaatactactaaaaaattaatgagcctggcaaaccattgatttataaaagtaagtgttctaagaggggaacaagacagttctgtgtgataaggaagttaggctccactttttgtttgaattaccctatgtatatccgaaggtaaacttaggcttttctttccaaaagatcgtatagtcaattcattctttttctcctatcacatctgggaaagtagctaacttttaactatttatgttcccataagtaacccttcttttgtgtgtatacatttccttttctctgacttgagatgtcaaatttggatttctagaacagtttctcagttaaattcttga

SEQ ID NO: 12331 - DNA, 1218 bp, Homo sapiens; identical to SEQ ID NO: 12330

SEQ ID NO: 12332 - DNA, 2767 bp, Homo sapiens
aagcaaggcagcacctgccgaaattgaccagagataatgtgaacttctactaggcaaagcaatacatcggtccaaggattttctgctttcatttctttaaaagttttttgttagtttgttttttgtttttgtttttgggtttttttggctttatttttgtctttttatgtctgttttgtttttcttacccttttggacatttctttgttgcacaggatacacctatagactgaataagttcagtatttccgaatcagacatcgccttggcaaagacactaaagcgttacactttatcccgtctctatgactggatcatagtcattataatcacaggagactctgccttcattatccttgcacttaacggaagttacatcaggcaagtaccaggatgaaaagaactatgaaataaatgaaggaagctacaagtgtgtgtgtatatgtatatgtatatatctctatatttacatatatatattaaaattgcatgggacagagactttgcaatccgaaagaatagactgtgaaatgagttcttaaagaaaagacttgtttatgtattaaaaaaaccacttcacagtgagtcgctttggctttttgataaactgcggcctgctctcagggtggggtgactatttttgaattcctatttattttttgtgtttgtccctgattttttttttttaattctatggcttcctatctggcagcttaatgggtaatttttgaggtatgtatttaacaaaataaacgacactgccgaaaaaaaaaaaagtgaagtgaaaacaatcagggcacattaaaatgatacaagtcaaataaatcttaaagacacaatgcacacttaaaatgactcaataaaatgacttgctacgttccgttattcaatttgtcattactgtagtgaacagatgcatttctgtggaattccaaataagtaaaactgaaattcagtgcagagaaaactttgtccactagtgcaagtcttgatcaaatgacattttgacattggacatatggaattcatagtatgagccacattttgttgtgaaatttatttacctgcttgtggcttcaaatctgaaaattaataagcctgctcgtttaaaagttgtttgttgttgctgtttttttgtctttttgttttttactagaaaatagttcagtgtaatattaagttagaaaagaagttgctgcccagttaaaggggctccctctcaaataaatctccatccttccctctcccaaaagacatttctgatttctgcttcactttgggcttcctcttcttcgtacacattccatctacctaatcaaacattttcagtccctgatctctcctgtcccttttcctgggatgacagccctaacaagaactgtttttgaatcgttgtgcagctccaggcaatagagtatgtgaagcgatttcagtagaatcacttactcatcctaaaagaaaacattatcccagttacctacatcgcaattaccttatgtaaagcagaactaatgctgactggatgtttaatgggatgagcattaaagctgcaatctactatagtactccagatctctttcggcttcctatgagaaacaccagaagcattactttccacttctacttacagtaattgcaagaggagacctcacattcaggactggcctagtgaacgtaatccatgctttaaactggccattaaacagtcccacatggttggattttttttttttttttgagttgtgctttcacaaaaccttgtcaaagacctcatgcaatatcactttgaaagttattttctgtttactacacaaacattgtaatataactgttaatactatttatatatttgaaaggtataaaaggtaggagttaaaaaaaaaacctctatgtgtagatattaactcagaacttacaatatacagggagaagacatgttgcaatacaagctaattctagctgctcagtaacctctggagtttttaaagggacattttcctgtactttttcaaataatgatgtttaaaaattatcttgacataagcgtcatatacctttgcaaaaggatggttgtttgcagttagccctggccccatccttcctatttctgtagtatgctgcagctttaatcagaaagtccatggttgctgcttcctgatctccgagttactctttccaaattgtcttcttacactgttgctgaaggtcactctgtacacgtaatggaaactgattttgccaagctcttacaaggtggttcatctatcgatggcatccgcatttggtatcttttacacttcaaccaaaaatttattaggtatttttcaatgctaagtcttgccttttattttttaatttcactgccaagtttgcagtggttctaagtgaatctgtgggcattttagcctgtggtcttgccagatctttgcgaattacaatgcatatatgtctatttattcaatatctgtcatataatatctatttggaagaagaaactttctcttgtagtgcctcttgacaaagcacaatttcccgcctttttttttttttgtgaaatgaaaaaaacaaattgtgttttattgcggtatcaacaatgtgaataaggattaacatattgtaaatgttcttttttccatgtaaatcaactatctttgttatcactaagtgataattaatttttaacttatgtgcattgttaggctgttagaattttttggttgttaaaataaacgcattcaataaatatgactttgtttgtcagttattt

SEQ ID NO: 12333 - DNA, 1162 bp, Homo sapiens
tatgtgagctttttactagaaggtagcacttaatttggcaggagatgttatccttgtcatttcctgataaccattaactacatactacagaagataggaacagctggtgcttttataacaaaggttgattggggagatgatagagcttgggggatctaagaggatttagaatggtcagtggtttctgtcttggctatttaaagaaatgcttacttttaagaattttaactaattgaagtggcaaataattttactttctttcatatgttccatgaaaaaaatctattgtaacatttagcagaaaagaatatcacttttatgctggagcttccatcgttgtatgaaaaaatgtttatattattaacatgccaaaagtatgataattcagttctacatatattagcaataaattgtaccaatgaaaataatgattaattatcacttttatctcttaacagtggaaagagtggaacgagaaaacctttcagactattgtgttctgggccagcgtccaatgcatttaccaaatatgaaccagctggcatccctggggaaaaccaacgaacagtctcctcacagccaaattcaccacagtactccaatccgaaaccaagtgcccgcattacagcccatcatgagccctggtcttctttctccccagcttagtccacaacttgtaaggcaacaaatagccatggcccatctgataaaccaacagattgccgttagccggctcctggctcaccagcatcctcaagccatcaaccagcagttcctgaaccatccacccatccccagagcagttaagccagagccaaccaactcttccgtggaagtctctccagatatctaccagcaagtcagagatgagctgaagagggccagtgtgtcccaagctgtctttgcaagagtggcattcaaccgcacacaggtacaattagcattaaacactgtaattaacagtaatactggggacagaattgagataggttataattatttttatctctttaaaaagctttatggatctcaggacatagaattagattaattaataatccttagttaatgaaacgctattaccattgatccatgcatgaccatgattaattaactaattgattaattttgatgaggtaatggacatctttgaacccaacat

SEQ ID NO: 12334 - DNA, 1208 bp, Homo sapiens
tcataaacattgttattttcaagattgatttaatgtatgtaaactaaattccactatttattcctaaattggtaacagtgctatttgaaaaatagctttttgcctgtatcctaggttatgtatttaaagtgctgtttgcatcaccagagtccagtttatctgtcctcatattaggcatgtgttatagctagtatttaacacatactagctatatgtgttatttatataacacatatatccaagtttctcttaggggctggtagatgttgaatatagattagtccattaaaaatacttacattacttgagaatgtacttcaattttgtgggtatatttattgtgattgaatgggtaggttaaacttttttttgttttgattttgatttaatattaaccattatcttgttgccaaaaattcttctaaatatacacttgcaaattacatagttatctaacacatacttggactgatgtaagatttacattatttgcaatgtctttcctaggtttcagagggagttcacacaaggagtaaagcctgactggaccattgcacggattgaacactcaaaattattagaataattttcttggaaaaatcagcttatggactttagcagttgctgtgaaaaactaaggaagaaaaattttggggtcatttgatcttcacttaatctaagtctgtgaattacttttatattattttgaaatactccttgcagtatattggcatgatacagtaaaagcattttccacagattgttatcaccttctttaaaagaagtcaaaatttaaaaaatacaatagcacgttgttggtgtcatattcaataacatttccaatgctacatataattttatagacataataaagaaggtattgaaaaaactacttacaaatttctttatatattttttaaattgtttgagaaacagggtcttgctctgtctccctggatgaagtccagtggcatgatcatagttcactgtaacgtcgagctcctgggcttgagcgatccccctgcctcagccttcagagtagctgggactacaggcatccaccagcatggctggctaattttaaaaaatttttatagagatttcactatgttgcccagctggtcttgaactcctcaagtggttctgcctcggcctcccaaagagctaggattataggcatgagccactgcacccagcctacttacaca

SEQ ID NO: 12335 - DNA, 1820 bp, Homo sapiens
agcgtgggtcatcttgggaatcaaataatctttctgcagacactccctgtgcaacagttttagataaacaacacatttcaagtccagaattaaattgcaataatgagataaatggtcatactaatgaaacaaatactgaaatgcaaagaaataaacaggatcttcctggcttatcttctgagtctgccagagaacctaatgcagagtgcatgaatcaaattgaggataatgatgactttcaattgcagaaaactgtgtatgatgctgacatggatttaactgctagtgaagtcagcaaaattgtcacagtctcaacaggcattaaaaagaaaagtaataaaaaaacaaatgaacatggaatgaaaactttcagaaaagtgaaagattccagctctgaaaaaaagagagaaagatcaaagagacagtttaaaaatagttcagatgtcgatattggggaaaagattgaaaacaggacagaaagatctgatgtcctggatggcaaaaggggtgcagaagatcccggttttattttcaataatgaacagctggctcagatgaatgaacagctggctcaggtgaatgaactaaagaaaatgacccttcaaactggctttgaacaaggtgacagagaaaatgtactgtgtaataaaaaggagaaaagaataacaaatgagcaagaggaaacatactctttatcccaaagttcaggtaaatttcaccaggagagtaaatttgataagggtcagaattccctaacttgtaataaaagtaaagcttctagacagacatttgtgattcacaaattagaaaaagataacttactcccaaaccaaaaggataaagtaaccatttatgaaaacctagacgtcacaaatgaatttcacacagccaatctttccaccaaagataatggaaatttatgtgattatgggacccacaatatattggatttgaaaaagtatgtcactgatattcaaccctcagagcaaaatgaatcaaacattaataagcttagaaagaaagtaaaccggaagacagaaataatttctggaatgaaccacatgtatgaggataatgataaagatgtggtgcatggcctaaaaaaaggtaatttttttttcaaaacccaagaggataaagaacctatctctgaaaacatagaagtttccaaagagcttcaaatcccagctctttctactagagataatgaaaatcaatgtgactataggacccagaatgtgttgggtttgcaaaagcagatcaccaatatgtaccccgttcagcaaaatgaatcaaaagttaataagaagcttaggcagaaagtaaatcggaagacagaaataatttctgaagtgaatcatttagataatgacaaaagtatagaatacacagttaaaagtcactcactctttttaacgcaaaaagataaggaaatcatccctggaaacctagaagacccaagtgagtttgaaacacctgctctttctaccaaagatagtggaaacctgtatgattctgagattcaaaatgttttgggggtgaaacatggccatgatatgcaacctgcttgtcaaaatgattcaaaaataggtaagaagcctagactaaatgtatgtcaaaagtcagaaataattcctgaaaccaaccaaatatatgagaatgataacaaaggtgtacatgacctagaaaaagataacttcttctctctaaccccaaaggataaagaaacaatttctgaaaatctacaagtcacaaatgaatttcaaacagttgatcttctcatcaaagataatggaaatttatgtgattatgacacccag

SEQ ID NO: 12336 - DNA, 1963 bp, Homo sapiens
ctgaggcgatcaggtcatttgaggccaggagtatgaggccagcctggacaacatgggaaacccagtctctactaaaaataaaaaattagccagttttggtggtgggcgcctgtagttccagctacttgggaaactgaagtgggaggatcacttgaacccgggaggcagaggttgcagtgagccaagagggtgctgctgcattccggcctgtgggacagagggagactctgtcttaaagaagcttcaaagttataaatgggaacttttgccttctgatacataatgtttgactgtttttttccccttttctagaatctgaatctgaagctgaagaaggtgactgaattttgaaactacaccctcagtaaagcaaacaggagttgtagataaaatgtcatgtctcatgtgtcctggttcttacatcttcctacctccctgtatcaagcatgatataagggctttcatggcaaattttattttaactgtttctatggttgctggaaatgttgggtttagtttctaaaaccatgttttaagtagctacaggagctatagatttgaatctaatgttgcattagtcttttcagttatcttctacctcctgtattttctactgtaataatgtaatttaaggccttccacaatgaacagttcactttattccctgggttttctataaacagttttaaggatatgatttggttaaaaaataatttgttataaaaattctgtttgcaaattaaactggaaaagtatccagagtctcaaaaggcaatgatttgtgagataatatggcatgcccggagccctgctcatcaatgaaaaacccatatgtaataatcgaattcatttaacatgaatcttgagtacgtggaccattgcttgcatgttaactttttgttttgttttgttttgttttgttttgcatttttaactccagatatcctaaagctcaattgtttggtctctggttttcatccttagagaagccatggagaacagacttgaaaagtttaggaaatcataatgtggcagaggtggtgggaagaagaaagttgagctttttccccttgagaaacttctgcatttagtttctatctttccaggcaaaacaaatgggtattcttttcatacaaccattttcaaatgaaccttagaaaagtcttaacatttaaggtattttatgcacagaatacacttagattgataggaaagaactcgtaatggagtttgagtaaagaaaatgactgatgtactaaacccagtaaaaattgttgaaaatgttaaaggtcagcatgttctaattgggaatctagatatagcttagatttcctattggcttagagtatttgctataacaaatgaagtgcaatgacaattatatattcctactcggtcatactggactggcttcgttctcttaatatactcagtaatgactcaagcctctggctattaacataccctagttgccgttttttaattgccatgagccaaatacttcttggtatacaattgatccatttattttaatggctgccttttcattttcatcttttcttgctgctacccatctatgtatgtagtcattggggggaaaatgtagccacattttttatgggaagactttgtgttaaaagtgaacattttgaaggtttttaactggtgaaactagcctggaataatgccaccagagactgagtggaaatcgccccttttgaaggtgccattcttatgagccaaaagtttgtcatttaaaagttcattttgagggaataacatgtaatataatttgaaataaaggtatagtaaccttaaaaagaacattataactgattgttgtgaatggggtgaatttgttaaaatgagtaactttgataaagtttttcatgcacaggcaaaatgtattcactagatttctacgtagtgatctgcttttactttgtaatttgtagttctcaaa

SEQ ID NO: 12337 - DNA, 1197 bp, Homo sapiens
caagaaacctgattagttttgatctattgaaatcacaaaagtagaacagggcattttatttttgtataatttaggattaggtatgcttctttgttctaacaagtcatgttttctaacccttctttcactaagcaaaccagaacagatttgaactgttatgggttatatattagtatggagatcagctcagatgacattaaaaatgccgtagtgttattcttgtatgccaaatctttttttccccaaaattagcactttaattttatttactgttataatatttgttttcttagattaggtaggaaatcttaatttggccaccgcctactttgacaagtaaatattacatcatacgattttgcaacattaaattagaacactagaaactaaaaaattatgtttcagtgaatgctacaactaagcattttttttttttaagaaaaacaattgtattatgttttgttgccttgccactttgagtatcttatctgaaaatctgttccttgccatgtttttctcctgttaacataaactatgtgccctgtgaatttctggggactgaatttgaaattgctcctgccaaccgtttgtggcctggcgtgtatctgaatgcctgaatatctccccgctgaatgaatttcgtattctgccctgaattcactcgggtatattgattggctggatgatcttggtgccgcccacttgacgtttccagaagagtcaccgaaggaaaagaaccaggagtgtagaggatgatgaggagggtcacctgatctgtcagagtggagacgtactaagtgcaagatgtatagaatatttttcaacacttattaacttttcagataacataatctatatatagattaagctttcagggatttggaaatctttttttctttctcttttttgtttttgttttatttttccatttcttttggtgggggggattgtatttttgctttctttagaaatgtaatgtttgttatatagaacttccagaacagtaatcaaattaatgaaattagacctaataattatgttttttgatggtgttgaccaataaaatatctagtgataaggaaatttgtagcatcaactagaataatctacattgatagcatttattgtgataagtacattgtttccacttcttgatatgactgagatttatttctctcttttagatgaaattgttga

SEQ ID NO: 12338 - DNA, 1143 bp, Homo sapiens
ctatagaactatgaagattactggatcatatttttttctcttaaccaggagtgcctcagagattctgctatgactttggacttctctgagtctgtgcaatcattttctggagaagcatggggaaaggtggtagactgctgcactttttcattaaaatgagggtagctctttctccacccccccatctcctttatcccgaagacataaatgttcaattacggaggcatttaaatcaagttgtgaccacctccattggagggcaggactcttgattgtgtaattgataatgcactttctcaatggctgtatagtcattattaacgtgtcttccctcttccccacaaggacatataaggtcatttctgtccttcaagtttggccaactaacaaatcagaatctgaggggcatgttctatttcccaggaatgattgacactttggtgctggggttttgtgggggcggggggtagtttttgtttagcttttgtggagattgtgtgtgtgagaggagatttgatttttttttcttcttttcctttgtgagctgatggctgaagtgtaacagtacatcttcaggtaaagagagggatttctcaatctactttctgttatgtcagactataagagaaaccctttcagctgctttctagatgtacctaaattcagtcagacattttggattaagaaacctaaagtcctgatacattacatactccaaggaaatatatcagggacagacaattggctgaaacactgatacttcaatgtgacacatttttatagaacatttctaccagggggtactgaccttgatttctcctacaaggaccacactgcctttgtgtttaatgtaatgcaatttgtgtaccttctaatcatatatctgcagttcctcatttttataaaactttgatatcatgccagtaagctagatgttgaatgtatgtaagtagcatttggtaactgctaagaggttacaaaaacattattggtaaaaaaaatttccttagttctgatctggttggataagattttatcataacttttctgggtctcaggctctgatgtttgaaaaagaagggaatatattgggttttaaaaaagtgtattgtgacttaaactgttataagttatccttccaca

SEQ ID NO: 12339 - DNA, 1216 bp, Homo sapiens
caaaaacaaagggtgaagatggtctctccctttcgttccccttcactcagttgtgctgaggtcaatagagtgtagagtttcagaaaggattccagcaggtttatatgtgaatataagtgtccctgaatggggcaggcattaaatagaagaatccctgctgtttaaatttcccgcatattccaattcacttttaaaaaataccatttgaatttgtatttcataaagtgactctggggtgcttactttagtcaattcttaaaattttttatttgttccctaagaaagtaattactgtttctgttgcctggacagttacagtttccaggaaacatcaggaagtaggaaactgtagggccagagagtagtacaacgttaaattgtccgatttatgtgtattacttaaagctataaattgaactagatcttgccgtgctctgtattgagtataatttgtatacttttttataattaatgactaaatgatcactttggaggcagggtggtgggggtgtattagcagccaaataagcacatctgatcaaaaagaaccaggcttagattttttttaagtacattgatgttgatgttccaccagaaacaccttaagtgtatactgttgtgtaatgtctctagaaaggaatcctgtcttaaaactgggttttgctgttttttgaagtttctacctaaaatcatttttggtatatcctgataatctctataatactagaattgtctgcaaaatatagtaagaagaattggagcctaatagctgattcctcccaatttatctgttatgttttgtcactattcacattttagtcttttctacgataaaaattgtatgtgtactttcatgccagtataggaaacctcaatcttttttttttttcgcctttaagaaggttttcagtgattatacctcaggtatttctgagtgtcctattgtctaataggagaaatatcttcccgagctcagaattaaaagttctcctaaattatgaagatcccaaatcttatgtaaataaccttaggcatgagtccttagggagaagttaatgaccattgttaaagtgcttttttagaaaatgttgtgctgtatgttcttgatttgacataaatgaatagactttggcaagggaggaaataagttaaaaggcagcttacaagagcctattccctataaagggtataattttacacagtactcaaagcttgt

SEQ ID NO: 12340 - DNA, 1126 bp, Homo sapiens
gtcaaaattatgttaggaaattaaataccatatatgaagtgtgtcttgatttgtcgcttatgggtttcttttccattattgttcaccattctttatcaaaaaagcacatgtgtataacttttggttaacttatttgcactaaaagacttcaaattaattgtgtcctacaggatttacatgggtataatgtgaagtcagatatttacagtgttgggattacagcatgtgaattagccagtgggcaggtgcctttccaggacatgcatagaactcaggtaagtgctgctaaaatccctgagctacttgcctttcataagactgcttacattctagataatttctgttaaacatgtttgctatagactcttaggagctttattgttgttactgttttaatattttgcctgaaaagtgttgaaggaaagttctgtttcttttagatgctgttacagaaactgaaaggtcctccttatagcccattggatatcagtattttccctcaatcagaatccagaatgaaaaattcccagtcaggtgtagactctgggattggagaaagtgtgcttgtctccagtggaactcacacagtaaatagtgaccgattacacacaccatcctcaaaaactttctctcctgccttctttagcttggtacagctctgtttgcaacaagatcctgagaaaaggtaatattgatctcttttaaatagcacaaaatgtacatgttttacattttatagaagctttgtaacattgcccttccaggagaatacaaatcttttgatcaaaatattgtctgctctagaaaatatcaatgctaagaacaattagtgggaacaagcaaatgagaagaatactggattcaaaatcagaagaggctgggtgcggtggctcacacctgtaatcccagaactttgggaggccgaggcgggtggattgcctgaggtcaggagttcaagaccagcctggccaacatggtgaaaccccgtctctactaaaaatacaaaaattagccggtgtggtggcatgcacctgtagtcccagctactcgggaggctgagagaggagaattgcttgaacccagtaagcagaggttgcagtgagccgagatcatgccactgcactgt

SEQ ID NO: 12341 - DNA, 1746 bp, Homo sapiens
ttctcccatttggatcctttgaggtaaaaaaacataatgtcttcagcctcataataaaggaaagttaattaaaaaaaaaaagcaaagagccattttgtcctgttttcttggttccatcaatctgtttattaaacatcatccatatgctgaccctgtctctgtgtggttgggttgggaggcgatcagcagataccatagtgaacgaagaggaaggtttgaaccatgggccccatctttaaagaaagtcattaaaagaaggtaaacttcaaagtgattctggagttctttgaaatgtgctggaagacttaaatttattaatcttaaatcatgtactttttttctgtaatagaactcggattcttttgcatgatggggtaaagcttagcagagaatcatgggagctaacctttatcccacctttgacactaccctccaatcttgcaacactatcctgtttctcagaacagtttttaaatgccaatcatagagggtactgtaaagtgtacaagttactttatatatgtaatgttcacttgagtggaactgctttttacattaaagttaaaatcgatcttgtgtttcttcaaccttcaaaactatctcatctgtcagatttttaaaactccaacacaggttttggcatcttttgtgctgtatcttttaagtgcatgtgaaatttgtaaaatagagataagtacagtatgtatattttgtaaatctcccatttttgtaagaaaatatatattgtatttatacatttttactttggatttttgttttgttggctttaaaggtctaccccactttatcacatgtacagatcacaaataaatttttttaaatacaaaatgaacatttatttagtttactattcctgtaatattaaaccaaagaagagaaagaaggaaagtatgggaaaatagtatggagggacaacattgggtgtgtccctcaaagagaatggtgtatattattgaggtcttttttgctcccgcctttaagatagagtataatgaatgccttgactgtcatttaattttttttttcctgttgttgctgcttcctgccttcctccacaccaccccactacatacccctaagcctttttacatcctgctttggatgactattgaaggtattgaataagcatctcttttagagaagtgctgtctgatctatgtttttactgcccttaggagatgaaatccatattcaaaagggactagaagatagtgtttatatttgctgctttttttggtagtgtttcccttgtgaagaatacagtgagtttttgggtgtttggttttttgtttttttttttaaactgatcagtgttttggtattctaatgtaacttatgtagattggtaatccttaaatgctttgggttcaggtgctagggaaagtcagtggatacttcgagattagaagccttgcttgtggagtgttctcagctgaaggcttccctctaccttctaggtaaaccaagcagaggtcaagcagctcccaaggtggcaatgactcagcagctccggcagcaatagactccatgcctgaccctgggatggcctctgaagccactgaagctattctttcctcttgagaagaggctaactttggaatcagattagacagggaagccttcactagccagaaactttgatatgaaagagtccctcgggaatggaaaaggcactttaatacatccaattctgagccttactagaattttttttctttccattca

SEQ ID NO: 12342 - DNA, 1390 bp, Homo sapiens
aaaaacacttcagttttatatagcgaataaactgggaagtgaaattgactcaggaaagtaagatgcataactaaatagacagaatcagaaggaaagacacctctatattctttagattaaagaacacaggattcttaatattagaggagtgtaagtatgggtcacatttggatctctttgcacttttaaattagtggccacgtaattgtagtcaatttaaaaactgcttttatagtctaacatttttctttcctcttacagctgggaatggaggaagaagatgtgattgaagtttatcaggaacaaacggggggtcattcaacagtttagatattctttttattttttttcttttccctcaatccttttttatttttaaaaatagttcttttgtaatgtggtgttcaaaacggaattgaaaactggcaccccatctctttgaaacatctggtaatttgaattctagtgctcattattcattattgtttgttttcattgtgctgatttttggtgatcaagcctcagtccccttcatattaccctctcctttttaaaaattacgtgtgcacagagaggtcacctttttcaggacattgcattttcaggcttgtggtgataaataagatcgaccaatgcaagtgttcataatgactttccaattggccctgatgttctagcatgtgattacttcactcctggactgtgactttcagtgggagatggaagtttttcagagaactgaactgtggaaaaatgacctttccttaacttgaagctacttttaaaatttgagggtctggaccaaaagaagaggaatatcaggttgaagtcaagatgacagataaggtgagagtaatgactaactccaaagatggcttcactgaagaaaaggcattttaagattttttaaaaatcttgtcagaagatcccagaaaagttctaattttcattagcaattaataaagctatacatgcagaaatgaatacaacagaacactgctctttttgattttatttgtactttttggcctgggatatgggttttaaatggacattgtctgtaccagcttcattaaaataaacaatatttgtaaaaatcatactaatgcttattttattttaattgtatagaaagaaaaaaatgcctaaaataaggttttcttgcataaatactggaaattgcacatggtacaaattttttcttcattactgtacagtgatgatgttaatgactttgaagcactgaaagttactgaagtgccttctgaatcaaggatttaattaaggccacaatacctttttaatactcagtgttctgtttttttaaaaacttgatattcctgtatggtgcatatatgatacagttacctaatcatgttgaataaatggg

SEQ ID NO: 12343 - DNA, 1236 bp, Homo sapiens
ggggaaggtgggaatgagttactgtttaatgggtacagaatttttcagtttctgatgataaaattgctctggcaatagatcctggtaatggttgcataacatcataagaatacttaatgctactgaatagtacacttgaaaatggttgaagtgttattttttattcttttttttttaaattttttgcgacggaatcttgctctgtcacccaggctggaatgcagtagcacgatctcggctcactacaacctccacctcctgtgttcaagtgattcttctgcctcagccctccagagtagctgggactacaggtgtgcaccaccatgcctggctaatttttgtatttttaatagagatggggtttcaccatgttggccaggctggtcttgaacttctgacttcgtgatatgcctgtctgctgggattacagacatgagccaccgtgcccagcctgaagtgttaaattttatgttgtgtatgttttaccacaataaatccctttaagttttgtttgtttgtttttaatctactacagccttgttagatgacttggataaagaactaaacaactacattatgcgatgtagagaatggtatggctggcatttccctgaattaggaaaaattatttcagataatttaacatactgcaagtgtttacagaaagttggtgagtaatttgttcatcctttaaggcattgaaagtaaatgaatttgattgcatcctaaaacatgacgtatagcattttgttaagcaagattcccagggtttttgcaatttctgtgtatttgggaagtgtagcagtttagtgtcttaaatttaagaaacaaaatgaattttaacttagattttgatggcctataacatgatattagtacctaatgctaaatagcagtattgccgtctgtactgttaatatacagaggaacttgattgttgattgtcgttaacgtacagaggaacttgattgattgatggtttacttgccttacgaattactggccccagcttcagtataaaattgtctgtgacattattattagtcctgtcttttttaaatttttgccacttatattctgtaataagtgttgtggcatattttgtcctctttttactctgattattttttggaagaaggtggtggggagacatttaatgtctaaacttaaacccttaaatgaggaaaactgttatactaggtcaaacttcttcattttttttgttttgtttaggca

SEQ ID NO: 12344 - DNA, 1188 bp, Homo sapiens
atttttagtagagacagggtttcaccgtgttagccaggatggtctcgatctcctgacctcgtgatccactcgcctcggcctcccaaagtgctgggattacaggcgtgagccaccgcgctcggccagaacccgcacatatttaagattgttacgaggaaaaagatgcacttcttttcagtgacctcatagcacagaactaatgtcactgagtagaaactaaagtttaaaaatattttttaaaaaaacctagtttgagctaatatttgacatgaattgctgtaaaatcttttcagccacagaagtgttggtggtgatatatggccattagattgtggcaaaggttgaaatacgatggatgatttgaattgtatgattcataatagttttataactcctgattttaaaacatccaagttattgaggattttacatctgaacatggaatatagttcttcatgtttttctattagatttctcgaatgctggcagccaaaaccgttttggctatccgttatgatgcttttggtgaggattcaagttctgcaatgggagttgagaacagagccaaattagaggccaggttgagaactttggaagacagaggggtaagaactacatcatgcctattccagaagtattacttgtcaaaagttaataaactgagtaaatttattaacttcatctgctaaacagttttatgatacttattagtatgtctaaagtattctttttgtgcctactgttaacaattgctattatttaccaagaattgatgtatccaactgcatttgccattaggatatgctattcaaaataacaaaacaaaaaatagcagaaattgctgtttgctggcccactgattcactagactgtatagtgtattataaagagattatgacttagaagtgtatttgtaatttttcgttttcttcttagataagaaaaataagtggaacaggaaaagcattagcaaaaacagaaaaatatgaacacaaaaggtgagtacatttaagtgaggatggggtgaatagtttttttaaatgttaattattgacagtaattttttattgtaaacttcaccttgatgtgcccatagttttttcaaatttatttatttgaccaaaattgtgtatgtttattgtgtgtatgttgttttggaaaatgtgcacattgaggaatgattaagtc

SEQ ID NO: 12345 - DNA, 1241 bp, Homo sapiens
agaagaagaaaaggggtaaaaagaaacacattaaggaagaaccactttctgaggaagaaccatgtaccagcacagcaattgctgtatgtttgtttttaattatcggttttcacttggaggggccagttctctatatttcaatctattttctatatcagaaatgagcaggcattttaaaaaatggttttcattgatggagaggtaaaagtgaaatggctttgttgtatttatattataaaaggccatttcccaaatctagaatttattactaaaaatcaagtttgcattgaggggaggagtatgatttgctcaagcttactttttttataggtggggtttttatattttcaatgtgattactcacccatacaatttcagctctttcaaagcattcttgttggctattttcagagtccagagaaaaagaagaaaaagaaaaaaaagagagagaacgaggattaacagaaaggaattacgattatatcacccggacacacatcatgcttaagattcaactgggagcataccagggatgctctctaacgtaatcaagggaaggttcagtaagacaaagtgatttatcatctataacttcaaacctatttgtcttgacatcaactctgttaaccttatgtcatcatttcttagagtctttgatatacaaataaaattttctttgtattttaagacaattttgtgatctctttatatcttaggtagagaatctttggctctttctgtagtttgccatgtgatgattattgttttgataattataactgaaaagtgagagttgttttgaaatttaatcttttggaagtcagtgattaagtggaccaattcaagaccccactctaatgtgtttcttttgcctttttggactactttttattttccacctataatctttctacctctttatttaaataaatatttgtttcttattcaaatttttaaattaggtgagcaaaactttttagttcaaaagggtgggagacagtatccctccctttactgtttgcaattctaaaaggcataccaaaataattcttaaaaccctgatttgtttttaaagtagtcagcctgaagtgacttttttaaaggttgtacaaagtgatcataaagaatggagaatagggaaaaaataagaaaaaaaaaagtgccagtttgtgtatgtcatagacatcatactaaagcccaattcagtaaaagctgttggtggatggaaactagaatgacta

SEQ ID NO: 12346 - DNA, 1239 bp, Homo sapiens
ctttgggaggccgaggcaggcagatcacctgagctcaggagtttgagaccggcctgaccaacatggagaaaccccatctctactaaaaatacaaaattagccgggcatggtggtggcacatgcctgtaatcccagctactcgggaggctaaggtaggagaatcgcttgaacccgggaggtggagattgcagtgagctgagatcgtgccattgcactctagcctgggcaacaagagtgaaactccgcctcaataaataaataaataattcttagattaatcatgcagttaaaccttttttggtggccttttcccccccatgaaatgtctttggtatcctttaccatttttctgtttcttaaaaatatgtttcctgttgatttgcaaaactgtttcatagcttacacgtactctcacatttattgaaattactgcttagtttgttgtttttctcttagttttctttatcatattgtctccttttttgtattcatattgatttataggatgttggtctcacattggagatccccaagagtgtcactatgaagaatgtgtagtaactaccactcctccctcaattcagaatggaacataccgtttctgctgttgtagcacagatttatgtaatgtcaactttactgagaattttccacctcctgacacaacaccactcagtaagtaaagtaaccaacttttctttgtatttcctttctccaaagatttgcaaaatataaaaaaacttaaaaaacattcaaggttgaagccaggcgtgatggctcatgcctgtaatgccagcactttgggaggccgaggtggatggatcacctgaggtcagagtttgagaccagcctggtgaaatcccgtctctgccaaaagtaaaaaattagccgggcgtagtggtaggcgcctgtaatcccgctactcaggaggctgagacaggagaattgattgaacccgggaggcagaggttgcagtgagccaagattgcaccattgcactccagcctgggcaacaagagtgaacctaaaagaaaaaaaaaattcaaagttgttgggagtgagaggtagagttccagcatcataagattacatctggcaaacacctgaaatccgaaagcgatgcaccaggacttccaaggcatcaatatattactaaataactttggtaaaatatagtactggccaggcacagtggctcatgcctgtaatttcagcactttaggaggccagagcaggagg

SEQ ID NO: 12347 - DNA, 1102 bp, Homo sapiens
acattgaagactctatccatcatactgacagcatcgtgaagaatatttcctctgagcattctatgtccagcacacctttgactataggggaaaaaaaccgaaattcaattaactatgaacgacagcaagcacaagctcgaatccccagccctgaaacaagtgtcaccagcctctccaccaacacaacaaccacaaacaccacaggactcacgccaagtactggcatgactactatatctgagatgccatacccagatgaaacaaatctgcataccacaaatgttgcacagtcaattgggccaacccctgtctgcttacagctgacagaagaagacttggaaaccaacaagctagacccaaaagaagttgataagaacctcaaggaaagctctgatgagaatctcatggagcactctcttaaacagttcagtggcccagacccactgagcagtactagttctagcttgctttacccactcataaaacttgcagtagaagcaactggacagcaggacttcacacagactgcaaatggccaagcatgtttgattcctgatgttctgcctactcagatctatcctctccccaagcagcagaaccttcccaagagacctactagtttgcctttgaacaccaaaaattcaacaaaagagccccggctaaaatttggcagcaagcacaaatcaaacttgaaacaagtcgaaactggagttgccaagatgaatacaatcaatgcagcagaacctcatgtggtgacagtcaccatgaatggtgtggcaggtagaaaccacagtgttaactcccatgctgccacaacccaatatgccaatgggacagtactatctggccaaacaaccaacatagtgacacatagggcccaagaaatgttgcagaatcagtttattggtgaggacacccggctgaatattaattccagtcctgatgagcatgagcctttactgagacgagagcaacaagctggccatgatgaaggtgttctggatcgtcttgtggacaggagggaacggccactagaaggtggccgaactaattccaataacaacaacagcaatccatgttcagaacaagatgttcttgcaca

SEQ ID NO: 12348 - DNA, 1246 bp, Homo sapiens
ttgttccagaaaatgtgcattggttctgaatgtgaaaatatttaaagagagaaaggaacactcaagtaagtgtgggcttcagtgggaattatcacaaaacattggcaagtatttttatttaaattattttcaaatttgacttctacagccaagtggaattggtaggctgtagctgttacactgaaatttctagtctttgtaagtgcctcctgaaagtcatttaaaatggaaaaatatttcaatgagcttttccttttttcatatttatggacatgaatattttattggagatcattaactcctagaatttgagattatatttccatacaacattttataaagttatgttgaacttactacctgttatgtgcaggttattatgtaactattcacagattgcttcatatattgctttatcttcccatctaacttcttaaagttaaaatccggacacacatgttgattatctagaccagtcattctggaaattgtaacactcccacataaaccccaggagactttttcagaatgcaatgtttctaaatgtactgttactggcagtttactctccagcatataaggttgcattttaacttttagattatgaactgtgcaaactttacccaaaactatcttgcatgattccctcctaaatatattccttgattaagtaaatctggcaaatcactgtttgagctagttacataaaatttgttatcaagagaaggcttttctacaagtttccagattaacataaagaaaagagggaatcacagggcatttaagtgcaccttcccattactttccttaaatcacctcatagttaggctgggcgcggtggctcacgcctgtaatcccagcactttgggaggccgagacggtggatcacgaggtcaggggactgagatcatcctggctaacacgatgaaacctcatctctactaaaaatacaaataattagccaggcatggtggcacgcgcctgtagtcccagctactcgggaggcagagacaggagaatcgtttgcacccgggaggcggaggttgttgcagtgagccgagatcgcgccaatgcactccagcctgggctacagagtgagactccatctcaaaaaaaaacaaaaaaaatcacctcatagtttatgtctgacttactccaaacctcagttatctgatttgtagtctgtgtcaggaaagttttcttcatatctattctgtctccctcctctttgattttaaattttttt

SEQ ID NO: 12349 - DNA, 1172 bp, Homo sapiens
aaaatcctaggaagttatctgtaaccagtctcttgtctcaggctcttcaccttgttaccaatcctcgtaagtatgtaaaggaaacatatttttaaagaagcttaacagtaagaaaaaattactaaaagatgcaattcaaagataggtcccagtttaacactgaattgcttgacttctgtggcttttctttttctggccacatttatttatttaagcaatttttgtatgccttgttatttcatttccatagagattatattgtatcagtgtttatgtaagctggaatcatcctcagttttttgctgataatttttcaaataaagatacatggataattgtaaaatacactaactcttagggtgttgtagtagctgaaacatggagatgcgtagctgtcatgctttttctgaatggacaggagaaacataagctacggagtattcacttctgaggatgcttttccggaaaaagaaaggctagaaaatactcgcacttcctcagaaccctctttcttgttaacgggtatcttttgttggtgtgttttgctcttacattacagatagactatcatatatgactttatgaataatttcagttattttgcttttgtataagctgtctgaagccttgctatgctgtataagttgtgtttgatggatcagtgtgagtataaaataaagcaaatcacttttcttttgtattatctatggatgccactatgaaagctgacattaagccactaaagagttttctatgaataagtgtaagtaaatgctttgatatatataaacctaaataaaaagattgtattgatacagagacattggagaaggagattttaaggcagttctttaggtttaaaaaggcttgctgtaaaatggtgcgttattccgtttattaaagatcatattaatgacaatagtaattgtgtttttttattttaagaggtcaccagaaattgttagtatgataattagggagtttgcactagaatagtaaatgttctatctaatatgactttcataactcagtatgatacatcaaaaaataaaaaataaaaaaaaataaataggccgggcgtggtggctcacgcctgtaatcccagcactttgggaggccgaggtgggtggatcacgaggtcaggagatcgagaccatcctggctagcacggt

SEQ ID NO: 12350 - DNA, 4062 bp, Homo sapiens
caagaaccatcttttctatgaaaatgactattttataatataccaatgttacattttctgaaacgtagcaaacaggatattcaaaagattctttggtggcctctgtttcttgttccctttctagatgtgtgcttttctcagctgttttcagctttgggaccaaagggattgttgacgttttcccagcaatcttaatctcatgactatgttcttctcccaaacaaggattgataggtaaatgcattgaacaagtatatataaaaagagattaaaaagcaatattcgtacattatgtgatttatgtttttgatgtcaaaagtttgtgctttgggtgaaatatttgtataactgctgttttcttcactactcctgtacacatttcaccatgtggtcagaaaagttgtagtctgaagacaagtgctttaatatgttctcacccatattggaacttgatttaaaagtcagtgagccaaaaggaagctatccagcgttgattgctagctaagagtaaggagcccctttggttttctgtgatatatatatatatcacacgctctccctcctttaccacaggtgtcattctacctttaatcatcactgtatcatagccccaaagagatcctgaaatggctgtgcatggatttcctcctttgcccttgtgatgttgttgtcttgtggatttggttgggctagtagtttgccaggagtgtaatccagtggatagtgatccaaactgtagccgcagaatcctgtgactgacatttttctttgtggtggtggttggccctgagatttgttgcctacagattttgctaatttacccccctaacgcttcacatagtggggaaaatacacaagaagaacttgagtatgaacgataagcacctttgaaaactccatacagttttggattagggctcatcctaatataaatcactgccagtatcacatgacatcagtatgtgatttctgggtatgtggtagtgagattaaggagcagcttttttttttttttttttttgagacggagtttcactcttgttgcccaggctggagtgcaatggcgcaatctcggctcactgcgacctctgtctcccaggttcaagcagttctcctgcctcagcctcccaagtagctgggattacaggcatgcaccaccacacccagctaattttgtatttttagtatatatggggtttcaccatgttggtcaggctgttcttgaactcctggcctcaggtgatctgctcgtcttggcctcccaaagtgctgggattacaggtgtgagccaccacgcccatccaggagcagctctttttttaaaagtgagtttcagcaaacagtattgaataaaagcatccttttcatatcttcatatactactttatgatgcaataatttactgttcctatacatattataaggtagaaaaaagtttttaaatccttataaagaggatgcagtttagaaggttaatatgtcagcttacccagacatattctatcaaggaaaacctagtggtagcaataaatctttggaaaggacttcttatactcatgtacctttaaaacatctaagcaatttaaaataatccctgttgagtttaaattcgagatgcatttaggtaaattggataaattcaacatttgaataaatccgtcaggttttagatggtgggattgatgaactttggtactttctcaatccaaaactaatttatttggaactagtacgttatggcttctcagtcatgaaaagctcagttatttggggtctacattttctcactgagagccttgatattttgccttctttgttatgcattataacttgactgtatcaccactgagtatctgctgtatcagaagttcagaagaaaaggtaaaactgaaatcagaatgggggtagaggaagttaaaaacaagttatttaaaaagaactcttggtttttggatgacttgaattctgttaaatctgtgttcttggccttgcacttccgttcctcttccatctctatccctgctagtcacaatggcattttagaactagaatgccactctgtagaggttttcccttttgctctgttgtgcctatttgtctaattcatatctttctgtggagtttcatatgtccttaatctaaagtaacttaaaattggaatggaagaacaagtttcagaattatttacagtcttatacatagaacttctagtgtaatgtttggttgtaaggagaatgtgaatttgcaggtaaatgaattgtatggcaaccagacagatccctggggtttgggagaaatagagcttgagatttgaaaaaaaggtacaaggtacaaaacaactctaactgccagtgccaaagggctaatttttaagcatgtaagctttaccacagtcttgaaaaaaatattaaccataggttcattcagctgttttatttaacccttagttccctggtggttgattttttttttaaatgggtctccagctttccagtgaaatgtgacactctcaatagaatgcataatgttggtttctaaagttacactccataattattgttattctgtagaaaactgtacagaaggtaaatagaatagcttcaatgggaatataatttaaatttttttaattttataaaaatttatttccattgcattaaaagaaatgggtagcatgtgtctttcagagaaaggagctatttggttattcactttgtcaatcttaggtttttttaaatctttaaacaatttcttctttgtgatgataaaaataatataaatttactgtttctgatcatgactgagtctattacttgtcatggcttttgtacgcaactgtgttttaaaaataccggttttgcctctttggttacatgtggtgagcatggatgtcaagattatttttcaactagattattcaatttgttttatatttcttatacttaatacttatgactacagtccaaatcagtcttttagaaggtgctcttgctaactgtggaatatttgacgacatgaaagtcctttttctttgctttcagtggttggctttcactgaaagaaagtgtaaaaaaagtcagaatttatagctttcactatgtccaagactaggactgggttataaagattttcttttgtgaaggaaaataaaagaaaatttgccactactgcatttactttactattgtaaacttaagattcattccttagtctttggaattttgatgtctcaaaaccagatgagtggaagtgctgaatttgcaaaataaagctaagaatgcttaactctgcactttaagttctactctgaccaaattgaagatgagcagagcagccctgaacagcattttgtttatacagtcttgtttaagaatagaatttttttaactcttcattttttgtctctgtggaagctgtgtaactctttttaaaatgcaatttaaaacattttgttattctaacaattctctcaaaaaacagcatttccaatggtaatcggtattgttacgctgtacttatgtattccctgtacctgaacacttgttgctgcctcacaagaaaatagaacttttatgttaaaaataaagtctgttcttcttgagtttttttctgtgaatttttatgaatattgtccaaattcaagttacatttctttttggactggttatttatctagcttttaagcggtacattgtttttctcagactaatagaaaaatttgtttgtgttcagcagcaagttccttgctacccctcacctgccctagaactgaaagtacctgctctttggggtaagtgctaggcacacattaaaatataagcagcacagagagatacccacgcgtgaggaattcactgcttcagagttttgttagaggtaacttagctggggcagtcacttacattcattataaagtacatgagaggagtttttttgttttaattcttggtaattcagccatattcttcctttgtgacagtggcttatatatgcaagacagtcgttgggtttcaggggacagttgttgagttttggggattttgtctgtatccacacagcaga

SEQ ID NO: 12351 - DNA, 1187 bp, Homo sapiens
acctgtgaggatgagatgtgtcagaggactcagactttggtatagttagaaaaataatatttttctcacttgattctgtgtgaatgtctcttctgatactgttttttaatcagaaagttacagagcaactttcccacaaacaaaccaataaaacaaaaccccacaaaaaccaagagcatgaagaaaagtttaaatccctaattatatactcttttggtttttaggtagaaactggagctatcaatattttcatgtaagtatttcaaggagtagctctttaaaaatggtttctaaattagattttaaaaattcattgtcatctaaatgcatgtttagtcacaatgtatcagtattgtgtttaaaggtgctcagcatcactttttgaaaactatgtttacatatttaaaatgtttaattattttgaaatgtatagggtattaaatacaagcttctaaaattttcagtatctatattggctttctctaacagctctacagcaaagtttgacatgttttttgtgtgtgtcatgtattgtaagttgtaatatctgtaggagtgagttggacattctaaattagcagtaaaaaattcacaattacagctcagcttgtttattcattatagtttccacatttccaacttccaagtgaactttatatatactacagtgaattatagataaatacagccatggtggacctttccctcaatagtgattttttgtacaaacagttagtataattaaaaggaaaagcttttatattttatgcaaggtaaatgtttcctaaatgtcacaaaagtgatagaaaacatagcttttgggatctggtcctgcattagagtttctaattctgagacccaccagcttgtgtttcatcttctttatatcctgtcagaatacatacttaatcatgtgggtatgagaaagatgttgtttaacttgtaccaggtttaaaaaaagaggtttaaaaaatgtctgtgcgtatatatatatatatatatatatatatatatatatatatagcaacttgatgtatagtgtccttgttaccatgtatttttttcattaaaaatcctgctttttttttatacttgttagttttctttttatatttttcttagagatagtggcaattttgttcatcttgaagatgctgaataaacacttgaatacccgagaattttgg

SEQ ID NO: 12352 - DNA, 1211 bp, Homo sapiens
ttcactcccctaatgctagtgcctaaaactgtgcctagcacatagtaggtgtgcaataatatttcctgaacaaatgtagggggctcatggaaagtatttagttgagaggatattactctattatttaacatataccatcatcctattcattttaatttttcttttttatcttccagcagatattttagtgtactcttactctgtacaatgagtaatatggagattagttggaaacacagtgccagtcttccaaatagtttataatctaattaagaatataatcttttgaaagtatattcttctatagtttctcattaaattaccttatcattaaaataactgaaaatattatttttgatataaagtactatgtactttttgaagaattttgtattctaaatctttttacaggttttgcaaattttgcagttccagccagatgcagcacatcaaatatcacagcaagtgggttggcaagacaccttagttaggctttttttaaaagcaaaatttgaaaacggaaatactcttcataagcacagtagagctgttttaatgaaagacaatgataaaaatatgtcaactgaagataccaagaagaactctgatgaaaaaacagatgaggaaaaaatcacctcttttgcctcagctaatgtgtcttcggatcagtggagtttggaggatagacactctttagactcaaacacaccattatttccagaagatagctctgtgggagaattgtctttcaaatcagagaatcaagaggaattctggcatagtaacccttcacatttgagtttagacctcagtggaattgactcatgtgaaatgagtgatagtggaagtcaagtgccagacagtctgcctagcacaccatccccagtagagtctactaaatcgttttctgtgcactctgacagagaaagcagcatcacaaatgatatgggctttagtgatgacttctctttacttgaaagccaagaggtaaaattgcttatttttccaaatgttgtttttattttcatgtctgatatatacttctaatccttagaaatatgtgagcagttgttaacaatttcatattgtattcatgttctaagtttcatgatctaaggtttagaaacctggaagtcactagattgtgagttttttgagagcaaagctaatgtcttactcatcttatgtctctagggcctagtaaagttcca

SEQ ID NO: 12353 - DNA, 1502 bp, Homo sapiens
agttgacttcttctggttttaggagctgtggatctggatgccttaacagatgagaaagaaagaaaagccttagaagggatgattaataattttgggcaaacaccctgtcaattattaaaggtaagtcaacaacttaagaagtagatttaagtcaacttaagaagtagatttaagtacataacaaaatattgcagtcaagatccatgtatatagccagttactctcagtcacagaaagatttctgtttgctcagaaagtcttatattatttccaagaggaaaaactgagtacctattagggtatgccattaaaactgtcctcatgctgggactcattccacatgtaaaacttctaatagctaacatctgcccaaaaaggcacttgctttccagagcccaaacccagtcttaagaatcaaattgctctcggctttcggctcggaggaggccaaggtgcaactttcttcggtcgtcccgaatccgggttcatccaacaccagccgcctccaccatgccgccgaagttcgaccccaacgagatcaaagtcgtatacctgaggtgcaccggaggtgaagtcggtgccacttctgccctggcccccaagatcggccccctgggtctgtctccaaaaaaggttggtgatgacattgccaaggcaacgggtgactggaagggcctgaggattacagtgaaactgaccattcagaacagacaggcccagattgaggtggtgccttctgcctctgccctgatcatcaaagccctcaaggaaccaccaagagacagaaagaaacagaaaaacattaaacacagtgggaatatcacttttgatgagatcgtcaacattgttcgacagatgcggcaccgatccttagccagagaactctctggaaccattaaagagatcctggggactgcccagtctgtgggctgtaatgttgatggccgccatcctcatgacatcatcgatgacatcaacagtggtgctgtggaatgcccagccagttaagcacaaaggaaaatatttcaataaaggatcatttgacaactgaaaaaaaaaaaaaaaagaatcaaattatagaatatttaaaatgtagaatcaaattattaaatattactacatatatttctttccctatactggtatctgaaattaaatcattatcttcctgatgacacacaggtttagattaatggaaattaatctaatggtagttttcaaagatgtcttgatctttttcagtatatgaatttagtgatgtagaatgtacaaaaaaatatatcatttattaactagatatgttcttaagcaatcactgtgtttgttaggtactttacctaatcttcatagtaaaaattcagctatcctcattttttaggagttaaagccaagcctcacagaaggtaatacctagcctataatgcctttgagaaattaaatactttttctatgtttacacaacaagaaagtgactaggattatatgcctgaccatctaactcc

SEQ ID NO: 12354 - DNA, 1182 bp, Homo sapiens
agaatcctgtctaactgttgtgttccttactttgtctctcaccttccctctaatctctctaaagggaacgtaaagactatttaccttagataaatgatgaatgtaataataagatgtaaaaactgaagtaataatagaatgggttggaaaattgaaaaaagagtaagattctctaggaagtcaaaattcttatattttagcttcatggttgctttattaatattttgtttgattatatatggttagaagaaaaatagatgtcaaaaatagagaaaaaaatctatcaagtatcttaactaatgctgtaaatacaggcccttgtgtgagtcacttagactttctggacacaagttcccacatctgtaaaattagaatgcagaactagatgagcattaatttattttccagatataaaattctgtgaattcattataaatccgtgtaattatgtctgtattttttatttcttttctagcttgaatctcagcatcaacccattagccatgcgactgcctatccattgtgtttgtgtcaccaaagaatacagccatattcttgtaggtttagaagatggcaaattgattgtagtgggtgttggcaagcctgctgaggtaaaacctagcatcagtaatttcatttctcatgctgttggggattactttggttctccttcattccaactgattgagaagtcaccattagggataaacaaattaaaagccaaatttgatttttcaaaaggcagtaaataaaaacaggataaagctgttattcaagaatcatgtttatgttattattgaaagcccacctttggcaattctatctaccactctataggaataagacagttcatttcttccaaatctagattcaagaccacaacttagattttcaatacataagagcctttgcaaaagaataaaatataggctcaaacaataaaactactttagttttaacaaatactcatcataactatttgtcagttgttcttttgtaaaagcatcattttttatttgtaactacaaatatccccatttagtgtgcttattctcagtgagtttcctatagttaaatttacttgctaatgatttatcaattattgaatattcagatatcataaatctaactctcactcttaggaaaactttgtagttatactccagtaacttactgattctt

SEQ ID NO: 12355 - DNA, 1170 bp, Homo sapiens
agttcagttgatctggaaaaaaaattatggaccaaatgtgggaaatgtcaggttgttttttggtggaactttacagatgaaaaactatacataataaaacattaatatgggatagtacatcagagtatgattattaattaaaattactcaaatctgtttaggaaaatgtttttgttttattataaaagaagtttcttcagataggcattaaactggaatataaaaaggcaatatttattgttttaatgtgttaaacctcaacatttatcacttgtatttatggataattttttcaaaatgtggtcaaaacaagcttattgaactcagttttcccctcaactttattaataagtaaatatatatatatatatacacacacacacacacacacacacacacacacacacatttttttttaacctgtcactgacttggagctcaaggaaattttattttgaagtggtacgcttttgaattacctttattgtagctacattcatctcagaaaatgtcgggaagtgctgatgatctcttactgtttataaatactcatgttttggtggctcttatttctttagcagcagtgggagtagtggagggagccacccaagtagtcggagcagcagtcgagagaacagtggaagtggtagtgtgggggttcctattgctgttcctactccatctcctcccagtgtctttccaggtaaaacattcatggtgcctcgtcttcacttttcctttctgaatttgattcaatttgtgatttaattatggtgggctttcttcgtaatcaggattttttttctttaggaatcataaatattgggaagtctatatatttgttatttgtaagcaagtgatttgtaagtgtttgctcactttgcacttctctttatgcctttggtgatgtggctcagttgctgctttgaggtttcagatcacactttgttatgagtacaagtttaattccagctagtgttatgacagtgcagtctttggacacagtgggaactcagtgtgagaaccatattagtaacaaaggattgggcagatataaaaagtagttttgacagttaaatttagtggctgtattggaatttagtagtctctgaaaatactaccctcttttctctgaaacagaaaaatctgcttatttgattcgaggagata

SEQ ID NO: 12356 - DNA, 4553 bp, Homo sapiens
agctcagcagggctgtgcttgcctcacaggaatagtcaggtcttcccagattatctgaaggccctggggattccactccagtaaagtagaatgaaggatacaaatgataaaaattacacttttttttttggtttattccccagtattaaaaacaaagcaagctgagtctgaacaaatggatctttctgccatcatttgtacaatgctgagctgtctggattgaaataaaatgaccatttttatgtatgtcaaaggtataacagcataactgtgtagccaaaacaaaatcagattaagactgattcagaaaaatctgggatctttctcaggaatactgtatacccttgggatttctcctcctgcagaatctgtggcattggatgttcttcattgcctgtgctaaggggttaacctcatggcccagtgggtaccctagccccttcttttcttccacttgtatgaagaggagggaaccaacatttaaataccacacttaaccatttttacaattatttcagatggcttttttcctctgtgacactgtaaattctgcattctctcagcacttgagtgcaccaaacgagtgaatgctgaactcacttgcatcccttcatgtttctgtttgtggattataaggatgatgaaatgtgaaagtctcccaacactctgagggtggtgaacgattgccacccgtttgattttaatgtgctgctgcatgagactgcattgttgctaatggccagtgtacccagatgtgaagtgtggtaggctggttcatatgtggaggtgggtgtgtgaagctagacacgaaggtccctaaggttctgaagagacttgaactgtggaaatgctcttagcaggcatcccgaacccctgcttcggtgctgttttgaggagtaggatcttggagttcagaccaactatgactatcatttccttcactatctagaaaaacgctattctactttggaagagaatagtagttattttcaagtctcctgacagtcactgggagtacaaggtttgctaatgtgctctctggacgttattaatggccagtattagttgctgctgtattactgactcgcttagctgtagaaagggtaatactctcctgattttgtatgattggactcttaagtagctgctgttagtcagaattaaaacccatctcagactaagaatataatgaataagattaataggccaaaatatgtatctaatcacattgataaaaattaatataactgacacaataaaacacatttcccccatctgtacaataaatacagcttcaaattcagtggagtctgtagggcagataactttaatcatcactactgtagtcagtataagaaatgctgaaaaaaatccaggagggcttgtctctttgtgggtggtcactgtgatgttgggccagctcctgttcaggtccagagctgctaacgtgggttctactcagtcccagtgacttggccagaatagagctttgccaggtaactgccctgtgctaggtgaaaggggaaaagcagtagctggatatatttcaaatgaggttttgaacaagttcagaaagtggaacttgattgaaaagtgaacaagtgtagtagtgtgtgagaaaattcagatggtgtcggatgcagaagttaatattccacttaatgttatctgagcattaaaaatcatcagcatttaactgagaccccactatagagtttccttatcaagactttttggttttaaagttgtttttaatgcattgcaagttacaatagctattttgcttttagatttttcccagcactttgtatttattagctttcattaacttgcctccagtatacattccacttcgtgcttttcttaggtcatttctacatcccttattccttgttttcctgcagtgtaatggccctgaatgtcctctgagccttcagctccattatggacccaaactagactatacttggataagttaagctcttcttcgtgtactggtctataattagaaaaactgttttaaattagatgttcccattatttatttaaacagctttttgctgagaaagcttagtggattaatgaggcagagggtgttttgaaatccaataaatagttcccacaggctgggtgtggtggcttatgcctgtaatcccagcactttcggaggccgaggtgggtggatcatgaggtcaataaattgagaccatcctggccaacatggtgaaaccccatctctactaaaaacacaaaaattagctgggcgtggtggcgcacacctgtagtcccagctacttgggaggctgaggcaggagaatcactggaacctgggaggcagaggttgcagtgagccgagattgtgccactgcactccagcctggtgacagagcgagactccatcaaaaaaaaaaaaaaaaagttcccacagctcaccactacagaagcagggaagacaactatgcagaaaacagagttagtggcggtcagcaggaatgcagctggtcttttggacccctacgggatgggggcagtgcagaagacactggtgaagtcctttatactgaagacctgtggttgggagcaggggtagtccatgggtctgctgattttttttccctatttagtactaatgtgtgtgtgatctttgttttacaaacagtaccttttgggttttctgcatattttataatttttgtacagttttgaattctatagattgtcttggaaggatactgtgtgatgggtcaggcacacagtaattggagacttttaatgtatgtaatatttcatagattgcatgctattaatcatctgtgagggtagtattttttgttttattgtaagtttccctctttttttataaattaaaagatggttggtattaggaatttcaaatgaatgcagaaaatcttacatgctgtgtactattaatattataacagacgatccaagtccaaaatctgaccaataaagcaaccattttatcaagatagagggattctaatgggagaggggattcttccctcctgaagtttgtgtgtccagtccccttaaaaaaaatgaatagttgtcttttcttgtcatattaatactcgaaagtccatggtggtattaatgaaagtacactttattgttgcctttgaacttacggccaaggcaataaatcagaaacaaaaatagtgccaatgtgtcaaaatcgacatctgagagattcagcctcccatttggaataaatatgaatcttctaagctatcttgtttaatattttccatcatttagctacttcctatctccctcagaggcgcctgctgttcccattttagagttgacagtggcctgctaattttgctatgttcctaaaagttactgggtgtgagacattttcatcccctcctttttcctactgctggtgtttattatccagctagacaatattttatgcatatttaccgtgatgtctggaccgtacctgtgctccttggcagtttatgttgaagataactaaagatttttctctttgggaggcatcaaaatgatggtagtttgcttttatctttttatgttcattttcttttagtaggtgacctttctgcattaagaactgtttttatcttttactaccttttcttttctcctttgtggagacagcatgacatgtcctgaaggtcacctttgcctttgaaaaaggtttgatggaggaattcacaggtgactgacaagtctttgaaaagaatgggatctgctcacttctggtctttttggccgggaactcctgattggtgttaaggtggtaatttcccccatataagatttagaatcactgagtttgagctagatgaaatttttaaaatttctggttgtctcattagactgatgaggtgagttttcttcttcatatgaacagctagttaataacagcagagttctcactcagtgctcagtacttaattttccactgcaccacaactgtcttaactaaatgtgctgtatttttctttaaaagttaagagttctatttggtgttttcaggaatatacgtgaaaagacatgccatgttttggtaaataccatcagagttgtgtaaaggcgtgtactaagtgcaatcttaatttgtggaaataatcttcatttacccctcctaaaactacactcagtataaacactttcccataaggtgtgtgcagtaaaaatgttatattactccaacactggcaggagcacagcacagcagccttattggagagagccttataaaagtgattaaatggaggcattgagctcattacctttaagtttactttgtgctgacctttgttcctgttttgagaatctcatataattattaaaaaaaaaaaacaattaaaacgaaacggcggggcctagctgtgtataaatgatccttgctgaatatcttaaggttttttgtaagaaaaaagaaaaaccaacaaaaaaagcttattttcacattaaaatgaaacctcttttgcaacttaagaattctatggaaaagcagtttttatcatattttgtgtccatgcaccatttttcttaaa

SEQ ID NO: 12357 - DNA, 1214 bp, Homo sapiens
aaaggaaggtggtatttctagttttggcagaaatgaaaagtgtctcacaagagacatcactacccacgtggggtctggctgctttctaccaaagacatttagagaagtgaattgagtcagggtgatggtgaacactacatattttatagatggttaagttgagaattaattatgtttatcatggatggctactaataccaagctcatgattgttgcagcctcaacgtcttaggcagtaaaacttgtctgcagcactaaagggggagaaacccttatattttgcaaactgtccattcgttaaatttattgtaacctaataccaaaaactgccgtttttcatattatttccccacctcctacttttttttttttttttgctacttgtaaaataaccccttctagaaaataagcattaactggaatgtttcaaacaattttgcttcattttactatcagccactagtgaactcttacagagatgtacatttaagataaaattagcttgtgctaagtgttttaaaaacattgtttactgttaaaggggaattgcacattatatttaactgggattgctccctccctcagttctttaaaaaacaagagtcaaggctcacaccaacttgtaggctgtgggagctttgccataggtagatacaatgtagaagtatacttttttaaagcatgaagaagacaaggaacttcattataatgtaccaggtagaggacattattattcaaaggattatgcacagctcagtgaagatgaagttacaatttttctcgcagctttgttgctattattttcttctgcataaatgtatgctcatttcattatgtgccttgctccctgattgtgcaaagctatatatatatatatatatatatagatagatagatagatatatgagagagatatattcagtactactgaggatgtttttctgaggatgtttttgttctgctggattaagttattttccaagttactcttgccagttatgtcagtaaactattgtaatggcttagcacactagtcgtacagtcagtgtaaatgtttttcatttacatgttttcattatatcagcttatcaaatccttaataaaaaaaattcatagatttcatttaaacatggggactttgagtgtttgtggatcggcaccattaagaatctggttttgcatttcatgtcagggtacccaaaacataggccata

SEQ ID NO: 12358 - DNA, 1101 bp, Homo sapiens
ctggaatagcagacatccttttgaacactaatgatgccaggaagagagtaaggctagaggaggagactcattttaaccccagtccagtggcttgtccgacaacaggccatttccctttacattcctccacagacagaaatggctattaaaaatgttttaacctcatgtatgaactgaatttaaaaaaccactaaagtgatactttatacttctgttttactccctagtgggttttctttaatttggatttttgttgggatgtagcttttcctagactgtatttctgtagctctttttctctggtgtattcatggaaagcatctactgccgcacgacactagtactgtgccttctttcactgccctctgctctgcagctctcacccagcttggctgcttcaagtctgtgcagttgacttggctgtactgaaaagtgaacagcatggattaactcatcctgctgctgagggcagtgcaaacaggtgcttattagaggtagtgacttgcttaattagtgacactcctaatttctactatggataatttcaaagtagaatcactctatgcttagagttttggcaccaatgctgtagggcagcagaatctattctcagtaaaataacttatggtttattagatattctgtattggattttaccagcttgacttttactgctcagatgctttctttcccccccttagacgctgtaattctcttgggaagagtaactattcttaaggtttttacagatacccaccttagttgtaaattggatagtttatatttctgggactttttaaatgaaaatgtggaatgttaagttacaaaagacttttcatcagaaaatttcaaacaaagtaaacatggcgttttatagtcctctaaaatctaggtgctcccacccaccaaaggcatatcctgcaaagggctgtgaactatcttggtgaactgtcttgggtcccctttccatgtatgttttcttgtcactgaaaacaaacaacgctgagtttatcaagaaaatttaaattgggggatcataataattccaaccaagtgacaactctgacatcaaggttattaggagctgtacatccaattcaa

SEQ ID NO: 12359 - DNA, 1148 bp, Homo sapiens
gaaaaatcaccagaatgtttggtgtatctataaggcttttgtgtttgtttttccccagttggctgaagttagaattgcttgactgacacttcattgctatacatgaaggggcactttaaatcaggaaaatctctcagcttcatagaacgggtaactagtgcaggatggggaaatgttcacagacatcatctgtatgtggttgtgcatagaaagtaaatacatggcgtaattaactcagctgttctagctgcagtactgctgcagtgatccacccacatttaggatgtgctgacagataagctctttgcctacaatacatggataattagtgctataattctggatagttcctttttagtactgttttatgaagctttatcaacttggcttcatgatcctcactttgattgattttaagaggatggataacacagttatctctgtaatgttctgtcccagtatgtctttgggtcaccagttaccttcttaaaatatgtgctttaggtaggtgttattacatatctgtagacaattggtatatgaaatatacacatcctgtgccccaatatggtgcattatgaaaaacaaaatcattttctaaaatgcattttttgagcattgctctatagaagggaagggtgatgagagaacagaactggcccctgtacaggtgtcattaatctggttgtatatgggttataatatgtaatacaaaaagctcattaagtatgggactacatggagagggaagacagtttcatttatagctactggggctaccaggacccttgctgactgcagcctggttgtgattagttcaggttactaggtgttctgatggagtgggacagtccaagtccagtaactgacattacgttttatgcgtgtgcagtttggtataacgtggagtcagtgctctaacgacacactatacttctatatgcttttttctgtgaattttccttggtacatgagagaaataagtactctcatcaacttatgataaattggactattaggaataaaacaatctcagagcagctcctaaacaagagaataaaaatgggccatcccagcacttataaggggagcacatcttgtaatgaaagtctgtgcctattgttaatgattaccaatgcaaactgcag

SEQ ID NO: 12360 - DNA, 1211 bp, Homo sapiens
agacaaagaaaatctcttccattaaaacctgcatcacgaatccttctgctccaagctctcaaccatctctttcaaactgccagttcctgggctgaaatattatttattcctttcctttccaataaaacaattatttgttccaccatttcccccctcgttcactctccggtgtgtctggcttcgtcctgacagctcggccacggactgtttacatgtctcgctcaccctccaagactctggttcagctccattgacactaaaggcaggcgaattctctcggtgtgaggaatcaattacttccgctgacactctattactggccctcacatctttggactccagatggagagtgaaggtggtggtgaggatggcagggaatttgaagaggatggtgagcggggctgtggggggattgggggagtaggaggtaggtgacagggaggcagagagagacgatggactgagaggcctctggcttgtatttaaagacacagaaagagatctctctccttgactgccccgctggcatccggaggtgactgcatggcaggaagaggcaaagaaaaggaataaaaagagaaaaggaaaagaaaaggcttgtcaaggatatctaaagaaatcagagaggccccaaatacctaagcactgggacagcagatgacagctccaagcagattgacacaggtatacaaaggcagctttgggctgcctggcttcaaacccagccccacgattactatctgtgtgatctctcagggcctcagtatctacatctgttaaatgggataatagtagtaccagtaccagctgtggcggttaaacatagaaaacttagggtaggacctgatgtctggcaagagttcaataaatgtttgctattgttgtctaattttgagagttcctccacgtgacccacaaacatacagttgagtccccagtgggaaaaagtagaaaaatattagagactgccaagatgcttggctacaaagctcgaaaagaggcataaaaaaagtcatgcttttctgctgccctcccaaacctaagcccaactcacatttctttctccttttccttttccttcttctttttagaaaattttattttgacccagctaacatttttcagggattctccttctaggaaaaaaattttgattatgtaaattaaatacaaccatctactctgcaatcaactgagatgagttgtgaggc

SEQ ID NO: 12361 - DNA, 1205 bp, Homo sapiens
agtaaagacctgatactgatgccaggaaggtttccttctacttggcaaaacaattactaggaaataattcaatgtttagctcagttcccctgttctcagtgtccctgatagggtcagtggggactagtgtcatcgacagggatgtgcagacacacattctgagagtccttggttagagctgtaagcacaaatagttaatggccattggatacttaaatatgccaggcaccatcctgtgagctcttagtaactaacagaatccttgcaacagccctcaagaggtaggcacctctattagctcccctttagatctaaggaaactgaggcaaagagcaattaaataatttgcccaaggccctctgactagtaagtggcagagtgaacatgaacacaggcagtctagctctgagtccaggctcttaaccacagtgctgtacacattcaccatgcaaagaaattagtgctgacttagtatttgacagttgggctcttttgcagctcccttcttatagcgggtggtccctggttagcaggtgtcagccatgacctcttgtatcttcctctcctctctgcagatgctccctgctccaacatgctggggatgctctcaggcctcattgcagactcccagatctccgcctcttccacccaggaatacctctggagccccagtgcagcccgcctggttagcagccgctcgggctggttccctcgaatccctcaggcccagcccggtgaggagtggcttcaggtagatctgggaacacccaagacagtgaaaggtgtcatcatccagggagcccgcggaggagacagtatcactgctgtggaagccagagcatttgtgcgcaagttcaaagtctcctacagcctaaacggcaaggactgggaatacattcaggaccccaggacccagcagccaaaggtaggctgttcttggaggcctctgtaacgttaccctcaacagggaggctaagtgtggtacagggagttgagactgatgatgtcccatctaaacagtcgtcatccaactcctgaaatccaataaaacaaatatcgtttgagagattactttgtgccaggcactgtgctaaataccttatttctgactcttttgtttgtttgtttgtttgtttttgagatggagtctctgtcacccaggctggagtgcagtggcctgttctcggctcactgcaacctccgcc

SEQ ID NO: 12362 - DNA, 1733 bp, Homo sapiens
tttctgttggctgtcattgtcatctccaggtacctaaagaaatagaggccacatgggatgcagtgtggcttctcccatccctatccccaacccacctgacccaagagaaggttcccctagcacactcaaacaagacccccttgtcttctggtgtctttgaaatgtcaagataacagccactgggtgtctgcggaaccacctctccagccctaaagcaaatctgtctcatgttgccttataaaagagaagctcataatgaatgtttagcctttatcagttacatccaatcttggaataagtcatagagaataacaagtctgggactgacgtaggaaaaacagtagtctgtttaagttgagaggaggaggaggtggacgagagaagggaggagagggaagaactgaaatgtctcctcacccagggtggttattgggcccaacttgggatggggttgagtacgaaggttaaaaaacatatactttggtattatattggtcattgtaatagcagttgtaaaatatggggggaaaagggatcatttgctttcctttcatggtgttaatgtgtgcctgaatctatagccgctaaaatgtaaggctgtccacctgacttatttaaatattatcagagaatagaaagtaatcactttttaagtgtacctatgtgctgccccttaaaacattcatggcatctggcaaatagacccttgtaggctggcctggcatattcagatgttgccgcatcatcacagagaaggtcaaatgaagatgtaaccattgctgctcatgtgtcttctctaagcaacaaggggagcgggatgtaagagagaagttgctaatgatactgtacaaaggatggattaaataatgaagtcaatttcattgatagaaaatgcaaattttaagattctcagtgtatgaggtctcagcctcgggagcatttattttttactttcctgctaaaaatccactggggaggtataaaattcactccaaagaagtttgcctgggccaaaagcctccaggttccttctgagaacaaaatactaatgattttttttttttttttggctgcttgggagagactttcagcattctttcacgatatccagatatgtcccttcagcacacacactcaactttctcatctggttcgtttcatcctcccgaaagaacggtgctctcccactcttactctatttcaaagagctactctgtctcaaccacagcagccctgccaagaaaaggcaagatgaaaggctagagcatgtgctaccttgagatttcaagaagtgtcctacctcagctgaagatggagaaacggggagtggagaggggatcagcccagggtaccatgtgatgactaatatgccactcattaagggcttttacctcggctgtccacatccagtcatgcatttggggccaggcatgcctgcgaaatgattgacattcctgtaggtgccccatagaggtgtggcattgagaaattatgtctggaaaatacagccagtgtagtgaccagctgagttaccatataccctgatgattccccttctgtaacagaaggtgacaacaactttgtgaactttctatatctttatctgatgccccaagtggcatcatctttatgtacatgccttagttgagaatatgagactgctctaatctttgtgaatgccttcacacttcagctgaggatgtcaccttctctgtcactccccatcctgcaac

SEQ ID NO: 12363 - DNA, 2468 bp, Homo sapiens
acctctgtgatcatatgagggccaaggctgagcagtgtagacagagaccctttgaaatgcatttgtctctcaaatagactagtaaacaccgacttctcctttgggttacaaacaccatttcaacctttcgggagagtcagagctaggatgtacaagaactgattctaaccagaagtccgcaagtactgtggacaagaatgcttaaccatgctgcttcagccttgagagacctaggttcttacacatatgcacacacgcatacacacatgcacgcacacacacatacacacatgcacgcacgcacgcatgcacaccaatttatgtttttattaagtgccttgaaaaaatgaagaaaaatgtattttccctttatgtaaaaattagtgaatatcttatgaattaaggcattcctctttccctaaccccgatggctccattcccaagtaccccaactcactgctgatcctattaaaggaatgagtcctgctacccgagtggtagtcatagccctagatgactctcaactactcttcaaagggaggcatcaggaatagaatgaaactgtgtgaaggataagattgttcgcatcaagatccaaatcttgatttcatattaacgcctaaggattgcctgtgtgctggaaatatatttgaaactcaaccagtatgcccagcctattgcatatcattgtcagaccatttttgctgctgtggtcacccacgatttcatttgtcttatacccaggtgaaaggggaagggtgaatgggactggctggttcctttaaatgttaacttatggaaatgctagttcaaatggtaatgtcacagtgttttgtatgcagagagcaagagttcaaccaacagctgtttattcatgtgtgtgtgtctttgctgctttgagttctctgtatctactgtgtatgtgaatggtcatgtgggactcagtggtggtgttgtgactttgacctagggtccgagtgtcacagctgatcttggcactcggcactcattggcacagtggtagttagaggtgaaaagtagagctgtcaagcccaagggcttagctttagggctcctcctgagttcggcccacagtagaagcaagattttaactagccccttttcctcttcaccctcccatgatgcgcagtgttcagaaagctggtaagtcctagggatttccagaagtagcctgcagaagaaggtaagtttgaaagccactccaggggtcctgatgctgtcatgctcagtgagccattttacagttctccaaagtctagccctgtttcggacctgcacttcacctctaagttatgtacaactcaacctgcatccctctaaaagtcctatatccatattcaccattggctaatttgaggccctgagtgggccttgaatgctaaaaagaagcagggtacgcagggctacatgtagataccacaccaaggctggaggctggtctgtcataagacagaaagaaagacgctgggcccaattttgacttggccaggggacaccttggtgtgtttgttatctttatctgtgggtaggctagctgacccatctccttgagtcattccctttgggaaaccccactgccagtattgatctcctttttgccttgtactgaatgacacattacctccacactctcccggactaggtggtcaacagggccacagggttgctttctgtctttggtggggcaggggagttgacagggatgagggtccaaggaataagcatgaatgacaagaaaacaagggaaagagttaacctgtcacatagcaggttaactttttcagggtttgcagttagaggtattcgaccattcactggctgagccagatcacgggaacttgagagcttttactgtgattcttcaatgtaaaaaataaacaacaatgtcaaactgtgtttatatgatttgtataaagcctttttaagattactatttaaataaacattataccagagatatttttctgcatcgtggttttttttttttttttttttctctgcattgtctttattggagacaaacagatccgggataagggtgaccaaattgtcccactttgcctgagactttttcaggtttttagcactgaatgtcctgttgaaataggatagttccctcaacccattcacaggactcatgatagggtggcttgcttactcagcctgcagctctcaaccccttgtgggagggggagaacacaggagagcaggcgcagaggccaggatgagcacttttgggcaaccggcaggagcagaaccctgtgcgggcctgcggcagagtctaggggtcgcccatgacccctggagccccagagggcctgtgttacagtgcgctcttctagctttgccatccacggatggcttaagtgttaaacagctcagtgtagagtcatgatgacagcctcttgcacccacactcaggttcttgtctagcatccaggaggaat

SEQ ID NO: 12364 - DNA, 1077 bp, Homo sapiens
aaggcaatgaaatattgctctccagatatatatgtatataaatagtgttgatataactgtatatacacatgtatatgtatgagttttaaatggcaatcttttacatttagcaaaatgctgcccctactggaatattgtcactgcagtggcagttgtatgtaatgatttaaaatacattatcaaaagttatttaaagaacatttaaagtctcatctaaagacatccacacactatttatttatcttccttttccttttattgttgtgtttttcttaactgaaagggagactgtcattttaaaaatgccatctgtcccatgagagtaagaaagagctggagattcacttgaggagctttgtgcatttttcctctctctgaagtggagatgttccacagaccagactgtttatttcacttataaagcaatcctaatatttccgttagtgtatgtcagccaccatctcctagatcaacttaattcaccaatttgcctcctcctttcattaataaataatgattattgagatcattttgcctgggggaagttaactactcccatgctgcagggaaatatatcacctaattgttattttgccttgttcaaaattcaaatttgaaagaaggcagctctctcatgaagctgtcttaagcacattttagttaagggccctcccaaactcttttttctttctttctttctttcttttttttttttttttgcgagttccaagttgcatgtgcttgaaatagatttaattcttattccccacagtttaggtatttttcattagtacatcaatttgacacactgaatgcaagactattaaggaagaacgattaaatattattttattttgtgaagagttggcagcagattacatctcaagaacttgcagagagaggaaggtagatggacaatcctaaattgtaagatgttacaaaaaacagtgaagtaagagtactcctgaagactaaaatagagaggctggggtttgagccattttactgagtagcttagctggaacctgatatcagaagtagcctttaacaaaaagcctcttggcaattgtatggtac

SEQ ID NO: 12365 - DNA, 1867 bp, Homo sapiens
ttgtataaatacaccaaattaatcattatgttatcttatgttaaaaggctagctctgatatcatgtgcattttatgttaacctttggattaacttatattatgctatgttcataaaatgacatgagaaacaggaggttctaagatcagcctctcactttcgagcataaaaataagagagggagacagacagccccagacatgagctgtgtttatctattgtggtgatgggaccacagatctattgaatcttttttatgttaattatagatttctttatattcgagtaagaaaatattgttgatcatcttttcttggtgaagttaagaaaaagtataggcctttcataaacaatttttggaaggggctgctttgtttaaggagttggtgggatcatttcaccgtgcatatttcaaagctggggtgatttcatttatttccaaaatttttcaaaaaacttttactcagttctgctgttatttattaacttaagagtgctcccatccccatatttcagctataggaaaattgtgctacccctgattcatatggaattaaaaaaaaatacatccctttattttgagttttaagttgttattttgctatacatttattactggagtatctggtggtctgaaatagtcaaaagtagagttggtattaaatgttccaatgacatttatttttaatacttaaaaaatcatgtactttgaaatatgtcaaagcaacttctgataatatacctgaatttgtagttgtctcttgagcatcatttacttcatcttagatatagtgaagatctaggaaagctctatatgctgttcttttctacagttgtatttttgcagcatctcctggtttcattcactcttgttttgggatttttttttagatctgcatatttcttgtacatatgcatgcaaatgaaagaagggagtttgtactggtgccatttctcccttcagttgctggttaatgggatttgctagaaaaaattctcccggttgaagggtgaaaacagacccttatgtgtatatctgtacagagatgtgtatatgggatgtggtggcactttgctgaatgtgaacttgccttgtcaatggaaagattgaaaagtattatgtttatttatacatttgtataaatctatatatacacgtatgtatatgtgtgtgtatagataaagctatatacatatatttcccttaaaaatgtgtgtgtataataggtaaacagcctttgttaagcaagattaatgtctatggaaagttctggattattctgtaagccagaggaggtgacagtctagagtacatcatcagaacatactaaaatggaagtcctttggattatagttttgtttatggatattacacaatgaatgcttgtctgaacagttcttacttgccagttccactattcttcatcttcaccaccttctactggtcagtctttcatcacttaaaaaaaaaaaaaaaatcacacatcattgtggtttttttcccccttaattctgtctcttctagccagaagcatctggcttaagcatatttcatcaacttctctgttatttcttttaaagatctttatctctgaaattttcccagaagatacaagttttggtaatattatcaataggaattttgagacttgggcattcatctttgtctcaaaaacaaacagaaagccaaccttcaaataaaacaaatttgaaagttttagctcaataatttggggacattttacttaaattacaaaagaacataattatgattttatgatcgatattagtgttaggtttatttccacacttactgtcattaatttgtcatttacatatttttatttgctttgtagtttaatcataac

SEQ ID NO: 12366 - DNA, 2067 bp, Homo sapiens
ttgcccgccgtctttgccgtgccttggcatcctaggggtgctggtgatggtcagtgggcatcatcggtcagcagtgcacgtgtaaggcaatctcctctcctccaggttagttcagaaggtcgctatgggttggtattgcaaaaagatgagtatatgaacactaaacttattaagaggtttgaaattcattaaaaattagttttcagtttcttcatctttcttttcagacttctttaaaaatactgttcttaatctggtatatatagaaatctaatattatggtcttctaaatggtcaacagaactctccagtttaatgaggcaatttagaggattccttgaaagaaaatttcatcatactgaacagtcctcatttgtatctcttttgttaccagtatttacattgttccaaggatttttttcctgacaaaaaatatatttctcgggagtggagagttttttatatatatatatgaaagaacatagatgtttccccccgcccaatacattaactgaatcttcactggcattctgtagaaaagttaaaacagtttaataatgtcttaacatctttatacattttcctatattctggaggaaaccagaatcatgtttagtagattaaagtaacattttaaatactacctttccaataatttgtaataaaataccagtgaaggacatgtttggatatctgttaagcatttttccctgactaatgaattaggaaagaaaacataaaacataaatgaatagttatgtctcttctaataaacagtgtcattaatgctgcagttgtgggtcaaacttagggagccttatttctaaatagcaaaaattctgttttcacttcagcccttatttttttttgttagtttttctctgcactgtgatacagagctaataagaggaaatgtgacgtttcagagagagagcaagcaaattgggtatgacttttttaccctatgttccccaatactggggatgtttggctactttgaacagcagtttttagtgatctaaagtttagatcaatactcgtataagagaaaaatctaactctcagtgagctccatagggcagcacagctttccatcttctctttcgccttcttgcgtctgcccaccacagtcccgaagaatgcacacgcacatatgatctgtacccatcccgcccgaagagtcatagaatcctcttctttcacttgtttcttttttcttcgtttgtttgtttttgtttgtttgttttttaagctggggaccactgaagtaagctctgtatgcacccaaagttccccttggaaaaattttcaacacgcagtgcagaaggctccagtgcagctaaatgccacaccattggttctacctgggggaatagactgatttgccctaaaatgactccaacctgcatcattaaggtacagttggctccagtggattagtgctgaaatgatgggaagtctgacacttgttgacattgtcttcatctgtttggaagggttgaatctgttcctctcaacagtgatagttcttttcactgtatagtattgagtatgtctcagggattccttgtggaaattagggcagtttttaaaataagaaaatagttttaaaagaaactaaaggtgactcatcattgaagagagcggaagaaagaggaaacatttggttttgtagcccacagtgtcttgcataggactttttcctttctcctccaggctctcatctcagcttcagaatacagaatcctttcccatcacgcacagctttaaaacttttatttaaaaatttccttccccaatgagctttcagaatacttattgtagattttaagagaaaaggtatattaatttatgctattaacatcacctcataaattataagttttatactaaagctgtatcgagtgtaatgaattatgttgcctatgtgtttaatagctaaatatatatgagcttttttttttttttttttttttgacaaaacaaactagtgaagcacctttttacactggatctctgccgtgtcaaggtgtatagctatcctttgctaccttgcagatatataaa

SEQ ID NO: 12367 - DNA, 2637 bp, Homo sapiens
atctgtcaactccttgatccatcttttgcttttgaatttttcatgtttacagtagtgattctttggtaagatttgtaaaatgttaagacacttgtagaatcagtgtaccagttgtgaagtgatgtgtaatatctgaaggatacacattttaaagtttctttcaaagcagaatatggaaattagatataaattttattcgccctttggtccttttaaaataattcaagtacttgggtttaagtaaatttgaaaatagctttgggaaatgtttttaaaatgccaggattttaggggttaaagatcatatggggtagtttaggaagtttgtgactatgagatgaatttgtgaggtttcttgcctaccttttttcccccccagagaagggtggaactagattttaaaggcatctctactctgcttttgctgagtagtttcactgtcccttgagataccattggctatttatacctgagtctagtctaattcacatatatatatattttaaaagttgagagaacatacctattgatgtggttcaataattcatttgtcagggaatatttgatcttaattcctttctaataggtagtgattggatgtattttcctacttcctgtatgtaatctctttatgccatgctagttctaaccagtcccttcttttgaaagcttttctttctctgctttttaaaggaatgatggtgatcagcaggcattatgcagataccacgtgcctgaggttatggaggggaaatgtcacatgactgtatgaaatcattatatgccctattttgtatttattgatgtttctttttgtgggccaaaaatatgtttgtaatatatttagtttttttaaaatcatggtaattgattggaagatttatttttaatagctttgccttttttgcagagtgcaaaatttctaaattataacttatgtcataaagcaaaattatatttggtatcaccataaatttctattctgaatggtgagaacagataatttgaatatttctcacctgtgagtctatattagtaagcttttttattttaatgtactgtaatgaagtggtcacgagtagttacctcggctcaaaaatgtcatttagtttgttaaactattttcacaaccatcataagcataactagataactgtccattcccagcagttcagtttagtctccattgtgtatttaaaggttgtcgcagagcagcacattgacttcctcatcagccctttgacaaggaagggaaagtcgtgggtagtcgatttgaactttttctgtctacttgtcccctcatgttagctgcttgaaattcttcagttatgatacaaagctgagtttgcagtaagttgcacattttattgtttgcaattttctgttttatgtgcatttaaaagcccttctctgctttctagtaaggaggcatgaaattatcaggaatgttgctagttacagcttcacaccaaaaactttgagtaaatacattttcgtttggatgcccatgatgaaagctgaggaaagtggttgaggaattatcaacaacaaacttttcctcttattttatctagttcaaaacagatatcaaagtttgcaatttgctttgctcttgctgtttcttatgagtccctttttggaagagaggagaacatctataagcccagagagatctgtgtttttcttttacttaatagagccattctcgtctattagtaggaactttgctattaatatgtatagaaaggaatgaagtggcttttactccagaaatatgaaaattagtatcttttaaaatagcacttatgctatcacaaggcaatactggaatgaaaaacaaatcttatataaggtcctaaataggtagaaactagcttttattctagtgttgaacccaggagaaatagtggcaaagaagtttcactctgtttctgcagttctttgggactatttataaaggccagttagattgtgttactgtgatttaatttacaaagttgctgcagttaatggatacattctgtgctctgagaatctgaattccattctaatgtgtgatattcactggctatgatcagtagtatctgaagaaaagatgggctttttctcctttactctctctacataattattaatattattttaattaaagtacttaagacattgttttttcttctgtaaaaatggcttagcaatttgcacatctgggtaggttatgtagctagtaaacaactcaatagtaagtagcaattatacttaacccaccaagtgacagactatgcaatggaaaaattttctaattatcgtcacatagcttagacagcaaaggattattttctctggtgacctaccatgtgtgatataactgctttataaatgacttcctgagcaatttcatgttggcaggcagtgtggtgtgtctagtgcccctctatgagaagactataatttaatcagaaacaaatagtaggcatggggagcaagttggaaagtgaggttattattttttttccttaaaattggtgttactgtctttagtggcttgaggctaaagaaagctgatactttatctttgccaaataattatttataagatttatttttaaataagcccaatctctcacctgcagttaagaa

SEQ ID NO: 12368 - DNA, 1355 bp, Homo sapiens
tgtcataagagctttgtgaatctccgaatactttaatggcattagaaaatatatatattttttctcataagagaattttaagtgatcttttagactcttgatgagttactttgtatgctatgaatagagaataacaaagccatgtgagaagcagtagctgagcagttatccagggccactcagtaactgaatgacttgcttctgtctggccacccctgtgcatgtacagttcacatatttgcctcatcaaaattacactgactttgaggactgcttgaaagtagtagaggtttgcatgttaagttgctggctgccaagagtcactatagtgacgcaatttttaacattaggattctcatgtagttttatgttctacttttaaaaaatatgtatcatgactgttttcccatgtatgtgtgtattttaaaggtactgcaacagccacttgcaggtacttggctttatcccgaaaaaagagaggaagaaaaagaatgatcctatagatgaggtgaaggtcaggcaccagatggataccatggcctttagcctgacagtgcccacgttggccttgaagatgcccaacggactggatggaatgtccctctctccacctggggcaagggtccctctccactacctggaaaccgaattggaagacccatttgctttcaatgaggaagatgatgacctaaagaaaggggcaactgtgagaaagaagttgcagagcaagttggcccagaatcggcagcgccagagagagacagagattttaaaagttcgacaagagcactttagtccccctcctgcaccttcacagcagcagcctccgcagcagcactcccacctgtcacctttatctacttctttaaaacctccagcgccaccgcagggttcagtctgcaagtcacctcaacctcagaacaccagcctaccaatgcagggagtggcacccaccacacacactatagcacaagcacggcagttgtctcacaagaggcctctgcccctcctgccatccagtagggctcccactgtggacccacccaggactgaccggatcctcatgaaagccacagccttctctccacacttctcatgtataagccgactgcagagactggtgaaactgtgcacccagaaacatcagttggacactgatctgtttccccatttaggtgagttatctattttatcgtatcatagacacataatatgacaaaatgtgttcggttgtgtggagcttccctttcataattaccccatatgtgatgggggtggaatcacaatgaggcagagtggtgcagtgaaagattctgtatttaggtagaccaccttaaaataaacacagtcgtccc

SEQ ID NO: 12369 - DNA, 1188 bp, Homo sapiens
taaaacagcttccttctaagttgatgttattagctgtggccccacataacacctctgcagcttttcacttttagattaattaataattgttgtacaactttttttgtgtttttgagatggagttttgctgttgtcgcccaggctggagtgcggtggcgcgatctcgatctcgggtcactgcagcctctgcctccttggttcaagcagttctcctgcctcatcctcccgagcagctggggatacaggcgtatgccaccatgcccagctgatttttgtattattagtagagatgggatttcaccatgttggctaggctggtcttaaagtcctgactgcaggtgatccgcccacttctgcctcccaaagtactgggattacaggcatgagccagtgtgcctgggcatgttgtaaaacttttaatcagaagtctgttaactttttttgtacttgaaaacaagtactgttttattttctgaacatttcattgtggtctttgctgcgtgtaggtttcttggtgatgcccttttcatctgtttctagttgcagagttttcaaggcaaagatgtggcagcaattgcaggtggcttggtggatgctgaagccctggtagctctcaaagatttgcttaatagagtggactctgacaccttatgcactgaagaggtcttccccactgcaggagctgggtgagaaatatgaagctaggatctaggctttcctttctttttttagttacaagttatgtataaaatgtgacaacctggattctccaacatatcccccagtttattttcatatatagaccaagatcaaaccagaagttgtaggaaatagaggaatccacttatcactaagtatctcaggcacagtggctcacgcctgtaatcccagcactctgggaggccaaggcaggcagatcgcctaagtgcaggagtttgagaccagcctggccaacatggcgaaaccccgtctctactaaaaatacaaaaaaattagccagacgtggtggtgtgcgcctgtaattccagctacttgggaggctgaggcaggagaattgcttgaacctgggaggtggaggttgcagtgagccaggatcacgccactgcattccagcgtgggagacagagtgagactctatctgagaaaaaaaataagtatctgaaatgttcatttaatttagaaatactt

SEQ ID NO: 12370 - DNA, 1242 bp, Homo sapiens
tcatacaaaaaaaagtttgatttcttatactttcagctaactgaacaatcttaaaattacaacacaaaaaaatctgacagctaaaaaagtcaaatcatttttatttacaaagcatgagtatctctaaatattttatcaaaattatattgtgcaaactcttctattcagcttctttttcaagcaatcatcccacctcggccttccaaagtgctgggattacaggtgtgagtcactgcgcccagcctagcttcttttctctaatgaacaaactgaaataagttgagaatgtatcaatctacttgaatttctccatgtgggaggaaaaaatatctttctcaaagtaaatacaatatccagggattgacctaggactattaaagtcagtattatcacattatataagcaactcagattccagtagtctatattcagtaactaatttgcaaatataaaagataattcttcaaaattattataaaatttcctttaaataaactgtaaaagttaaggaaaacaatatagcatatacctggttttatcagagatccactcttcattgatgtcctcatgcatacgtggcaaaatcctcatcacttctccagttcttgtgctaaccacaatattacttccaaccgcatccattacatcaatggattctgtctttctgagaaacacatacggtgtttactatggtgcttttgggaataaagaaagtttctgttacctggtttaccaaaaaattttttttacaattaattccctttctgaattactttaaaaaatgaagcttagaggaactgcaattaaataaaagaaccccccacctttttttttgccctggggtctcactctgttgcccaggctacagtggcatgatcataattcactgcagcctagaactcctgggctcaaactatcctctcaccacattttaaaaattttttgtagagccggtgtctcattatgctgaccaggctggtcttgaactactggtctcaagcaatcctcccaccttggcctcctaaaagctgggattataggtgtgagccactgctcccggcacacccacatttgaacacataaattcctggcacagtaaggaaggctttaaaactattatctgacacagaagctagtttgaaggggctccaactagccaaatctgggacgattcaacaagaggggcaggatttctgtctatgggagattaaggagctcaaaaaaccttcccactgaaaagca

SEQ ID NO: 12371 - DNA, 2652 bp, Homo sapiens
gttgggatattgtaagctaaatttttctgtaaccttagaaggccaagagactgaagccctccattttttcacagaacaggtagaacatggacagcagcaattcaacttttccccacactgccctgccaatgtgcctcgaccttgacctggggggcccacctctggggtgagagggtggctcattcattcagtccttggccattcttctgaaactgccaacaagggtggaagtttggggaagtggactccagttcactaagaatggaactgagcatacttaatgaaatctcaaacagaaatgttcatactgaaagagtaaatcatagtgagtattgaaaataatgtctcacatggtactaatgcttgtcgggtgaggagttgaacatatgacagtgtttacctgggcgcatgtgaaagggtaaattatgattgcaaaagggatctagtgataagtagtgattaaaacaagttattttgtattttctggaaaaggatgttatactagctcaatagtggttgaatttaaatgtttttcaagcctgccaggagtgaagaaagctttgggcaaatatggtcctgccgatgtggaagacactacaggaagtggagctacagatagtaaagatgatgatgacattgacctctttggatctgatgatgaggaggtatggcgtcttctataaagaacatatcggccaggcgcagtggctcatgcctgtaatcccagcatgttgggaggctgaggcgggtggatcacgaggtcaggagttgaagaccagcctggccaagatggtgaaaccctgtctgtactaaaaatacaaaaaaatgtggcaggcatctgtaatcccagctactcaggcggctaaggcagagaattgcttgaacctaggaagcggaggttgcagtgagccaagatcgtgccactgcatccagcctgggcgacagagcgagactccgtcccaaaaaaaaaaaaaaagaatacatcgatcagcaattgtatcaatgtggttaagccaaattgcctggatttgaatcctggctttaatttatatgcctttttcaaattctgactggttgcatgatgaataaaatcaaatcaccatctttcggctgagttcgtgatggatttgcttttttctgattaagccagtcttttttgtgatgaccccactagctttaagcagaggaacaaccagctttctgaagtggattaattttttttctttacaggaaagtgaagaagcaaagaggctaagggaagaacgtcttgcacaatatgaatcaaagaaagccaaaagtaggtcatttgtttttaacttcatttcatgttaatgtaagtaatctttttcaaagcttgaccttgaagtaatttcctccacattccttgaataggtcaatattttaaaacctgtacaggttcttccacagctactggtctgcagctgttcttatggtagcagttgtggcattcctctgtgggaaagaaactgttaacacaaacacctctttcttagcaaaacagaaagtgggtatatatgtgtgacagacacaagatgtatctgtagttttgtttggctaaggagatagtctcaaaacaaattgagatggatttgtttgtgtcttggagtagggtgaaaaaaatacaattcattatttgaataatgctgtttattgtttttagaacctgcacttgttgccaagtcttccatcttactagatgtgaaaccttgggatgatgagacagatatggcgaaattagaggagtgcgtcagaagcattcaagcagacggcttagtctggggctcatgtgagtttaggctttgcctttttttttttgaaactaacatctggaatttgcctacagtttcaacctttcctacaagacttttctaactaggatttttcttaatgctctttttagctaaactagttccagtgggatacggaattaagaaacttcaaatacagtgtgtagttgaagatgataaagttggaacagatatgctggaggagcagatcactgcttttgaggactatgtgcagtccatggatgtggctgctttcaacaagatctaaaatccatcctggatcatggcatttaaataaaagattgaaagattacctttggctcttgagtatgttacataggagggtggtgtatatattcctttcattttgggggaaggaattaaatgaatatgtgattcctaaataccccaaatttggtttggcattgttgttagaaaattgcagtgcaggccaggtgtggtggttcatgcctgtaatcccagcagtttgggaggctgaagtggctggatcgagaccaggaggctgataccagcctgggcaatggggagagatcctgtctctacaaaaaatataaaaattagctggacatggtagtgcacccctgtattcccagctatttgggagactgaggtgggaggatttcttgaacccaggaggttgaaactgcagtgagccaaggttgtgcgactgcactccagcctgggtgccagagcaaggtcctgtcaaaagaaaaaaaattgtagtgcaactttacccacttgtgatgtccttagcagtgcctgatgatgtgatttgttgtaacctagcatctttgcactgggaacttgatgtgagatgtgtgac

SEQ ID NO: 12372 - DNA, 2652 bp, Homo sapiens; identical to SEQ ID NO: 12371

SEQ ID NO: 12373 - DNA, 2652 bp, Homo sapiens; identical to SEQ ID NO: 12371

SEQ ID NO: 12374 - DNA, 1180 bp, Homo sapiens
ttctctcttgcagtgttttaggattaatcagcagctgtagcgaaccctgtaggatcgtccctaaacacttttgccaagaccaaaaatatgaatctgcagacagagcattttgtaaacgatcaggagtccttttccttttttgccagctggtagttagtcaaatgctgttttgtaaataaatcatctgcaggaatcctcatcaggtccactgtaaatgtgtcagtttgaggaaaacaaacaggaaagcacttaccagttaaatttctgtgaggagagaagctattgtcatgcctgggtgtaccttcccggttccagaatgaaatggagggtggtgttcagaacggctgcattcctcattccacttttatctggcttttgaaatgacagtgtagagaagaatgatgttgggttttgaatgtggttcttcccttcccccacccccctccataaaaattcatcatgcaatcctggagaaaagtaagcaatgaacatactgtacaaattaattctttcgaccagcctatgtttgtgtaagaagtttgttttttgaatggaaaccactgctactagctgttctgctgcagactgaaaatcggtaatggatgggggtcacccagccctcctttgtctgggtaggcttttgcttatgaaaaggcaagttaaattagcagagatggaatgttcttcgaatgcatggtataaggctcatcaggagattttactttctgtgattcagtgtgtcctgatagtgaagagatggaatcacatattggttaagtgtgaattttaacgtttatttatttttatttattttttttgagtcggagtctcgctctgtcgcccaggctggagtgcaatggcacaatctcggctcactgcaacctccgcctcccaggttcaagtgattctcctgcctcagcctctggagtagctgagactacaggcacctaccaccacgcccggttaatttttgtatttttagtagatacggggtttcaccacgttggcccggctagtcttgaattcctgacctcaggtgatccacccgcctcagtctcccaaagtgctgggattacaggcatgaaccaccacgcctggccttaaagacttgattttttttttttttttttttttttttgagacggagtctcgctgttgcccaggctggagtgcagtggtg

SEQ ID NO: 12375 - DNA, 1190 bp, Homo sapiens
tgaatgcttactgtgtgccaagctgtttctttgttttaatgctctttacatgtaacaattaatttactcatcaaaacaatctcatgagggaaaatagtgtaagattccctttttttggaggcagaaactgaagcatacaaagttaagtaacatatgtcaaactttttgctatttactactctgataactgaaaaataatatatgattttatttgtttagtttttcatgtttaggggccatttgtatttaagtagcaattggtggagccacctccaccttctgcagtaattccccctctgtggtccatgcagtgttcagcctggggtgactgcctggattccttgtcctttaaggatagtccagaacagaaagcaaataacatttattatgcctctattttaatattttaaacagacattagaatatgtttatgagtttcccccctttcgttttagttcaacacaagatgagacacatgtgaatactgggtcatcgtctgaagtggtgcatttggatgatgctttttctgaagaagaggaagaggatgaggataaggttgaggatgaggatgctaccgaagagagaccatccgaggtttcagaacctattgaagagttacattccagacctcataaatctcaggaaggcacgcaggaggtttcagttcgaccatcagttattcaaaaactggagaagggacagcagcagcccttggagtttgttcataaaattggggccagtgtgagaaaatgtaacctagtagatattggtcaggctacaaataatagaagcaacttggtacgccccccagtgatttgtaatgctcctgctagttgtttacctgaaagctctaacgatagaccagttacagctaatacaactagtttaccaccagcagctcatttggattcagttagcaaatgtgacccaaacaaagttgagaaatatcttgaacagccagatggggcctctagaaatcctgtgccatcatcccatgtagaaactacttcattttcgtatcagaaacataaagaatcaaataggaaatctttacgcatgaattcagataagttggttttgtggaaagatgtaaaatctcagggtaaaactttatcagctggcttgaaattccatgaacgcatgggtactaagggctccttaagagttaaatctccttccaaattagcagt

SEQ ID NO: 12376 - DNA, 1267 bp, Homo sapiens
ccatggtcctgaaatgggttttcaggctgatgctcaattagctgaccagtctcaagtagccgaaatagagcgtcagaaagtggatgttgaccttgagaataagagtgttcagtctagccgttcttctctgagttctgattctccggcttctctttatcattcagctcatgatgagcctcaagaagctttggatgaagtaaatcttaaagagttaaatattgacatggaagttaggagctatgattgctccagctctgagttgacttttgattctgacccgcctcttctgtcagttactgagcagtctcatctggatgctgaaggaaaagaacggcacattgacctggaagatgagagctgtgagtcagatagttctgaaataacttttgattctgatattcctctttattcagtaattgaccaacctgaagtagctgtttatgaggaagaaactgttgatctggaaagtaaaagtaatgaatcttgtgtctctgaaataacttttgattctgatattcctcttcattcaggaaatgatcaccctgaagtagctgttaaagaagtaattcagaaagaagagtacattcacttagaaaggaagaatgatgaacccagtggttctgaaataagttcggattcccatgcccctcttcattcagtgactaattctcccgaagtagctgttaaaaagctaaatcctcaaaaagaagagcaggtacacttagaaaataaggaaaatgaacctattgattctgaagtaagtttggattataatatcatttttcattcagtgactggacgttctgaagatcccattaaagaaataagccttcacacaaaagagcacatgtacttagaaaataagagtgtttttgaaacaagtttggattctgatgtccctcttcaggcagcgactcacaaacctgaagtaattgtcaaagaaacatggcttcaaagagaaaagcacgctgaattccaaggtagaagtactgaattcagtggttcaaaaacaagtttagattctggtgtccctcattattcagtaactgaacctcaagtagctgttaacaaaataaacagaaagaagcaatatgttctagaaaacaagaatgataaatgtagtggttctgaaataattttggattctaatgttccacctcagtcaatgactgaccaacctcaactagcttttttgaaggaaaaacatgttaatctgaaggacaaaaacagtaaatcaggtgattctaaaataacttttgattctgaa

SEQ ID NO: 12377 - DNA, 1653 bp, Homo sapiens
ttttaaggttaaaaggtgtgtgtgagtgaacatcttgagcccttgctgagtgccagagattgttctaagcttttaacctgttatctcatttggtcttcaaaggacctttatgagttagatactgtaattttcgcaatatattaaatgagaaaattgtggcatattgtagtttatagttaatcatcattcccaccccccagttccaagccagcactaatctactttctgtctttatagtatatccttttctggatagttcatatgaatggagtagtaaaatatgtggcctttttgttggcttctttcatttaccccgatgttttgtcattgtgttgtagcatggatcagtattttgttcctttttattgcagaataatacttacagttcgtttttaatgaaaataataacacagacctggtctcctggtagcaaatatgagaaaaccactaggtttgggcctagctgttccctttatgcctctcctatgtgttatccttggtaactgcccagacccaagaccagacaggaccattgccttctagagttctcttattccatacctggatgcttgtgcttcctcccttggactttttgtccctttactacccttcctggcattcttttcactgttctgtgaattctcattttcagtgtcaacacattaccctgtgttctcagtgctttcacagtgggttgctggcaggtaattggaatctgagaattttatccaagttgcccattattctaatctccataagccacagagccaggaactgctgatggtgtactggttgtggcgaacactcttttttgaaaattactctcttacataaccacagcacatgccatcaaaatcaggaaatcagcgttgatctgataaaaccatctactccacagaccttgttcgggtttgggggattattccagaatgttctctcctggtccaggatttgatccaggatctactggcatgactctaattttcttcagtatggagcagttcctcagcctttctttgcatttcatagcaaacttactgaagataactagttttttttttttttttttttttttttggtggaaactcagtttaatgtttctttataatctgcttttgtaggggaggagcaaaaattctgtattcttagtgttttgtaactggagccgtgtgatgtcaatttgagtaaatatgatagaagatatccagtgttggtccttagggaaaaaggttttcataatcacagaagtgggggctctcactgaggttgagttatcaacaaatagttacattttctggcagcattgatggtgaattttatctaattatcttttaactcatagataagacaatcacttattcatacatttactacccctactacgtgcttacccatgtgtgggtgccggggatccaggcatcaaccaaacaggcctctggttgctcaccctcattcactgatatgtgtgagagggaatttcagtagtggtaagtcagtggtcttgcaacgtaattcttgtgctttcaaagatcattcatagactcatatagctaacactcacaggatactgctctttggcattgaccagtccctccactttcttccctgagacccattgcaagctgtttctgatcattgtcaggaaagattgtt

SEQ ID NO: 12378 - DNA, 1164 bp, Homo sapiens
aatattagtttattctaaaaattaaatttgatgccaaaaattaatttgtatctggttgcattgggaagaataatgtcaaaaatgcactaacttcctttgccttgatttggggaatgatggtggtgtataaaaaatgatttagaaaccatcagtatgcaataccacaattttgtgattattgttatcttttgttattcttaacacatctatcttccaaatgcgattgaaaacagggcatgctgtttaaactggctctttggccatagtctttgttcaaaacaggtcaccttttgatgattttacctaaaaacattttataaataactgtagttattttctcctgtgttacctatgagccagcagaaacttttcttctgtgtttatggatttaaaagagttttttgtttgtttttttggtttgtaattatgacattcagcttattacttctttcatatgtaatacaaatgttggccaaaaattggtatttttccatcgactttgaagaactgtagaaaagaagtcaaacacttgtaaatcgtatgttttggtgattctaagtgatactccttgggtttccaatgaacttcaggtacagagggctgttgttaattgtctttcacatttatgccatgttagatcattgatctgagcaaagccccagtattgtttaatgttttcattatctttatctatctccagtccccatcttattttccctgaccatatcctaatgaggcaaccaacccgatgtgttttacacgatctttttattataggtgttcttaaaaattacagtttgtggacatgtaattttatttactaaaaatagtgttatgctatagatctctactcaatacaatgtttaaaggtctgtctgtaaacctgtgtacatttttatatctaaccgtggtagagtaccctatattgtgtctctaactgcttcatcccccagggggagctatgtagattccccgtggctctccacaaccacaagccatattataatgtatatgtataaatcaggatgaatagagcccatttatacatatacatatacattggctgtataggccaatgggctttatccatcctgatttatacatgtgcgttataatatggcttgtggttgtgttgctggtttattgggccagtgtgtacttaat

SEQ ID NO: 12379 - DNA, 1183 bp, Homo sapiens
aaaattaagctttctcggccgggcgcggtggctgacgcctgtaatcccagcactttgggaggccgaggcgggcagatcacgaggtcaggagatagagaccatcctggctaacacggtgaaaccccgtctttactaaaaatacaaaaaattagccgggcgcggtggcgggcgcctgtagtcccagctactcgggaggctgaggcaggagaatggcatgaacccgggaggcggaggttgcagtgagccaagatagtgccactgcagtccggcctgtgtgaaagagcaagactccgtctcaaaaaaacaaaaaggaaaaaaaaaataaagctttctatttgctattgaagtcctttcatagaagatcttactttggtgacaagtatggcaggaaggaatctatccttgtttaaagtaattaattctttcccagaatatttgcttactgttgtataaatgttctcatttggaatatgcatgccacgtgtggagagaatatgaatgaccagcaggtaaggctcttcgcttactcacgtgaagtgttttctctaggaatgctatggattatgctgtaagaaatgttccctctccaacggggctcactgcagcgacgggccctgctgtaacaatacctcatgtcttgtgagttttctgacagtttcatctttcttttaattgacagattagccagatatctcagtgtgtacactgagcatttgtgtagcttgtcacaaatttcttgggtacagtgtacatattagcctggcagttttctaggatcgataaatctcaaattctgtgggccgcaacatttatctctactattattcactaccaaccatcttatcctccaatgcctcattaggaaaatatacctaaactgcttccaaaagagttgccctactaacatagatgaaatccaaattaaattgttgaatagaggggagacaatttctgtggtctttttaataatatgacctacttataacatttttcttcaaaacttaccctaatttattttagacctgaacataaaagctagtgctcatattttcccattgggcttttaaaatcccctgtaaaggcaagaaagtgagataggaaagtaacatatgaatgcacactcatatgtgtatatacatggtttgtgtgtgtgtgtggacagacacagtcttccatctacaga

SEQ ID NO: 12380 - DNA, 1960 bp, Homo sapiens
catctcaaaaaaaagaaaaaagaaaaaaaagttataaaataatgtatatcagttaatttagtattctgaaagcaagggttttctaaggtctttttaaaaatgaggcttcatattttgaatacctttcagtcccagtgtttgcctccataacttgaaaatcggagtagttcaggtggttttgagttctaatgtattgtcatagtggggaaacattgctgccaccttctgtgttggtcttcttcccttagccttcaacactctcgggggacttttctgttctctgttgtgtccccatctttttgtttgtttgttttttaagaaaccaggttgtgcttagtcaatgataaaactagaatttctccctcacattattatcttgtgataagataaagcagtatacagttaattaacagggttagaaatccaagattctttctcttcctctgggaaaatatttagctaaaaatgtcagtgagcccaattgtaagccttaaaaaatggtggctttgagtcgtggatctttgtttcgtttcactgtctcagagcacacaatacatgtgaagggcagccttgttgaagctaatctctgttttcatgggaaaggtaatttgaagccagtccttttgattcctatagaaatatgaaataaagtgtatgtatgtccacacacttgtgtgcacacaggcacagacacacaactgcaaacaatgtgtcttccaactttaacaccaaacttcattttgcctttgtagcgggaaccttggggacctccactcattccaggcccattttccaggattggaaagctgtacacagagaagcagtgacataaagttattcagattctcactctgatagtcatctaccacttggtggtctgaagcaattaatacggtttcccagagaccctaactttctataagtttatccacttgagactactaataaacaaaaaacaaaatgtctaaatactatgacagaaatccaaatattgcagacttatctgaaatacgcttttcaataacttcccaggtaaacatgtatttacttttaaagctattctgtcttgaatttgtaaggatctttgcaaaactgaatgatatattctgaattttgaaaagatgtagcttcttaggcatattttacagtttgagaattttataaacaattactaatggttcattacttttgtaattaaaatacagatttgctgttatgcaatttaaattactttttaattttacctcacatctggtaggaactataacaaattgaattatttatgtatttataagtacgtataagataattatgttttttaaaagtagggtgtgcagaatttgaaggtaaattcacagttatcctcaaatatcttcaatgtgtatgtagatcttaatttcaaatcttatagcaaaaaaattcaatatttagccaactttcaaagcatgtcctgaatagattattttgtatgttagtgaaattagtatgtaatttcctttgttaaaaaatctccattttccctccacacagtgaatatggccacaagcaggctaataggggccgtggccggcaccattctggccctgggggtgatttttggaggcacagggtggggaatagagtaagcatccttgccagtttcagagtgtttctgtgtggtgcctgatgtgtgaggcgatgcctgtacctgactccatgtctcgtcctgttgaccgtgtttcctgtggtagtgcaccttgtggtgtgacttggatgttgcttgtgtcctgtggttttcttgtgtcatgtagaaccttctcctgtctggaacaatgtggggcataacataacactgggtgtgcttccgatatcttcataattaaggcaatagtcccaacacttccattgctcctccactttgtagaagtaattttaaaatacagacttttttttaaaccatttattggcaaaaatgctttta

SEQ ID NO: 12381 - DNA, 1146 bp, Homo sapiens
actaattgaaaggatgaattttaataatccttccttgaagtcttagagataggtaaaaatcaaagaggcctttcttgtaaaacatagtccttgttatcagcatttgttttcatcaatcatttccagttttgttcgtttgtgactatttctaattgtgacaggtaagtctgtgtaagtgtatgtatattttttctaaagatagatttgttattattcctggtttatgagcactagttttctcttagcttactgatttttttccccatcaaattccaagttttagcataattgctcaagaaatatagttttttaaaaaataatgtagtacaatatagattgtctcaacatttcttagtttaattgatagagtaatgttcattcagtcactaagaattccatggacagttttttttttaatttctccttagtttataagtcaggaatcatttttcatgaattatgtgttgattctaatcctagcctgttttctgaagcggacgaagtgcaaatcatatccaaagcatagagtatgtacatggttatatatttttttaatatttgttttgaaatttgattctctgttgaattgtggggaggaaatacatgtaagtagaataaagtttctctaaaacagaagttagcaaacttctgtaaaaggccagatggtaaatagttttagctttcagcctacagggttgtctgtaacaacttctcaacaatgctgtcttagcatgaaagcagccataaacaatatgtaaatgaatgtgcatggctatgttccgataaaacttttttgcaaaagcagacagtggggctagatttggtctgtgggctccagtttcctgacccttgacttataggatatgttttagggtcagacaaatctgtgttcacatcttgccgctatcactcacaaacttctagaagcctgtttcctcatccattaaacaaggatagtcatagttcccacctcatacgatttttgtaaagatcaaaagagatactatatgtcaagtgttcagtactgtgtccagcacatagtaagtgcacaatacggtagctgtttaaactatttttatggctctcattattattattattattattggtgtatctctaaaggcaactgagattcgttctctagac

SEQ ID NO: 12382 - DNA, 1110 bp, Homo sapiens
taaaggcatataaatccaagcaacgctcaccgtagcatctaaaatgcaattaagctaagtaaataaaggcaatttaaatgtttagccgtcttttacacaggatatttacttcctgaaactgcttaactgcctttcccttgtggtaacgaaagtggttggttcatatgactctcttcccatgatcctttgtcacaggtcctagtgccaccaatctcataataggctccatcgctggtgccatcctggtagcagctattgtccttgggggcacaggctggggatttaagtaagcaacgccgcatgtcttcttctcagtggctctggcatttctcttttctgcttacataaccaagttttgagttcctgctacaagagcttaggttctgtcagtcaaactgcaaaaaataagtctttttattcagaaatgggttagaaatgaagaaacacggaccctcaactgtcattttcaggcaagtggaaatgtagaaggaattcatatacactgatttttaaggagaacaacgaagttctttggtagaagacagtccagcttgtaagagcaggcactctgagatacattcatttctacacaggaaatcgaggaaaccatgtagttggaaataagtggatgtaaattgcttgtatctgtttaaaacttgtttgtagtccactgatattttgaaattttcacaacctaagtaattatgcaatcattacttgtatttttcatatgtaacatagtatatgtagctttgtgatttgaaaagctttatagtttaatgaaaacagattttaaaagtatttgtataatcctcgaccaactgaattggttttaaatcagaatttgaaaaatgtggctttgtgacacttagtattttctaatcaaggactaaatattgacctgacaggtaggcctggtgtgttttcatagtgaccttttagtttggattgcacactgcttactgaactaagattgtttaaatagacacactgggtattcacaaataaacttcaattgtgatcaaaatttttaaagctgatttatccaggctggctatttctacactccagaatcattggataattgctttttataccttttcatgctat

SEQ ID NO: 12383 - DNA, 1446 bp, Homo sapiens
gccccacataaagccagaccatggggaggttgcaaccaacttttactgttgccttgtagtgtcttgctggttctttcttttctctttaaacataggagccactttttaggagactggacactgtgagcaaagcattttaacttgccgattttcaactaagctaaattctgcatttgcttaactaacctgaacctgtgtccactctcctttgagtgtactgtcttactgtgcactctgtttttcaactttctagatataaaaaatgcttgttctatagtggagtaagagctcacacacccaaggcagcaagataactgaaaaaagcgaggcttttttgccaccttggtaaaggccagttcactgctatagaactgctataagcctgaagggaagtagctatgagactttccatttttcttagttctcccaataggctccttcatggaagaggccttcctgtaataattttcacctaatgaattagcagtgtgattatttctgaaataagagacaaattgggccgcagagtcttcctgtgatttaaaataaacaacccaaagttttgtttggtcttcaccaaaggacatactctagggggtatgttgtgaagacattcaaaaacattagctgttctgtctttcaatttcaagttattttggagactgcctccatgtgagttaattactttgctctggaactagcattattgtcattatcatcaccattctgtcatcatcatctgattaatattgtggattttccccctctgcttgcatcttcttttgactcactctggaagaaatgtcaagaagagaaggttcgatcctactcagcaaggccccatctgaatcagctgcgctggatggacaccgccttgcactgttggattctgggtatgacatactcgcagcagtgttactggaactattaagtttgtaaacaaaacctttgggtggtaatgactacggagctaaagttggggtgacaaggatggggtaaaagaaaactgtctcttttggaaataatgtcaaagaacacctttcaccacctgtcagtaaacgggggagggggcaaaagaccatgctataaaaagaactgttccagaatcttttttttccctaatggacgaaggaacaacacacacacaaaaattaaatgcaataaaggaatcattaaaaaaaatagtaaatgattttttttccctcagcctgctggcacttaatatcttctaaatgatttggcatgatttttttttctttactaccgatgacaaactccagtggcatgaagatctaattttcaaaagggtaaaaactgcatggcatatatacaacaagctagcaagccaattctcagcaaaacctgcaacagaattcctaaagtgaagatgacagatgaacacaaagaagctgcctgggcctcttcacttaaacatgtccccacacc

SEQ ID NO: 12384 - DNA, 1618 bp, Homo sapiens
agtaaataagctgaagaaatttggtcccggctttgttttaatgtacaaaccggtatgtgatcacttcagtgagcatccctctatagatgggctttagtaaagactgtcccaaagagcccctacttctctaatgcccccccccttttttttttaggaaaagaacatgcagttttactcatcacttcttcatgacaccaaatccattgctaggtttagctcctggtcccttttcagcaagattcatgttatccgtcttacaactttgattttggaaagtattatgtcctaaaaatgcactgcttaacacagtggggtttttttcccccgaggtgtctttaactggggaagtaccacaaacatagagcagagactttaatttctatattctacaatagaccatcaccaaacatcttatcatgttgttgctttctgagtaataggtgctacgcaggtaggcgggctttctctaggactaggtgtacgtttattttgtaataacagggctatctacaaggcctctcagccttactcctggcttcataggacacaggtagcatccctctagtcattggcaatggctctttcagctcggaggaagcttggaggaaactcagattacttggtatcttttcctgttgctgcattgcttagtgtttccttgttgctgggtcctactctctagtagatactaaactgctgtgaagtacaccatacacatttcactaagattccagagccaccttggtgacataacagaaacaaaatcatgttggttacaaaacaaattaaatctctattgttaacttttaagcatttcacaaacaacattgtaaatgtgcgatgttacgttttaaatcagaccacagtggtccccaaatattatgtacatatggcaaatgtcagtgtaactttttgttacactggcaatttcataggtaatcgaacctatgctccaatgttaaattatttgtgtatatgtaaaatacacaagctttaagctatgtgtgtatgaatatgaaagttaatgcaaccatatcaattgtaaaaatggattataattatttttgatggtattaggttatgtagtttcaaactctttgctgtattttgttttgcacctgccattcatttgctaatttttgtggcgtggagattcttttttattaatttgagctcacagcacaagtgtatcactgtttaatgttacccaacaagagttagtgttaagtgatgatcaagttcccatttcacctgctctacttttgctgcattaattaatgacacccggatgaggagacgtgcgctaacttcattgctcatctgggatagtgcatgagcccattgaattagagctgctcctactagataactgagcagtacacataagtgcatgttatgaaacatgaatcacatagagcagtggagttttaccaagtggtgtgtgtggtttttgttttttactatgcaaagatgggaaatgcacaaacttttcaaagactagtgtctgaagaactttacaaacaatacttgaaccctttctttaaagttatcccatcatgttttatagtcattgttgcttccattgttagtttccattttcaagtgctttgtaattttt

SEQ ID NO: 12385 - DNA, 1227 bp, Homo sapiens
ttttttcctgagacggagtcgtggtctgtcgcccaggctggagtgctgtggcgtgatctcagctcactgcaagctccgcctcctgggttcaagccattctcctgcctcagcctcccgagtagctgggactacaggtgcccacctccatgcccggctaatttttgtatttttagcagaaacagggtttcaccatgttagccaggatggtctcgatctcctgaccttgcgatctgcccgcctttggccttccaaagtgctgggattataggcgtgagccaccacccccggtccaagatggctatctcttaacacacttgtaacccatttgtgcacacaggtgtgccgtgactcactggtggatccaaaaaaagctgaagcctacatttcccagagcccctttcagcttgaattccaaatgtgacttagcttcctctatgcagatgtacctacttgaaactgggaaggccaaatgagatagaggtaatgtttctgccaacaaacagccacagagcattttatttttctagaagagcaataacagagaccccagggtgtggtgtggcaggacgaggagcatccattttgctggtggggattgtggctaaaataatgtggctctggagccagcaatgggcagcatcttcatgactttccagcttccaggctgtaagcagagatagcatctcttctggacagccagttatgtgatagtgttctgagagtcattcctggaagtcagactaaaggctgctccttcagcctttccattcatcttgtaagcaggaggcttctgtgcatggccagaaactaacaaaagcacattgtgtctaaactaggttgcagtggtttctgttatcagcaagtaaatcctgattgataaagatactacaatatatgcacatatatatgttatagaatcaataaaaattggatactttgctttaaaagtttgtgaattttgcttttaaagaatttccctcagggccgggcacagtggctcacacctgtaatcccagcactttgggaagccaaggcagaaggatcgtttgagcccaggagtttgagaccagcctggcaacatggcaaaaccccacctgtacaaaaaatagaaaaattaactgggtgtggtggcatgcacctgtggtcccaactactcagaaagctggggtgggaggatcgcctgagcctaggaggtcgaagctgcagtgggccaagattgtgccaccg

SEQ ID NO: 12386 - DNA, 1227 bp, Homo sapiens
ttgtcttagtatgaaaaccttatctgtttctatttgcttcttgcttgcatgataatttctagaggggaaattggagcatcttacctgctgaattggattgaggggcaagagatcatcatttgatgttctctggaatctcgaaggtatgagatagtccttctggggctcttgttctccttcagctagagtaattgaaatcatctgatgtgacccttatgaacctttcagaggtattcagagaataaataacaaggtcagaccttctactaaggcatttctgatacaagccatgacaccattctctctgcaccttccccctctgcctgtcaacgtgtggcctcatggtgttctgtgcctctgatggctgtttctctccctccttcttcctcttgcagacatgccttgaattggaacgctacctacagacggagccccggaggatctcagagacctttggtgaggacttggactgtttcctccacgcttcccctcccccgtgcattgaggaaagcttccgtcgcttagaccccctgctgctccccgtggaagcggccatctgtgagaagagctcggcagtggacatcttgctctctcgggacaagttgctatctgagacctgcctcagcctccagccggccagctcttctctagacagctacacagccgtcaaccaggcccagctcaacgcagtgacctcattaacgcccccatcgtcccctgagctcagccgccatctggtcaaaacctcacaaactctctctgccgtggatggcacggtgacgttgaaactggtggccaagaaggctgctctcagctccgtaaaggtgggaggggtcgcaacagctgcagcagccgtgacggctgcgggggccgttaagagtggacagagcgacagtgaccaaggagggctgggggctgaagcatgtcccgaaaacaagaagagggttcaccgctgtcagtttaacgggtgccggaaagtttatacaaaaagctcccacttaaaggcccaccagaggactcacacaggtagtggtacaagttggccgcacgtggtttcttctttcccctcctgtagcctcgtcatgtgggagggctcctctttgttctgaggagtggcacccctgctgatgaggaggtgatagacaggcgggaggccccaggtagggacaaagaatgactcacttgttaccttaagatctcaagatgtcccaagcacagacgggtttg

SEQ ID NO: 12387 - DNA, 5668 bp, Homo sapiens
aaagtaaataaaagtacaaagcatattttagttagtactaaattcttagtaaaatgctgatcagtaaaccaatcccttgagttatataacaagatttttaaataaatgttattgtcctcaccttcaaaaatatttatattgtcactcatttacgtaaaaagatatttctaatttactgttgcccattgcacttacataccaccaccaagaaagccttcaagatgtcaaataaagcaaagtgatatatatttgtttatgaaatgttacatgtagaaaaatactgattttaaatattttccatattaacaatttaacagagaatctctagtgaattttttaaatgaaagaagttgtaaggatataaaaagtacagtgttagatgtgcacaaggaaagttattttcagacatatttgaatgactgctgtactgcaatatttggattgtcattcttacaaaacatttttttgttctcttgtaaaaagagtagttattagttctgctttagctttccaatatgctgtatagcctttgtcattttataattttaattcctgattaaaacagtctgtatttgtgtatatcatacattgttttcaataccacttttaattgttactcattttattcactaagctcgataaatctaacagttactcttaaaaaaaaaaaaaaaagactaaggtggattttaaaaattggaaactgacataatgttaggttataatttctcatttggagccgggcgcagtggctcacgcctgtaatcccagcactttgggaggccaaggtgggtggatcacctgtggtcaagagttcaagaccagcctggccatcatggtgaaaccccatctctactaaaaatacaaaaattagccaggcgtggtggctggcgcctgtaatcccagctactcaggaggttgaggcagcagaattgcttgaacccaggaggcagagggttgcagtgagccgagatagcaccattgcactccagcctgggcgactccatctcaaaaaataaaaataaaaaaaatgtctcatttgggaaggaaattccttttaaaaaagagttgagacacttagaaaactaatgttttatatttagtcaagagttatttaagaaagtcaagcttgtttaacaacaaaatatgaagatttaagtgttaattgctggatccattttaaaataagattttaattaacatttgtaaatggtatattttcgtttgtaacaaaccattgtcttttttcaaggatgaacagagtttatgaaggagcatcattctaagaattaagtgatgtagtctttatgtttggacagttcaccagattctcaagaaggctttcaaacaactataaagtttgatgtttgtcctgctgagctaatggggaaagttatagcataaaaattgtgtaaccgcatagatatgtcatttttaaaaactggtttaacagaaatcaagcaaagtcacaaatatgttcacaagttggaattatttattgagtcaaaatgtcgaatcgaacattttgaatgaagtaagtgttataaatgaaaaattgcctgatgtttagcagtttgtattctctaaagctttttttcaaaagttcaggctttctacttactgggaagttggtggtcctcttagtccctgataaatcaaggcaatcacattcatgtgagctggatgaatttataagttataaagaccttatccttcataccttgaggatgattgcactggttttgaagtcagttgcttaatgatgaggtgagaaatgtatcctgttgctaaatctgtcttagacccttggtgaaacttgaagatttcagtttataaagataaaatcaagcatcttttgtgcagttttctttttttaatgcaagaatggtggggaggtttgtttgtaagcatgaaactttgagaatctttattaagaaaatgacataatttttaaaaaccttgtagccaagaacatatgtggccacattaccagtaataaatgtttttctctttatattggccaaaagggaataaaaatgtcatcataggaatttgtacatatgctactgatttgcctagaaaatagcaagtttgatattgctcactttgcaaatatagggccatgtggcacttttatctataggacagattaataaaaatgaagtggggaggggtttatttttgatatattactcttatgagttttcaagctttgataatgtttaactgaaaagtggcttagaaagggctagatccaatgtgttcattattaaataattgctatcagatacaattttaagttcattctttttcaaactcaagtaccatattggcaaccataatattgtcataggtgctctcttcatttagatattcttggggggggtggcatttgtataatatatgtgtacatatatatatatatatatatatatacatacagtatataatctaaagctctgagagctcttaagtcaggaatgctgagtattatagtatattgaggtcagatgaaattttacatttttgtgtgttctgttgcattccttctggtagtttctatgactgcattactccagcactcatgattgattttatcttctaattttcttccaagtattttattttttattagttttctttggcttgatacttttaaatatgttactagtcacttgaaagcctctcccccaaaagtatttggtttgtatgctttgtctgtggcagctataacagtggtaagaacattttgaagatagctttttaaaggaaccactgattttttcaaaaatcatcctgggggaggaattttggcatttcatttgagcagggattttgtcagaaaatgtgttttgatggtaggtcagcagcagtgctagtctctgaaagcacaataccagtcaggcagcctatcccatcagatgtcatctggctgaagtttatctctgtctctcaggataaatccctgtaggacaaatccctactatcatttctaccttttggggtgacatgtggaatcatacaaaggcttaggaagaaatacgtttgtttaaaccaggatgctttacttacttgaagtgacttcaatctagatttcttttaatatttaacaaatttttaattctatgatcagccacagtcagctattaccataaattggtctctgtttattttgaagatcacggctgcttcattttgcaggattaagtagggctaatgtatcttaaagttaagatcttgaattaaagtgagttttagaaatagtgttacataccttttcagttgttttcaagaggctttatttttgttgcctttgtagccctgaaagctgttggtatattttttccctcatggacccaatagaaaagttgtatatttatttggattatatttacattctgtcctttgtaaatgtttggtgtaacttgcacttttttaaatgacccagtttgggtattagcaacttaagaaattccctcatcaagtaattctcaactttttagtctttctcctctcttcaaatcatgtgactttttaaatggaagtttttcattgattaaaatattttagcacctaaaagctagccttaaaaacagctgtaaaagaaaaacatcaggaaattagatatgactagcccagttaattaaaagacgggctcaaaccttgttttattctttttcatcttggatgaagattgaagggaaaataactcaagtgcataatatttattttcaatttttaatgagactttatcctcatcacaacattaatactgtacatagtatgccaaaatatccattaatttgtctagaatagtacaagactttttaaagcaattgtcctcacagagaccacatgtaatatactgaaatatgttcatttttaatggctttgttaacatcaaagaaatgctgcctaaatttgatttcagatgaggaaggagaaagtaaagtgtgcatagtaaggctgtaggtgaagagttgtgagataaatagttcactcagttgtacaaagcacaactagaactttttgttgggaggcttacatacatcttgaatattcttaatgtaataatgttgactattaagttggctacacagtcactgtatgtactaggaactggtttccttgacattctagaatcaatggctaggagaggcattaatctttgaggggctgaacatatcatgaagctgagtcagtatggaaaattttcaaataaacagggtgctgaagttccatctgtctcatctgcttatgataagttcttattgattagtgaatgtagcttaagcctttgtatgtgtcctcagggggcagaccgactttaagagggaccagataacgtttgaatggagggattatatttcaggtgttttagcttgaaatttattttttaaaaaaagaaaaatttaaaaaatatataaataaaatagaacaaagccggtgatgcaagttgatattataaacaggcagttttagcacagaaagaaaatactgacctgtctgcattctggtacggtgggtgcaggtcccagctgggtatgacatgatacatttttaattattctcaccagcaagtaaaaggaaaatgaacaatcttttggaattgtctttgaaaaggatcaaagagtaggaaattcacatttgacctaacattacttgcctatagaagtatggcatttccaagcttttgtctgaggagcatctcagagaagtgagagtaaatctgagttagcttaaaaattggtagggaggaagaaaatctctgcaaataatgattttatgtttgttggccaagtgaaatgatctatcattgtgtttgggaggttttattttcttatgtttttaaaattggtaaatgctttatagatgtatttttatccaagtgccactccaatttgtgtatgtaataaaattatttatattaaaagtgggaaataattgtcaacattttttttgagtatagatttattaggggtggcaaagaagagtgctagttagcagttttccatgtaaagttgtccttgactgatttgtccacatgtcagttgtaactcccccactccctgcaaaaggaattatttctaacccagatgtatcacttgaaactttttagaagcaaaataatcagggaagttcctagaaaggtgtttggctttttggtttttgagggttggggtaaagaagacttcccccacaactgtcagcacaaaacagggtattgatttttaactctgatgtttctattggagttgaatactaaataaataactataatgagggaaatacatttctaataaaattccctacattctagaaacatccctgttttaatttttttatctaaatctttttgtgctttatgtgtaaagaaaaaaatgtactgagttacaatgcattttattaacactatgtacataatagctgctttgtgttcagaatagtagcagttgctttgtatattaaagtgatccttgtgaatttgtgaaatattgtcataaagtgctttttcttactgtaatctttgtggtatcaactgtcataatgctctttttacacaaacatttatgtgcagtcacataaacatgcttttaaaaactctgtaagtctcttttttggggatgggatctctatattttgttgggttttttttgctagtagtgtg

SEQ ID NO: 12388 - DNA, 1247 bp, Homo sapiens
gcctttattgcccatgctggagtgcaatgatgtggcctcagctcactgcagcctccatctcccacgttcaagcaattctcctgcctcagcctcccaagtagctaggactacaggcatgagccaccatgtccggctaatttttgtatttttagtagagatggggtttcaccatgttggccaggctggtctcaaactcctgacctcgtgatctgccctcctcagcctcccaaagtgctgggattacaggcgtgagccatctggccagtatcatggatttatgcatatttctccatacttctttgacctctttcccttgctccaaaagagtacattttaaagatgaatgataggatttaagctgcagcttggtttcatttgaacaacaacaaaaaatcagttcgtatacagggattgaatctgtgattttggcttccttttatacaatgctctaaccacatgagcctatcacattcaaatttatgctactcagaacttttaagctattaacttttccatcctaatgtagtgtaaatataaacatgccccatggtgtttcccagaaggttagcctcagcaagtgaaacttacgtacattttccttgtcctgcttgttttaggatgagaatcagaactgttgtatttttctgtactcctgtttatcttccttataattatgttaaatcctaatttatttgctaaaaagctatatacaaccaggtttttcatttgatttcaacagcaagaatacaagaagtgggggttctataatacttgaagtaatggagcacaacacaaagcaggggagttgtaagcagcattttcgaagctcgtgtggactttgtcttgagctggtcatttctggttaggatagttgtatttctcagtttctttcagagccataggcttctcacacagacagagtgtggaagcagtaaaagaagagctatcccatgctcctctttcttcagtggtaaggagtgtgtgcttgtgatacttgtctagcatcaaaggaagaggcagtataggaaacaaagcgtggtccaagtccctcttggagcttttattcttctggcctttgttaaaatgattttatgtgctgaatataccatgttcaattaggttaacattcattttaacatttaaatttaaggaagtttactttccacttgtgtaaagacccgtttattttttcagtaacatactagtagatgaccagtaagtggttcaggatgtttgcagtgattgtg

SEQ ID NO: 12389 - DNA, 1242 bp, Homo sapiens
tccaacctgggcgacatccagaccctgtctcaaagaaaaaagcagaagaaaaatgttcagacaaggttttgtaaaggtttgtagcatttatatttctacaagtatcaaagcttaaaattacactgaacttttggaataccttgtatctccataaaatgccctctttttaaaagtagttacccgcagagctgtgctctatatgctttgattaccgcagtttctttaaaggaagattttgaagagcagtgttaattaacatgtaataaaaggaattggaccctaattatagaaggtgatatgaacagctgttttatcatcctacatgctaccaagctgtaggtgtcccattaagtcctgctatttaagaaatacttacataacccttaggaactcttcaggctttaaaaggcaaggagcaaataattttaggagaccgataatgtcacctaaatttgaaatactaagaagaggttagtgttctcaactatgtgaaatctgtttctcctactttctcaaatctaatcctaggaatcttgcttataaacaaagcatttctgggacaggagtacttcctctattatagcaatgcttcacatcatattgtgctgcagtttccatcatttttaaaggacagagacataaatgataaataatggtatacaaatattacaatctaccacctcaaaaaaacaaatattgtttatggaattcagagtttggagattcaagtattgattgcagttttattttgaaaagaatgctacaatttatgtggtttttatttctcatgtttatattaaaagctaataaactctattttaattaaaatatggctagtgtgtttgtaacacttctatccacatagtgttacatctctgcccagcctagttttaagtcaatcctgatatgtcttaaagcattttcaaaccaaccataagttgatttgatccatgcctctagttaagatgtagtgatccatttcttttgcatatgctcttttcaacctgaagataatttattacacttaaaatcactgaccacaatacttaatggcatagtgcattagatggcatcttgaatagttggttatcgtgtctgagagggaaaagcacattagaatataaaattaagcaaaatgtatcaaagagaaaggaattaaaggaatagcgtagaattagaacaagaggtatttgaggttttcagacaaacaggaaagagaatggaaagacaggaactagaatt

SEQ ID NO: 12390 - DNA, 4026 bp, Homo sapiens
agcggttttgtgttcagccttagctttgtttatagagggaggttcagtttcttttctgtagtgcttgtaataattctcactcctaacagcaccatcgttgtgtcttgaataagttagaggtagcattatagaggatctggcataaatatttgcagtagtgagagcctaagcgatggtgattggtggagcttgaattttaggctggtgagatggcagctttgtgcctgagaggtagtgggtggttcttaagcttcagtgatcccctttttttttttttttttttttttttaaggaacttgtgttataattttggtaaaagtataaacccactccctctggacaatacttagcgacagttgctaaagggggctcctttttaaatgtaaggactgaaatggatatacttctaataagtaaatttccaacacttatttgctccaccccctcccccctcccccctccccctttatcatgttaaacagcctttttgcttttcttattcctcctctcctggagagctgtgattagaaaccacacccacccttgaatgaagtgcttgaactgggggagggaggctggctacctgtgaacaaacattggcccaaataagggaaaataagtgttcctggactttggactagtttatagccagatattccaagagcagcaagacgttgctctctgccgtctctgaaaacaaaagagatgcataacatgcttgcacaaccttttaaaatatagatcagtatagtgctacctctatagttttcttcctcttctgagaaagcctgtatattgatgatcacacacacacacactttgcaattagagaatttggtttgctttactaatctgtttaactattccttcattcattatgaacgcttatattgatgaacatacacacagaggtttctttgctattagaaaattctgtttgctttcctaatctgtttaagcattcattcatgaagagtgtggggccattactggggaaggggggtgacagtgcctcagccagcaaaataccaatgaccaggattggggactaaatttaggaagctaaaatggccagagcaattaacatttgagaaaatcctgtctaggaaaacaacttgagtgtaggcatttgtaattcacttataccaaagttggaaaagtaaaatttaagcctaggacaatttttacttcatggatgttaaatagacaaatgcatagttcccagggggaatttaaacactttactggtgggaagaaacctagtattaaagttgtaaggactctcaaaaacttcacatttattaaaatgcactgctcttacccaatttatcctctgaattaaaatttcagtggattctacaaaacctcgtacaaatagctacagaactttgtgcctattttattcctctatttattcttctaggaagaagcctcttcctagaatcttgaaatagatcccttgactgaatgccaattcctctcctgtttttcaaatgagagaaccttttctgatcaccttgaccttttccctcatttcatatgtcttcccagaaagtagacagactgctctgctgccttcagtcattgtgcctcatttgggttgtccctccttctttgtggagaaatctggaaatgatgcacagtgtatccaaaagttgtgggatgaagtggatgaaagtgatttaattcatttttagaatttttttttgttttgttttagcaacatgctgaacaactaatttactttaaaaataagccagttaaaacaaaggacgctaagcccaagtggggggcaatattagtcaggatctttggggtctaattccagaccaactttcagaagcacttctttgtctctgttctcacctctgctgtccctctcttccctcatcccctaagagagacaaagataaaagcccacctgcatccctaagtcttactgagatcagccaccccaggggagagaaactggatctacttacagccaccccctgtttccatccatatagttacttcccccaatttgcatgtgattatggaaacaagtcatgctcatgaaagcaactgtaaaataaaaggttatggagtagttcagcaacttcttcacagccagctttgtggagctggggaggacttagggcccattggagtctcttatgtgtacagcttcagggctgtccctttcagtttgattttaagcaatgcctcacttcatagcttagggggtaaggattccattcaggtaggttgtctaaaggaactaatgggacctctcagtgaattagctgaccagattttaggaaatctttttaatttctatgattttccttctcacattttgaaatggtaaaattgactggaaataatttttcttggtgccttattggttttccttgcaaacctttctcatattttctcatgaccattgccagtgaccaaggcccatgtgtgtgttgtgtgtaattgtgggcatgtacaagcttaaataacgtgccgacagcactgtttcaaagttggtattcattaggctgttgcctcctgggctggagctgcgctaatcctgacaccggctgccaggagaaaacctcatggatcacacaccaaaccttaataacagcatccgtgacctgcactctccagtacagaatgggaaccccagagctaggaaatgtagttgtatattttaatgaactgctaccccagccaaagaagcttctttcacttttgtgctctacagaaagcccaaggggggtaggagggacagagctttgaataactgctttctaacactaaatgtggccaacaggacagagcacatcacacgtataggcaggtgtgagggacagtggctaagaattgcctgctccctctgcatgctctttcttgtttccaaagtccaatcaagtgatcctgggaaacaaatctgtctggattgcggagggtggttctgaaagaactgccaagacgttaaagaagggtgaagagtaggcagaatataagtagctaacctgagtcaagactctcaaaagctagcagcctgatgacaataggatttatttcagccaggatagtgtctgtctgtgagtgcatcattttaagacagtatgacttcatgttgttacaaactatgtatagtatgtatgttttgtgggttgtatatatacataatatatattatatatatatatgagagatttggtgacttttgatacgggtttggtgcaggtgaatttattactgagccaaatgaggcacataccgagtcagtagttgaagtccagggcattcgatactgtttatgatttccatatatgtatagtgcctatcccatgctgtagtcactgttatgttaaatccagaagttacactagagccagcgatactttatttgtagacaatcaatttgaatccatatgttattactggcagatgatacatgattacagttctgaatctgtaacacttacaaaaggaaacccagagcagcttgatgagtttttgtttctgcttcgttcctgggagtcagtagaaacagcagttgtatgtggttatgttagtctcaagatacttaatttgttgaccttacttcagaaaaattttgtatgtattatatttgtgggaaggtaaaataatcatttgagatttttatcaaatatgaagattagttatttatgaaaaacaaagaaatgtctatttttctttgttcccaattaatgtagataaattttaaaatgcattaaagtaatggtaaagacaataaaaagatgctgtagaagtctttttctcctcatgtttttatagagagacattgctttctaagagtattcgaggagataatacggattctaacttcataatcaggtttttcagatgtacttaaaatataagcagcaaaaattttattagtaagtaaaatcaagcaaattccaatcaccagaaacagaactagttaagaaacatgttttacttgaatatctttcctaggtctcactcctgccgatcctgtgattgtctcatgagtcactt

SEQ ID NO: 12391 - DNA, 1224 bp, Homo sapiens
cggctccgtctggatcatgcggggggctcccgaggaggagagggcgagtgaccggcctgcgccgcccctgttctgggggcgccccccactctgagtcgcccccacctgctgccatgtgccgctgccacgggtacccagcctgtcgctaaactttccgggcgccagcccggctctgagtcgcgcttctcagcggagtgacccagggacggaggacccaggctggctggggactgtctgctcttctcggcgggatccgtggaggtgagaaccttccctttctccctgttcttctcccgtttcctgtgcccttttccgggaagctgagggttctggtctccgggcactgcctgaagggcccagcttggaaagagagggtgggggagtcggtagtttggttacaggaggcggagcggggaggaaaggaaaggggttaacttaagagatttggagacagctcgcggggaccgaactgttgacgcctctccaacagggagtggttgcaatctttcttctcccccttcttttttaaagagtcctttccctggaatccgagccctaaccgtctctccccagccctatccggcgaggagcggagcgctgccagcggaggcagcgccttcccgaagcagtttatctttggacggttttctttaaaggaaaaagcaaccaacaggttgccagccccggcgccacacacgagacgccggagggagaagccccggcccggattcctctgcctgtgtgcgtccctcgcgggctgctggaggcgaggggagggagggggcgatggctcggcctgacccatccgcgccgccctcgctgttgctgctgctcctagcgcagctggtgggccgggcggccgccgcgtccaaggccccggtgtgccaggaaatcacggtgcccatgtgccgcggcatcggctacaacctgacgcacatgcccaaccagttcaaccacgacacgcaggacgaggcgggcctggaggtgcaccagttctggccgctggtggagatccaatgctcgccggacctgcgcttcttcctatgctctatgtacacgcccatctgtctgcccgactaccacaagccgctgccgccctgccgctcggtgtgcgagcgcgccaaggccggctgctcgccgctgatgcgccagtacggcttcgcctggcccgagcgcatgagctgcgaccgcctcccggtgctgggccgcgacgccgaggtcctc

SEQ ID NO: 12392 - DNA, 1168 bp, Homo sapiens
gcctacagtcccagctatttgggaggctgaagtgggtagattgcttgagcccaggagcctgtgcaatatggtgagacccatctcaaaaaacaaacaaaaaaagaagtagaatcttactgtgaatagctactagcctaccctagaagatatatattttaaatctgtttcttaggaatagtagctaaaagaaggaatggccaaaggagggaaagtggttggccgcagcggctcacacctgtaatcccagctctttgggaggctggggtgggaggatcactggagcccaggagttcaagacaagtctgggcaagatagcgagaccctcatctctttgaaaaatatatatatatacttttttttttaaaggagagaaaatgcttaggttgcaaatggagagtattgaacgtggtgatgtaaaaaacttctgcaaaacttgttctgtagctcctgggtcaggtctatgccattttttcttatatctgctcacacagtacagaaatgactaaaattttgggtctgggctgttatatcactttgtgttaagttatttgtagtagctaatgtgctaacttatatatgtgttctttctgttttttggattttaccttttgttttggcataacttatctatatttttgtttacattattttaaaaatatcagtaactgtaataatataaaattgaagttgtattgttgacaatacctctagtttttaaggtcatctgtcacataatttaagtgcaccagttcctaatgtataaagttctctctctctctctctcaataaacaatgcagaaaatactttcctttctcataacaacttgattaaaatactgctcttgagggggtggtgaaagcccaaggtgagccctatatattaattcaaagtcaagatttgagctttattgaaaatgagccacagccaggtgcggagcccaaggcaggcagatcacctaaagtcgagagttcgagaccagcctggccaacatggcaaaaccccctctctactaaaaatacacaaattagccaggcatgatggtgggcacctgtaatcccagctactcaggggaggctgaggcagggagaattgcttgaaccttggaggcggaggctgcagtgagctgagatcgtgccactgcactccagcctgggcgacagagcacga

SEQ ID NO: 12393 - DNA, 1250 bp, Homo sapiens
cctggagctggcaactgactccggggaaccgctttttgctgaaaggctcattccctagtgtatcacttgaggaaatccctcctaaaagtgccagaaactcatgtgtgagatcgtccaaccctggtgaaatgttggcatctaaccccgcagtaaagaagccagttcctaaaatagacctcattttgcaccgcggcaggaaggccacaaagtacttaaaaagccgtcaactggaatgggggtagtgttctttccaggcccgctttttccaaagttaaaagcctctttatatgaaaaccatgtaaactctcagcagccccctttgcttcactgccttttctagggagtgcattagagtcatttttacgtctgtagtgctaaagggtcacctagttaggagctttaacatcggattcgctgagagggtcatcggtttttgattcttctagagtaggcctccaccaagaagggaatacgtctaatacttgggatctgtggtttgcaacacaagtggtatccctcagactcctgaaaagggactatgccgtgacttccttccggctgcagtgagatccgaggtgtttacaccaccctagttgccgaatgcagcctttgctcagctagagtgtgtcctctgacggagcctggcctctgtttttgtctctgtgtgttgtgtgtacacactgaacgtggacatcggatagttcttttctgtgcctcctcagagaggcttggcttccaaacctgggagtttgttctctacccattggctagaaaaggccgtccataaattagtatatccaggtgggactagcacgatgccacgcacactgaacattttctgcagaggggcgttagcagtggaagtagagacacattctggtcctcctttagagtcaagccaatgctgttgctcgtgtatttgtgcacaattattcatctccgttgatctgacacactctcttgaaatcactagattatgaaacagatcttcacctcctgattccaatactgcctggtttcaacacaggggttgttttatttttttacttctcctagtaaatagagatgtgtataatttttgcccattttatttcttgagttgtctgcaccacttcttttcttactctgaaataatgtgaaaacgtgaagttggagcaagaccttgaaagagcctccctcctttgcgtgacctgaatcggtagcggcactctctgtttcccctgcctccgtgtcacttgttagtgatgggc

SEQ ID NO: 12394 - DNA, 1297 bp, Homo sapiens
acaacatacttggtacattcaaccccattgctcctttcccccacacgccgcttccccaagaccccaactcatgatacttccatccatctagagatgtgacatttcagactgacttttgtgcagttagatgtaagcattttacctctcaacccacaccagttcctttggccccaggccacacatttcaccttaatagctcaacaccatacatgcatttattttctgactatacagtagccgcaaccaaggcttgaaaacttgttaaaaggccagggccctattcatgagacgcctgacggtgccttttacccttagaaaagcaggttgacttttcccccactctagttaaagagaatgttgcacacaaaagaaaaagggtggaaaatctcaaacacttggcaacaggcaaacaaatttgatcatctcctttcctcctcctcttggtaaaatacagtatttatattttccagcctcagagaagatagcagaacatgatctttcacaagagaattatagacctgcttattataaaacagatgtgctcccatggcaaagtgccttctccctccgcccccagctccctgtcactgtagcttacttttgccttcgctgtaattaatgtatccgtgattccaactgtcagcgaggccattcctagcacactgcatttggagacctgaagtgcagtgccatctcctccccttgtaacatgtttgccctgcatacagaatttcctctcctagctcacaggcacccagggtcatacctgccgagagtcaagggcgaaattctggatccccgttcaaaacatctttgttttcaccagtccccatttagagggccctgctaaatacgagcagtccctgtgaactcctaaggaggactttccacccacatcattttctgcttattttcaaaagggaaacaaaaaatcgatgtgttatcaccatcagctacccagagctgggtccatgtccagcactcctgtttcctctccttttcgtaccaccctgacagcttggtcggtgccagccacaggcctatgacattctctgccaccaccaccaaaatctgataggacagagtggagccagcttaggagttgggtctgccatgaaaattcaaaattgctgttttcagcccagaataccttggcgcacatgaacgcccttactgttttcaactttaacaaattacttggtgcactgttaggtaattgttccactgcttagaaactgtcgaaacaaaagcaaatctgtggattaccacctctttcagaccaaactaatacctgctt

SEQ ID NO: 12395 - DNA, 1178 bp, Homo sapiens
tacctcaaaaataattgcttataaggaaaaaaattagaagtttattttttaaatgatgtatttttttgcattcctataaagaacataaactttggtataagctttgcaatataagaaaatgatcatattgaattttatgtttatgtacgagaaatttataatcaacatataatagccatacatttaattatgacatatacatacagaggggtttttatgtttgtttctgcctgttgtactctattctgtcccacatttgttcaccaagtgaatttctgtttatcttctacacccagatccaagtgccacctgctttgccaaccctctccccaccaggagagttgatttctccttcctctaagctaccagtgggccccatccatacctcttttgtagcagatgacagggtacatgctgcatgttacatgtggttttgttttaaatacttgtctcatactacacagtgagccacttgagggaaggaactgtatcctatatatctttattaatatacttctagcctaccatatgaaacatagatttttttttctttttaataagcaaagttttttgtttattttaatgttgaattctaaccttgctcctagagagattttaatggaaagtttttagagaggttttatcttccataaatagaaactgagccaactttctatgtattagtagccaatctacatctcactgtcagtgattggtatgtagagattctgaaaaattaccctcatgttatgcattatttaagccactccctctgtatctctgagacattgtgtttccatgtactatttgtttctactgatgacaatgacattataaaatgaactttcatagtcttgtggattaccgtggattaccactcaaggtgaatacagaattggatggatatattggctggagttagctgaagttcaaagttgtaataagagcaactcctttctggtcactgaagcagtatatttgagcttgtttgctagtcagtcagattattctgcaaataatatccttttatcctttttgaatgttgtaatatgtacatgatttagtctttttatttgtttgtttgtttgttagatggagtctcgctctgttgcccaggctggagtgcagtggcatgatctgggcacactgcaacccccgccttctgagttcaagcaatt

SEQ ID NO: 12396 - DNA, 1653 bp, Homo sapiens
taactgagtatgtatggctgtctctactgccggttgcctagagagcctgagtactgagcctgggtcagccccaggaaccctgaacatagtcattgtctatagattttgtagcttactaacatgaatgcgttttcttccagaaacaaatagaatactattttaagtagcatttctaggactttaccactacctgctaccatatcagagaccaactaaattttcttttttttttccttcccgttagtgtgcaacgttctgactacttgaatacatttgagttcatggataaacttggagaaaacttgaagatcaaactagctcaggccaaactttaagttcatacctgagctaagaaggataattgtcttttggtaactaggtctacaggtttacatttttctgtgttacactcaaggataaaggcaaaatcaattttgtaatttgtttagaagccagagtttatcttttctataagtttacagcctttttcttatatatacagttattgccacctttgtgaacatggcaagggacttttttacaatttttattttattttctagtaccagcctaggaattcggttagtactcatttgtattcactgtcactttttctcatgttctaattataaatgaccaaaatcaagattgctcaaaagggtaaatgatagccacagtattgctccctaaaatatgcataaagtagaaattcactgccttcccctcctgtccatgaccttgggcacagggaagttctggtgtcatagatatcccgttttgtgaggtagagctgtgcattaaacttgcacatgactggaacgaagtaggagtgcaactcaaatgtgttgaagatactgcagtcatttttgtaaagaccttgctgaatgtttccaatagactaaatactgtttaggccgcaggagagtttggaatccggaataaatactacctggaggtttgtcctctccatttttctctttctcctcctggcctggcctgaatattatactactctaaatagcatatttcatccaagtgcaataatgtaagctgaatcttttttggacttctgctggcctgttttatttcttttatataaatgtgatttctcagaaattgatattaaacactatcttatcttctcctgaactgttgattttaattaaaattaagtgctaattaccattcttctgcgtttctgtttattggatgccaagcaccacgctacatcctagccataggagtgtaatctgaaaaaattctctgctcttaaaaagtttaccatggtggaaatagataagtaaatagtaagatgtagatcctgcagtgaaaggaaagaggaccaaagagggaactacaggaagaattaaggaatattagagaatagattatgtctatgcacatgctaaggagtttagtcattatcttataaatgattagggagccaatgaagacttttaagaaataagggacttgatcatatttttatttttaaaaatagcactctgggaaactttgataaaaaatggatagtggctttgagaggccaaggcaggcagatcacaaggtcaggagttcgagaccagcctggccaatacggtgaaaccccatctctactgaaaatacaaaaattagccaggtgtggtggcgcac

SEQ ID NO: 12397 - DNA, 1147 bp, Homo sapiens
tgggcgacagagcaagactccatctccaaaaaaaaaaaaaaaaagttgaaataaggaaaataagactgaagaatttatgtgtgtgttgtataactagcttccccccataactttaaaaagctgttgtgtatcccttcttccgaaacatcttaaaatgaaagagctagaaatgatgtgaaaatgcttatttttcttctgcctgctcacattaatgctttacctccaaatttttattaatttaaatcttttctataatttgaatagtaatgtttaaaattgagttggctatcagatcatagttgtagatgattggggctcttatgatttagatagcagtgttttcagtcctttggaatatatgaagctagatttatttactgtttgttttcatagtctgacttttcacagaataggattttctggatatttcgatgctgtttggaatcaacttttgagcttcctgaggaatttagatttttgcttgtttcttttgtttttcagactcatgaaatggccacagatgataagacgtccccaacactggactctgctaatgatttgcctcgatctcctactagtccttctcatctcacacactttaaacctttgactcctgatcaagatgagcccccttttaaatcagcttatagttcttttgtaaatctctttcgttttaacaaaggtaagacttattaaagataagaggtttgattcaggtctgattgtttgaaatgctcctttgtctccagtggctcaccatgatcatatagtggttagtactctgttcagctttaatgctgggtctgtaagaaagtgaaatattaacaagcgatagctttaatcgtaggtctccagggtttactgctgaagagaaagctagaattttcactgtaatatcattaattattggtaactaaaggtctggattaaaagctaaatgttaggccaggcgtgatgcctcacacctgtaatcccagcactttgggaggctgaggcgggtggatcacgaggtcaggagatcaagaccatcctggctaacacggtgaaatcccgtctctactaaaaatacaaaaaaattagccgggcatggtggcaggcgcctgtagtcccagctactcaggaggctgaggcaggagaatggcgtgaa

SEQ ID NO: 12398 - DNA, 1225 bp, Homo sapiens
aggtttagcgagattaagtaatgaacccaaggtcatgtagctagtaagaggtcgagcctgcacttggacctaggtttgtctgactctatggtgctattctagtgggttatggggactgagaataaaatatttgaactcaagatttccctccaaaatcaatttcatcttgtattaataatgttagacgtttcaaaggcacccatccaactaactttatttacattccatatacttaaaaactttttaaaattgtcatttcggcattttatattcttaaaagccatgcactgcaaaaactatcattcataccatttacaccctaattaaaggaagaacaaaaatgacacataatctcattattgcaaggaaaaagattaaatctgcttttaatgttaaagcgcctcattgaaattcccttttactgtcctgaattatttcagtattttcctattttctttatagtttgattcatccagattcctcaaatactcctctttcaacaagacttgtatctgtgcaagaggatgctgggaaatctcctgctcgaaataggtaaactgacaaatgaaaacactgtgctctctgatgtttatttcttttcatgctaataagaagaacaaacggataaaaagggtgggattgattgtcatatacttccgtagctctaaaagctgaattaaactatcattttctttttgctattcagcccttgtttccattctctcagtgactttccagtattctccagtggcttccgggtttggaacctacaccatcctttctcttctggttaaataagacgtgaaggatgtgagggaaggagccatgtggacattttgtggaggagtgtcccaagaaaacaggaataacaaattcctgagaggaaatacacttggcaaggaataacaaggaatcctatgataatggagtagagcagtcttagagttaattataaggactctgtcatttactctgagtgagatgggaagctgttggagagttttacattttttgtcgttaatttttaattgctttgaaaaaatgtcaaacatgcagaaaagttgcgagaatagaaaaatatatcttcatgtatttttcattaagatttactaatttatattttgtccctttgctttctcattttttctttttttaatttttatttatcttattattatttttgagacggagtctcactctctcgccaggctggagtgcggtggtg

SEQ ID NO: 12399 - DNA, 2131 bp, Homo sapiens
ttgaacctgggaggcggaggctgcagtgagctgggattacaccattgcattccagcctgggcaacagagcaagactgtctcaaaaaacaaaacgaaacaaaaaaagaaagttattcttagtaaggaacttcttgtttaatagcatttttgtttattttaaaaagtgatcagaagtagtaaactatctttgaggaaatactgtaaccccagaatatttcctcttgacttctttttgtaacaaggataatttagggatttataaagttgtaaggatttcactgtttttggactgcctataataatagcacattaaccttcacataataagaaatctggacaagttcagttacacagtatgatgaatacttgaattaggaacattgtggaaaatttgctttagagaatcaaggcagtagtttggtatttggtgcttattaaaaatgtggtttgttttgaactggaagcaagttgaccaaggacttatgactaatgtgatgctaagttccacttggccccttttaaaaacgtgtatgtgccttttgaagatacacaaaacactgaggattttagttttgaaatcaaagactattaaaggagctgtacagaggtaaaaaaataaatgtggaacattattaacttactttgtgtctaggaacaatggattttgtatctgatttaaaatgccaacactgttttgtctctgttcattttttctgtgaggatacttaaggttattattcctgtctgtttcctgtactcccctagtcatgagcacttgaagtacaaggtgtctccccctaggtgcaattaggttgtttctttgtttttagtttcaattctatgtgcatagcaggaatgctccacaggaatggcttctgacaataatctgtcctgttgattttgttttccttgcccatgacttgaacaactgtgttttaaagtactgtagtctagtaggtaactttgtggcaaaaattttcaatataatacattctgaaacaatagttgctgccttgcaaaggtaatctctcattttaaaattggacagtattaatgaaggggaaatatacaatttatttctattgagtggtagaactatatgtctggtcccttgctgctcttgtttaggccactatcatagatatatttcaaatattgtactactcagtgttaagtattgaatgactgtttccctttccttcaaggcctagagtatattctgaaaatttaggaatgaggaagaaatcttaatacttccttccttaacatacaacatgagtcccgagaataattgatagtagcaagagaaaactatgtcagtaacatgttgctttgtataaaaatcttatttataaatgtgaagctttttgatgccatcaaaacttattaaaaaataggatttacttttttctaattctgacctaagaaaaataatgagaacaagctgttgcaagctcttttgtagtctattgaatattttatagatattcaaaatttcctacaaactataattttttccatgatttagcagtgagtgattttctagctttggctcttattaggtattgtaaatagtagggttatatcgatatcagcttttgtgatggcattgtggtcatcagcttcatgacattttacccatttgcagtgatcctgtgtaaaactgccaaggaaagtaattacctgtaggagtttgctgagcttgaagagtgaaaactgttgtgaatgagcctgatcataaaacggaccaggccattcattattcctcaagtgttaatatactgacttatgcagtattcaaaccatctagtgcaatgtttttgtttttgttttttttttggtaacacaggtgcagtgtattatagaaaaaataaaaactacaatcattagcagttttaatactgctgtgtcagttttgtaaaaaatgtacattatgtcttttgacatgttgaattttaaactagggaaatgacattgtaaatcatagtagcctcttttaatttaatatgaaaaatgccactatattgaaagtacttaatgtattgtatatatttctctactttggttctagctattttatatgattgacatgttatttaaaagataactgccttgaacttttggagacttg

SEQ ID NO: 12400 - DNA, 1148 bp, Homo sapiens
tcgccctttgcccctgcctttttacagccagatgacaaaaaatctctgcaacaaaccagtggcccagctactgccaaagatagttttaaaattgaagagccccatgaggctaaacctgacaaaatggcagaagcaccaccctcagaggcaatgaccttacccaaagatgctcacattccagttgtagaagaacatgttatggggaaagttttagaggaagaaaaggaggccataaatcaagagactgtgcagcaaagggatactttcacccccagtggacaggaacctatacttactgaaaaggaaactgagctgaagcttgaagaaaaaaccaccatttctgacaaagaagctgtgccaaaagagagtaaacccccaaaacctgcagatgaagaaataggcataattcagacctccacagagcacactttctcagaacagaaagaccaagagcctaccacagatatgttgaaacaggactcgttccctgtaagtttggagcaagcagttacagattcagccatgacctctaaaacactggagaaagccatgaccgaaccatctgcattaattgaaaagagctcaattcaggaactttttgaaatgagagttgatgacaaagataagattgaaggagttggagctgcaacatcagctgagcttgatatgccattttatgaagataaatcaggaatgtccaagtactttgaaacatctgccttgaaagaagaagcaacaaaaagcattgagccaggcagtgattactatgaactgagtgacactagagaaagtgtccatgagtctattgataccatgtctcccatgcataaaaatggtgacaaggagtttcaaacaggaaaagaatcccagcccagtcctccagcacaagaagcagggtacagcactctcgcacagagttatccatcagatttacctgaagaacccagttctcctcaagaaagaatgttcactattgatccaaaagtgtatggagagaaaagggacctccacagtaagaataaggatgatttgacccttagcaggagtttaggacttggtggtaggtctgcaatagaacaaagaagcatgtcaatcaatttgccgatgtcttgcctagattccatagcccttggatttaactttggtcg

SEQ ID NO: 12401 - DNA, 1400 bp, Homo sapiens
gttgaaagttgaaactaactataatagtttgaaacatgttttctcatttttccaaatagtatctgtttattaaattctctaatagaagatgtttgtctttcttacccaaagtaaagatcccctgatcagaaagaaaaaatacaatactttgggaagctatagctataaaacacttgagacacagatatctaaatcagtttttttccaagactccaacattgcactctgtaaagtaacacactgtgatctagtattatttatcagtagataatactgttctgactgtatatacagtctagaactcacaaatcaattagttcctctcacaaatcattcatcttagacttacaaataaggaatgaaatagtcaatggcctgattaaggcaaagagctaccaggctagatggacactttttaaaaattttatctgttctttttcttgctcagggctggtaggttggatctgaaccattaaaatcaaatggtccactaggcgtatgatctctttgagccaaatcagttcctgaatataaaggaggaaatgatgaggatgtactgaggcaacggggaagtatagaaacatccaagacaaaagccaagggatgcaaaggcagagacacaggtgctttttggtgacccagtggatatggcaaccagtgtaactgccatacaagaaaccctaggagcaaacccacaccactcattctcagctaagagattttacacaggcaaacgtgtcttaaaccatctataaatcagttattttatatgacagtcaaaaccttagaaaccttaggatcattatatctattttctgcctattaattgctgtgaggtttgatttgaccaatctgggcaatttattcatcagcttcccttgaagtgcaccagaaaatagaagaaaggtgtgtggagacttagggtattttattacatgttttcatagtcttaaatagtgattaaatttctctagaaagaagttaacagctcattagaaaagttttaacctgtgaaataagtatttttctcaacattctttaaagtttttatataagttaacactaggtaaacattctgcatactagaagtcagtttattacaaatacatgtcaaaaataaagattatacaaggcaccaaactactagatttggcattaaaacaaatgtttatttctaatcacaacaaaattataatgaataaatgttcttgctttgtatggaaatacaattctttattaaagttaacagaaaggaactgatcgtttgtaccagtaaaagagagaaacacacaggttaaatatcttcttgtggggttaaggggtagaacctatcttgccttcactctcaagataacgactcaaattaagctttttgagcaccactcttgtggggacacaca

SEQ ID NO: 12402 - DNA, 2139 bp, Homo sapiens
ttctttctagacatgcacatgatggtgtccaagccagaacagtgggtaaagccaatggctgtagcaggagccaatcagtacacctttcatctcgaggctactgagaacccaggggctttgattaaagacattcgggagaatgggatgaaggtaagaaatcgtgatgagagtgttttgtaacattcactctcagttgggaagatttgcgggaaacaggaaattttctctttttttgatacagtcttgctctgtcacccaggctgaagtgcagtggcacagtcagggcccattgcaggtaaagaataccttacttaagcagctgttcttcagctatgatgccaggatttaacttctttgtcacatagcatttatgtattccactaaagttttctgaaagctactgcttgttgaaaatacttacatttaatagtcttgttaacttttaaaaaataagaacagatatttctactgggcctgctatgccacaataatataatacagaagtaattgtaaatgtgatatagcatatttgtgtctgttacaggttggccttgccatcaaaccaggaacctcagttgagtatttggcaccatgggctaatcagatagatatggccttggttatgacagtggaaccggggtttggagggcagaaattcatggaagatatgatgccaaaggtaaaagaagtatttgattttggggtgaggcttttacagtgtgttcattcagtaagcatttattgaaaggcttgtatatttaggcataacctgttctgaaggtgaggagatggggatgcttacagatcattctaatacagtataataaatgctgtaatagatttctgatttggaaatcagagaagtattacatctttatcttgaaattttctctttctttgagacaaagtcttgctctgtcacctgggctggaatgcagtaattcaattagggttcattgcagccttgacctcctggactcaagagatcctcctgcctcggccccctgagtagctaggactacaggtgcataccaccatgcccggctaattcttacacattttagtagagaggaggtctcactacgtacccaggctggtcttgaactcctgggcttaagctgtcctcccaccttggtctgccaaagtgttgggattacaggtggcagccaaccacgcctggaagtcttgaaatttccttttgaaactattatctctaacttttagatctcttggaagttgtcattgactattgaggatttgtctgtcttgtttacatgacagtctctgcaaagacaatacagattgctgtttgccaaatagaacaaagcttgctattaaaaaccaagtgttccccagtaatatgttgtattggtatagttattgtgtgagacaattggagttttaattgctaatatttgctgttggatttttttgtttgattgtcccccacccccacccccaccaacatacccactttaggagttacttatttcctcatgtatatatctaggttcactggttgaggacccagttcccatctttggatatagaggtcgatggtggagtaggtcctgacactgtccataaatgtgcagaggtgagattgctcttcaactatgactagaccaatttcccgtcaaatatgtctccaggacattgtctcatgggccagcgattccctctgtggttcctaagttgactttctttcttggaaaagtattttttgttcacatgtacaactaggaaaataaacagccataagtggatatgctttttttttttttttttttttttctttttctgagacagtctctctttgtggcccagattggagtgcagtggcgtgatctctgctcactgcaatctctgcctgccgggttcaagcgattctcctgcctcagcctcctgagtagctgggattacaggtacctgccaccatgcttggctaatttttttatttttagtagagacagggtttcactatgttggccaggctggtctcaaactcctgacctcaagtgacctgcctgcctcggcctcccaaagtgttgggattacagatgtgagccatggcgtctggcccgtaagtggatattctaaaatcacataaattgttaaaattgtaaatcctggttttct

SEQ ID NO: 12403 - DNA, 1486 bp, Homo sapiens
cagtgattaaaactgattgtgcagaatattctaagaggtcagaaattggtgtgtataactacatttttagtgatgcaatttattgattagtgagtaagatactgtttttattgagagatttgatttttataaagtaaaaatacggctgcattagggttacaaacagaaaagtgtcttaatgtctaaggagggcatattagctacactacaaaaacaaattttgtctgtacttctgaaaagaattttgttgtttctcagctgttttccaaaagcaaaggaagtctttatggtttttttctatttcatgttattgtgatttgtttataagtttgggtggggtgcataccatattcttggttcttaaaatctatcacttttcaccttacacttgatgtgtgaaaactataaaaacaatgtgtgaaacccaggggttctaaaatacaagcatagattttatcagggtgttttgtcaaagcaggttattcagtgattcctccccaccattcttaagaacgttaaataatgctgttgtgttagctctgagtagaaaggaaaaagtaaaacctctgtttggaggtaatattgggttgaattctgactgcccctttctagctggacctttaacaaatcacccaatcttttttgtgtttctctaaagtcatttatacattaaatgtaattatagcaactgtggggttctgttgagaattaagagctaacactatatatgtaaagtttccagtactagtcccagaatttagaatatgctcaacacaaagtaaacagcattatataagtttatatttttgtgagttataaagtactttgatatattctcattaaatctgtaaatcacctctataagtaagtggtaataataaagcagatatttttgtccccatttaaaaaatgaagaaattaatgcttaatagggtggtaccctggaaaggatctgggaagtggtagaatttctggtctgtacttttacaaatggagcccttgggaggtgggttaggtaaaagaagctttttacttaacgttgtcttatttccagtctaattttacgctgtagcagaaccagatggctgagaaaattctggaactatggatcttgaccccaaggatatattattttattccaagaaagatcaggtaggcgaaaagatgacaggatacagagtcaatccataaactaaatatttataactgttctgaattatacagagtctaaaaatatgtgtcagctacttcattcctgtaaatactcttgctgtgttataaatatggcaagaaataaacatgaccaatatcaatagacttcttgaggctactataagttttgagaaataaggttcaaaaaataagaatgctaacacttaagcacagactagagcttgcttgggtttcttcctgcattacaaggtaaaaatttgttaatgtttgtttttattcagcttgggaaagctttgtgccatgaatacgtcgc

SEQ ID NO: 12404 - DNA, 1917 bp, Homo sapiens
aatgccagattaggaattcatgttatgtttaccatttagaagctgggattgcttttaaaggtttttctttttaaaattggcatgtttttgatttatcatgtctttctattcagattattgggtatcaaagattaatgaggacaccagaatcttggttaaatagacaagtggtatcattactgtttgagtcttttaatattctccatacctgccaccagtgaaaaaacttgccttttttttttttttttttttagtaaacagaatattatcaaacaatttattttggctttattgaaaaaagagtatttggtctaaatgtgccaccataggtgttaaattctcctatctgcaattgtctttatcctatattgtgttcatttcttttcttaataatttactttgttgtgtgtttctacactttcatccctgttttttatcttgtatatcatcaggaaattgtgatttaatcattaacattggtttttttgtgtgtgtggtaaaaatcaacactaggctcatggtacatatttttattctgtacatttgcttgtaactatcaatttgtaactctgtttatctactacatgtgtatatatacttagagcattttctctaacacattttaatgttagtattttttaaaaggtctgaccagtctagcaaattgtcagtccaacgtcattactttaaattaagaagcagtcttcttctggtaaaccttgttggtatttgtaaaataattttgaaggtcttaatttcttcctttgtaaaaggaaaaggttttttttaaagtttttaggttggcatggaggcagaagttggtgattacttgatttacaacagattttttccagatcatacaaaaggccatacagtaagtatagaagtaggtatggggagggcttactaatatcaaataggcaaggccttagtgagtgggcaggataccacctgagagtggccagatgtggggaggttactctgctctgggtgctctcattcatgaatcgacaaggatacattagattattttgaaacatttttttaagaagcagaattctttaataattccttcctagacattgaatatacttataaaattaaagacttggggaaggagacactgagagacttgccagtttggttcctcatgaacaaaagaggacagtttgataactaccagaatagaatatccctagttttaaaatagtgagaatctctgaagttcatcaacatcttaagatgcacttacttgaaagtttgagattctgtttatcatttgaaaacacattttgctttaattctttctttgacatgttgttttttcatatcaagaaatatatgaacaaaataataaccttttgaccctgaccttgctgggtgaattagctctgaaacactctctacaaccagtaatgcatttgtcccacatttcattctgatagaaaatgaacaccatagcaccaaacaaaaatccgaggcgttagataatgtctggattaaataatttaagactctctaggattttggttgtcattttttatttataacagactttaagtcactttctgttgcctcataggtcacattttagacaggtttgtgtctgttccttgcatctgaattcctgattgtaaagacacctatgaggtctcttagtttttgtcattcattttcttggtttatcacccctcccttctttttgttgtttttccctgactgttaagcagtttcatctttgcttttgttaaatatttgacagcagttagtttgtgttaagctcttgaaacttgtgattgtactttctgtgtagatatacatgtaattattttttatttttcaatcatagattcaagcttccttcttttttaccacaaatcattaaagttatttgtgtttccatatacctgtgtcttg

SEQ ID NO: 12405 - DNA, 1208 bp, Homo sapiens
aaaaaatatactgagtttgacagtacaggtgaggattttgaattttgggaggtggggtagaaaaaatgttaaatagatgatccttttggagaactacctttgataatttacatatgttttaaccattgggagatggctgtatactttgcatcttgtaatacatctaaattttttttcagtaataaactacttatagacaacaacgtagttaggaaatgtaaagtttaaaggtttgcatatattttaggacaagacagtatttcagaagagcaaatttgtgacttttgctagtgacaaataaattgttgtgcagtgtaatgtcataatcccttagctgtaatttgaaaataaaaatttgtgtttgccaatatggctttaagatatatggtttatgatctgatttttcatattgatggccaggttagagaactagatactaaatagaagtagtcttacacttaagtgtaaaaattgttgcctttgaagattcagatataagcttacaaaatatagatgagttataagaagcaggccaaagaaatactttggcttgtatctttctttctcttactgctttttttgtattttagtaactcatgttgttgttcctggtgatgcagttcaaagtaccttgaagtgtatgcttgggattctcaatggatgctggattctaaaatttgaatgtaagtgttggatttgagagaattaagaaatgaattagactagttttgtttttcatggttattaatgcctgtgattaaggaacttgatgttaattttcttacctctggttagtcactgcattttggaaaagcttctggctgggcgtggtggctcaagcctgtaatcccagcactttgggaggcccaggtgggcggatcacaaggccaggagatcgagatcatcctggctaacacggtgaagccctgtctctactaaaaatacaaaaaaattagccgggcgtggtggcgggcgcctgtagtcccagctacttgggaggctaaggcaggagaatggcgtgaacctgggaggtggagcttgcagtgagccaagatggtgccactgcactccagcctgggcaacagaatgagactctgtctcaaaaaaaagaaaaaaagaaaaagcttctcatatttatggtgtcatttagatgtccttagtaaatgtatatacatatgttctggttttaaagtcttttttcctacaat

SEQ ID NO: 12406 - DNA, 1394 bp, Homo sapiens
gttatagttcatgaacatggtatatctctccatttgtgtagaattctttaataagtattttgtaattcttagcaaacagaacttatacattctgttagatttgtattttatgggtttttttgggtactatatttggaatataagtttcatgttttgttctctgctatatcttcagtctctaggatatggcacaaagtcggattcagtaagtattgaatgagtgaatatctgctatcaaagagttcacactctaggagctgagaaagaagtacataattaaaagatgatacactttaggggaactgtaaacaaaattcttcgggagctccatgtgggagcaataaatttcatgtaacagatttctttttctttttttctgtcagatttgaaagaagataaacctaggaaaagtttgtttaatgatgcaggaaacaagaagaattcaattaaaatgtggtttagccctcgaagtaagaaagtcagatatgttgtgagtaaagcttcagtgcaaacccagcctgcaataaaaaaagatgcaagtgctcagcaagactcatatgaatttgtttccccaagtcctcctgcagatgtttctgagagggctaaaaaggcttctgcaagatctggaaaaaagcaaaaaaagaaaactttagctgaaatcaaccaaaaatggaatttagaggcagaaaaagaagatggtgaatttgactccaaagaggaatctaagcaaaagctggtatccttctgtagccaaccatctgttatctccagtcctcagataaatggtgaaatagacttactagcaagtggctccttgacagaatctgaatgttttggaagtttaactgaagtctctttaccattggctgagcaaatagagtctccagacactaagagcaggaatgaagtagtgactcctgagaaggtctgcaaaaattatcttacatctaagaaatctttgccattagaaaataatggaaaacgtggccatcacaatagactttccagtcccatttctaagagatgtagaaccagcattctgagcaccagtggagattttgttaagcaaacggtgccctcagaaaatataccattgcctgaatgttcttcaccaccttcatgcaaacgtaaagttggtggtacatcagggaggaaaaacagtaacatgtccgatgaattcattagtctttcaccaggtacaccaccttctacattaagtagttcaagttacaggcgagtgatgtctagtccctcagcaatgaagctgttgcccaatatggctgtgaaaagaaatcatagaggagagactttgctccatattgcttctattaaggtaggatgcttactctgaaataccatctcagaatgaggccaactataaagcaatttctttg

SEQ ID NO: 12407 - DNA, 1228 bp, Homo sapiens
catcatcatctcttgcctggattattgcaataacttggtaaatattgtccttgtttttacctttatccactctcttggtttaggttcctccaatagcagatcctgaacaaggatttcagtgtaacttatttaggaggtgatctcagggagcattgtagagagtagtgcagagataggagtaaggagaaaagcccattaaagatttagtgttaatgaggtggttactattgtagacagccaggctcgatcttgctagggaacctctgagagactgagtagaacatgtctctgaattgtgacaccaaggggcacaagaaacttgagacagggaacccaagtgatagaatatctcccatatctaaagagaactgaagcactgtgcctttttctttaatataggaggtgcatggtgtaataacttgtcctttacattgaaggaatgtcctagcttgcctcaaaacatggactataaaaatgtcactaatgttctgcagccaattaagccaactgagttcctttccttgtgggggcccagtgtgcaatggctgcacacagcagcttccttggtagtgtacacagcctgttggttgtatgggttgctctgagggaccttggagacaggcctttccaatggatgttcatgtttctgaccttgcgctaccccaatgtaggctccaaacaggcatgcgaggtgcctttggaatgccccagggcactgtggccagggttcacattggccaagttatcatgtccatccgcaccaagctgcagaacaaggagcatgtgattgaggccctgcgcagggccaagttcaagcttcctggccaccagaagatccacatctcaaagaagtggggcttcaccaagttcaatgctgatgaatttgaagacatggtggctgagaagtggctcatcccagatggctgtggggtcaagtacatccccaatcgtggccctctggacaagtggcgggccctgcactcatgagggcttccaatgtgctgcccccctcttaatactcaccaataaattctacttcctgtcaaaaaaatgtcactaatgtaccctaaattttcttttttatttttattttttatttatttatttatttttttgagatggtgtcttgctcttttgcccagactggagtgaagtagcatgatcttggcttactgcaacctccaccccccaggttcaccctgtgattctcctgcctcgccccctgagt

SEQ ID NO: 12408 - DNA, 1114 bp, Homo sapiens
cttcttccacccacagctgttgctttagcttgtaatataatttcttacatcgatagggtttataactttaattttgtactgtctctgtgattacctcaattgtttaatcttagttctgtatttacatgaattcctgactgatcactagtcttgtcatagtttctcccatccctaaatctcttattgtggatttatttctagactggctggttctggtcctccagtcgtgtgtgtgtgtgtgtgtgtgtgtgtgtgtgtgtgtgtgtgtgttcatgtacatgtgcattttttttaaagatgggctcaggctcagttgctttgttctttatcatcaagattttatgtttgtgtgtatctgtttggctcttaattatacttaaaacatttgtttagtcatgttatttttttgagaagtgtgcatacatctgaccttactgatcctgcttagtaatgtgcatgtatatttttacatttagttctaaatggagcccctggatttataaacttgtgcgatgctttgaacgcctggcagctggtgaaggaactcaaggaggctttaggtattccagccgctgcctctttcaaacatgtcagcccagcaggtaaagctctgtgctctggaaagctccagaattgttcgaaaggcatttcttcttaaatttttttgaatattaacaagttctaatgtgaatatagacatgctatgaaatctgaaagtcatctgttgataacagtatcaatgtaataatataaaatctgatacacacacacacacagaattgtgtaatattgtcaggaaaatgaggcaggaatttgtttgtggggtggaaccataaaagtttagaaaataaaagtgaaatgtcctaatgcaatagactaagtcttgtgccacatctttgaaaatgtaatggagtaaacataaagaagttcttctttggactctttatctgaaacttcttatagtcgttgtatgagatactttgcttctgtgtttaaatcatgaactccgcaattgagttgtctgtacaccacatcttgctgacagtcctccagcacatgatttgttctcaggtgtttattgggtgttaaagtgatgtgagtggggaagaaataa

SEQ ID NO: 12409 - DNA, 1258 bp, Homo sapiens
tttgataaagtggaaggcactgtttgaggaagtccctgagttactcactgaggcagagaagaaggaatgggttgagaaactgactgaagtttctatcagctctgatgccttcttccctttccgagataacgtagacagagctaaaagggtaagtatggaattgggtgcatttgcttagagttgagcattatgtagaaactgtttcagaaatcctgcttttgatttttaaaaggtgtggcaaagtgatacagatcagtaatattcagagaaccatttgacttctccattgggtggatggagaacccaaatcctgttgttattttgcctttttgactgagtgtatctttgttagcatatgctttttagagggggattttgagttttgcaggtttttacataaaatcgcgttttgaaaatcaatatacttcccccagagtggtgtggcgtacattgcggctccctccggttctgctgctgacaaagttgtgattgaggcctgcgacgaactgggaatcatcctcgctcatacgaaccttcggctcttccaccactgattttaccacacactgttttttggcttgcttatgtgtaggtgaacagtcacgcctgaaactttgaggataactttttaaaaaaataaaacagtatctcttaatcactggatccatagtttttggtagttgtgttttatgttaaagatgcaggctctttgaactgacacatgacacataacacataaatgaggaattccagagcacccctgcctaccggagctcagcccatcccacagcactgcccgtgtgaaacataaacattagcaggaaccaaacgagctgagcagccagaggacatggcacaagtcactgtgtacaggccacacttaaggactgggagttatacccatcttaaaggtggagtattgatgtaaattacctagaattcttctgcatgggagttgtatattaaaggtccatgttgcctcctaggggagtcttctcatgccgtttttgtttgtttgtttttcatttttttaatttgttattttgagagggagtctcaaaaaaatagctctgtcactcaggctagagtccgtggcaccgtcttggctcactgcaacctccgcctcccgggttcaagcgattctcctgcctcagtctcctgagtagctgggactacaggcatgtgccaccatgcctggctaatttttgtatttagtagagacagggtttcaccatgttggtcaggctggtctcgaact

SEQ ID NO: 12410 - DNA, 2205 bp, Homo sapiens
accagtggtccactgtgtgacttccctgctccctctaagcaagtcactcctctcctctgggtctctgtttccttacctataaaatgagaacgtttcttcatgtgatctcaagtcccttttaaaatcgctaggattctttgaaaaccttttctatcatctagtgcagagaacttgttgaggaagttgggattggaatgagcctcagcagatgggcaaggtttgaataggaagagaagagacatttcaggagaaagaaacaacatagagagacagatgtaggtataagatatggtaataagccaaaatgtattaagagttataaatgcatgaaatcatcatcaaagcttgcttagtgattaactgcttatattttgccagtgcatatgatgtgacatttttctttaactcaaacactaaattacgatgtcctcaggttatcataaaccccatttgacttcatgcctctactctctcagggctggcgctgtgacaactgccgcagacctgggggtgaacccagtcccgaaggcactactggccagtcctacaaccagtattctcagagataccatcagagaacaaacactgtaagtgcattagcagcacaagtgtgttccctcatactagacagtctctttctacaggtatctttcttcagaatgaaccaagtgttttaattaattaaaaaaaaaaacaactcataaatgacttaagtgaaacactgtattccataatatagtttaagttataatttatgtaactcttgaacatctcctattgcccagtatgctgctaggttcttgaaactaggaagaaatattatcctatctataagcagctgtcatgagtccccacctccccgcatttttttttctgtacactttacagtatttgccactaatttttttttccttcttcctttttaacagaatgttaattgcccaattgagtgcttcatgcctttagatgtacaggctgacagagaagattcccgagagtaaatcatctttccaatccagaggaacaagcatgtctctctgccaagatccatctaaactggagtgatgttagcagacccagcttagagttcttctttctttcttaagccctttgctctggaggaagttctccagcttcagctcaactcacagcttctccaagcatcaccctgggagtttcctgagggttttctcataaatgagggctgcacattgcctgttctgcttcgaagtattcaataccgctcagtattttaaatgaagtgattctaagatttggtttgggatcaataggaaagcatatgcagccaaccaagatgcaaatgttttgaaatgatatgaccaaaattttaagtaggaaagtcacccaaacacttctgctttcacttaagtgtctggcccgcaatactgtaggaacaagcatgatcttgttactgtgatattttaaatatccacagtactcactttttccaaatgatcctagtaattgcctagaaatatctttctcttacctgttatttatcaatttttcccagtatttttatacggaaaaaattgtattgaaaacacttagtatgcagttgataagaggaatttggtataattatggtgggtgattattttttatactgtatgtgccaaagctttactactgtggaaagacaactgttttaataaaagatttacattccacaacttgaagttcatctatttgatataagacaccttcgggggaaataattcctgtgaatattctttttcaattcagcaaacatttgaaaatctatgatgtgcaagtctaattgttgatttcagtacaagattttctaaatcagttgctacaaaaactgattggtttttgtcacttcatctcttcactaatggagatagctttacactttctgctttaatagatttaagtggaccccaatatttattaaaattgctagtttaccgttcagaagtataatagaaataatctttagttgctcttttctaaccattgtaattcttcccttcttccctccacctttccttcattgaataaacctctgttcaaagagattgcctgcaagggaaataaaaatgactaagatattaaaagtatttgaatagtataatatggaggagttttatcttagggaaaccccatggtatgataacccccatctaacatgtcttactttgggtcagctgacacttttgg

SEQ ID NO: 12411 - DNA, 1210 bp, Homo sapiens
tgggtcttaaaatgccctagaaaatggtaaatgataaaaaataatattttaaaattcaaccaaagaaatggcccattggccaggtgtggtggctcacacctgtaatcccagcacttttggaggctgaggcgggtggatcacctgagctcacgagtttgagaccagcctacccaacatggtaaaaccccatctctacaaaaaatacaaaaaaaaaaaaaaaaaaaaaaatagcactgtggggagtgcctgtaatcccagctactcaggaggctgaggcaggataactgcatgaacccaggagatggaggttacagtgagccgagattgcaccacttcactccagtctgggcgacagagaaagactttgtctcaaaaaaaaaaaaaaaaataaaaagtaaataaataaataaaataaatggcccattataggggtttttatctttaacttgctatttttccagatcatggttctgaagaccctgtgacacgtcccagttcacctactgtcttgtgagtcagaatatacaaataactttttggtcctgactttccccacccctacaggatggtgccatgacaatggtgtgaactacaagattggagagaagtgggaccgtcagggagaaaatggccagatgatgagctgcacatgtcttgggaacggaaaaggagaattcaagtgtgaccctcgtatgtcatcacagatcatttttagtgccttattaagcattctcactttcattatcaggctgtaactctcattcacagaaatgattggagactttaggtctccttgaggagtgaacagtgggtttcttaatcttttgatttgggaaagtggagacaagcttcaaaaatgagtcatgatttaatgttattacaggacactttagcacttgtccaacctgagtattttgaccattatctgcagtaaaatgctacaaagaagctttattggtctgtagattcaacttttaaaatatgatttccatcttcccgttggaccctttccagtgtattaggtctaatttttggaagtgccaccctaagatctgtatagcagtactgctcttagggatgattcacataaatatgtggtgtttgcgctgtgatgatacaaatttaggacagaaatagaacccacccctagatcaagtctgcagtattgttctcagcttatgcgtgcatctgtcttgtgtctatatgcaga

SEQ ID NO: 12412 - DNA, 1365 bp, Homo sapiens
gattagtctggattctacttcctacaacttgcttctcaaatttaaaaaagaaagagagaaagagaaagactgcacatttcagttccattaggtctaatttgagcagaggcagcttctacggggctcagcggtttaaagctgtgtgtatgataaattcatactaacacttttttctttctaaactataaagaaacctttgagaaaaatcctaaagatttctttctggaaaaagtgttttgtgatctcagaactgctcattttctggtggcttttatcaaattgatgaacagtcattgttgcctgaatcgattattatcattgctgctacttcctggagcttaatgcgctttgcttttttggctctaacctctctcggctagacgagcttccccaactggtaacccttccacaccccaatcttcatggaccagagatcttggatgttccttccacagttcaaaagacccctttcgtcacccaccctgggtatgacactggaaatggtattcagcttcctggcacttctggtcagcaacccagtgttgggcaacaaatgatctttgaggaacatggttttaggcggaccacaccgcccacaacggccacccccataaggcataggccaagaccatacccgccgaatgtaggtgaggaaatccaaattggtcacatccccagggaagatgtagactatcacctgtacccacacggtccgggactcaatccaaatgcctctacaggacaagaagctctctctcagacaaccatctcatgggccccattccaggacacttctgagtacatcatttcatgtcatcctgttggcactgatgaagaacccttacaggtaattaattgttctcttcacttctcatggggcagcacagaaaggaataagttaggtaactgaagtgaccagccctcgaataaaaagtggcttcatggccgggtgtgatggctcacgcctgtaatcccagcactttgggaggccgaggcaggtggatcatttgaggttaggagttcaagaccagcctggccaacatggtgaaacctcgtctcttgaaaaaaaaaaaaaaaaaaaagtggctccacttttagaacctcttagaagatggcacatttaagccctgcttttttttttttttaaatcccaatatggctctactttggaggacataccagagagtcactagcttttatttcatagagaaaatgaaactatttctcttattctcacacatttgaggttcctttttgagtaagatagatgattctagaaaagaaagatattctacctgaatttccatttgtgtgcagaagtctaaaacactacctttacgatttgtccttgaagaaccccactat

SEQ ID NO: 12413 - DNA, 1066 bp, Homo sapiens
gggatggcattgtacctgttgagagaaaatacaaaatacttgccgtaatattagacacacacacacacacacacacacacacactctctctctctctcacacacacatacacacacacacacacaaaattgttagctggccatgttattgtaactcctaccacacatatttttacattataatacattaataattttaatatttattgaagtatttgtagatactataaagccagccctgggaaccactggtagtatctataaagcttttcagctcttcaaaataaaatgtctgagaggtagatattttcctattttctaattacagttgacctttctctctgaatgccaaaggagataatctacacattactagttatatatttcttgaaatggatgaatttgatatataccaaggaaacgttttaaaataccaaaactttacatggatgagccaagcaggcactaatctctagctatgctcctgtgcagatgtcagcccaccaagaagggctcgtgtgacagatgctactgagaccaccatcaccattagctggagaaccaagactgagacgatcactggcttccaagttgatgccgttccagccaatggccagactccaatccagagaaccatcaagccagatgtcagaagctacaccatcacaggtcagggaactcattgcactaaccacatttgttaacaaatacccacaatgtaaacgggcttattaactgttctacgactgacactgataaaatttattttcagtgttatcatcataacccagttttagaacgttattttcatgctatgatcagaaatagttttgtcctttgaatgcctgattttgtgtaatatttgtcatggaaattgcgtaagtgtcaatcaacaagtttgatcttccatcattgtgccctttcttatttaaaaaattgtaacataaggtttaaaactaaaagaaataaaaaacagtgatgtatagatcttagcattaaaaagcatagttaatataaaagtaaacaataccacttaataaaggccaaaattgtaaccgaagaatatt

SEQ ID NO: 12414 - DNA, 1222 bp, Homo sapiens
tgcaatggtgggatcttggctcactgcaacctctgcctcccaggctcgagcaattctcttgcctcagcctcccaagtagctgggactacaggtgcccgccaccacgcccggctaatttttgtatttttagtagagatgggattttaccatgttggccaggctggttttgaactcctgacctcaaatgatccacccgcctcggcctcccaaagtgctgggattacaggcgtgagccaccacgcccggccttgtatcacttttttttttttttttttttttaacttttctgtagttttgaaatttttccaaataaaatgttgagggaaaaaaactcttccccaaatttgaaataatcattttatcacaatttgaatgggctctgtaaccccttatcttgaattcgtcataatataaaattctgctaattacacgtagtatttacatgattgtatggaagaatcattaagacaattatctggaaaatgaacaaacagtaaatctgaatattgtttgaaaattacggatgtgaaaagtttcccttttttttctagtttctgatgttccgagggacctggaagttgttgctgcgacccccaccagcctactgatcagctgggatgctcctgctgtcacagtgagatattacaggatcacttacggagagacaggtacagcagtaaaatgctattttacactctgattaaatcagattctgttgtggataacctgaaagcccaacagtgaacaaagaattaaagaaactttggcaagtccattcaacggagcccttgttttttccaagaaaatacgtaagatatagatgatataatttgttctaaaacccaaataaaaagttgtttatatactacaactagagggggaacggcagagctgaggaaataaaaggattgtaaattcacaaacatattatcagtggtggaaataagtgatttttattttttcttctctttacttttctgtattttccaaattttatttaaaaggaatgtattctgttaaaagttttaaaaaggacacaatgcatgcaatcctgggttgagggcttaccttctcccacttctaatgctactctactactcagtgacattttaaagctgaaatgttaaaacagcgctaactgtaattttctctcaatgtttatacacttaccaaggtttgctacatgcataaatacccctttctgttcaagatagcgctcttt

SEQ ID NO: 12415 - DNA, 1194 bp, Homo sapiens
gcattgtaatttgtctgggataatgtctttagtttcagaaagttttgtgtttggcatcattaccactctgttgacatataaatttcctcttgagcttaggaggcttctctgagagtcaaacatttactttgagagtgggcagatcttgctttacttggaaggatacacttacaggatagaaacacagaatacttgaacactgaagaatttgaaaatgtcaattctcagaagatcttgaacacttatctccaaatgtgacacagaaacttactgtaataacccctaaaatctgcttgaattacttagcacaagaaaaaaatgaatgcttgagctggctattttgaattgagtcaatttaagattttaaaattcatatgtagcttagaatcagtacatcttactctttggtttatggcaaatcatggtattgatgagacaggaacgaaatgttggatgtacgttaatttcccctacaccttcctcacttcctaaactggtggtgtcttttcttttttttttctcttcctcccccgggtgggaaaaacaggtcttgattccccaactggcattgacttttctgatattactgccaactcttttactgtgcactggattgctcctcgagccaccatcactggctacaggatccgccatcatcccgagcacttcagtgggagacctcgagaagatcgggtgccccactctcggaattccatcaccctcaccaacctcactccaggcacagagtatgtggtcagcatcgttgctcttaatggcagagaggaaagtcccttattgattggccaacaatcaacaggtaacttttcttgtctgcaaagaaactcagaagactttcctacccagttggtagattctgtaaagtagcttgctgttgtctgtcatcagctctcaaaaaaaaaaaaaaaaaaaaaaaaaatagatcattgtcatggtacatggagagggaagtgagaaaatgtggagaaacatcttccttagaatatggtaaagaagcccgggcgtggtggcagtaaagaagataatttttttcctctcaagaaatttctcacctgatttgggtatttatgcatttctaataacacaagttttgttgaaaatgtagaaaattggccggacggggtggctcacgtcagtaatctcagcactttgggaggccgaaatgggcagatcact

SEQ ID NO: 12416 - DNA, 1182 bp, Homo sapiens
catgctgagaaccaatttgcatgaacatgttcacttgtaagtagaattcactgaatggaactgtagctctagatatctcacatggggggaagtttaggaccctcttgtctttttgtctgtgtgcatgtatttctttgtaaagtactgctatgtttctctttgctgtgtggcaacttaagcctcttcggcctgggataaaataatctgcagtggtattaataatgtacataaagtcaacatatttgaaagtagattaaaattttttttaaatatatcaatgatggcaaaaaggttaaagggggcctaacagtactgtgtgtagtgttttatttttaacagtagtacactataacttaaaatagacttagattagactgtttgcatgattatgattctgtttcctttatgcatgaaatattgattttacctttccagctacttcgttagctttaattttaaaattacattaactgagtcttccttcttgttcgaaaccagctgttcctcctcccactgacctgcgattcaccaacattggtccagacaccatgcgtgtcacctgggctccacccccatccattgatttaaccaacttcctggtgcgttactcacctgtgaaaaatgaggaagatgttgcagagttgtcaatttctccttcagacaatgcagtggtcttaacaagtaagcagttgaatgtatctgttccataaatattaacctagagcatagcaaatgaattctaaattctcaagtaggaggagctaagagcaagagagctgcaaccaagctacaaactaaactctgaattcaatgcacagctccattaattttgaaagatgtaatgtttgttgctatcttaatatacttttgatatctacagctttaaaaaaatcatagtggaaaaacacctgcaggaaagttccatgacttcaaacaaattctgcttctaaataagcacgtaaaaataagtgaatatcaagagaaattatatgactaaatctaaatctttagagaaaaaaatgagaactgaaaatagtgtcaccatatgtgctttattctcatttttataaaaaaagtgtcagcagttgattgatttaggatttgaatacttagaaaagtgactgattgtttggtctagattagaatgttgttgtgaagagagtcagaagtttaatttgtact

SEQ ID NO: 12417 - DNA, 1198 bp, Homo sapiens
catgatgttgtcatgagttttgtatgggagaaaaaaaatcaatttatcacccatttattattttttaaccttcttcatgcaagcttattttctactaaaacagttttggaattattaaaagcattgctgatacttacttcagatattatgtctaggctctaagaatggttttgacatcctaaacagccatatgatttttaggaatctgaacagttcaaattgtaccctttaaggatgttttcaaaatgtaaaaaatatatatatatatatattccctaaaagaatattcctgtttattcttctagggaagcaaactgttcatgatgcttaggaagtcttttcagagaatttaaaacagattgcatattaccatcattgctttaacattccaccaattttactactagtaacctgatatacactgctttattttttcctctttttttccctctattttccttttgcctccccctccctttgctttgtaactcaatagaggtgccccaactcactgacctaagctttgttgatataaccgattcaagcatcggcctgaggtggaccccgctaaactcttccaccattattgggtaccgcatcacagtagttgcggcaggagaaggtatccctatttttgaagattttgtggactcctcagtaggatactacacagtcacagggctggagccgggcattgactatgatatcagcgttatcactctcattaatggcggcgagagtgcccctactacactgacacaacaaacgggtgaattttgaaaacttctgcgtttgagacatagatggtgttgcatgctgccaccagttactccggttaaatatggatgtttcatgggggaagtcagcaattggccaaagattcagatagggtggattggggggataaggaatcaaatgcatctgctaaactgattggagaaaaacacatgcaagtattcttcagtacactctcatttaaaccacaagtagatataaagctagagaaatacagatgtctgctctgttaaatataaaatagcaaatgttcattcaatttgaagacctagaatttttcgtcttaaataccaaacacgaataccaaattgcgtaagtaccaattaattataagaaatatatcaccaaaatgtaccatcatgatcttccttctaccctttgataaactctaccatgctccttc

SEQ ID NO: 12418 - DNA, 1229 bp, Homo sapiens
tcagcacttttgtttctcaccttttctcctttcttggttctcttcctataaatcccatagtttcagaccttttaaattaggagagctctctggggaatgtgcttaaggtggagagcgattctatactaggcaggtagaaaggaatattcctcagctgtcttcaaatgattcattaaggaaaagcagggtacagtgataggaccatgagatttggaaacaaagaaagctttggggaatcactcccctggttcaagatttcctttaaagtgaggatcttggcggaggttgaagtgagccaagatcacaccgctgcactccagcctgggtgatagagggagactgtctcaaaaaataaaaataaaaaaataaagtgaggatcttagtactgcctgaaaggattgttgcaagcattgaataacagtgacagtggagtcctcagtaaatgccaagtcctgcattccgccctgtgaatccatcattggagtctagttaaatatgctctggctcacagatcctctgtgcaataacttcccttttcttttttctccagacattactggttatagaattaccacaacccctacaaacggccagcagggaaattctttggaagaagtggtccatgctgatcagagctcctgcacttttgataacctgagtcccggcctggagtacaatgtcagtgtttacactgtcaaggatgacaaggaaagtgtccctatctctgataccatcatcccaggtaatagaaaaataagctgctatcctgagagtgacacttccaataagagtggggattagcatcttaatccccagatgcttaagggtgtcaactatatttgggatttaattccgatctcccagctgcactttccaaaaccaagaagtcaaagcagcgatttggacaaatgcttgctgttaacactgctttactgtctgtgcttcactgggatgctgtgtgttgcagcgagtatgtaatggagtggcagccatggctttaactctgtattgtctgctcacatggaagtatgactaaaacactgtcacgtgtctgtactcagtactgataggctcaaagtaatatggtaaatgcatcccatcagtacatttctgcccgattttacaatccatatcaatttccaacagctgcctataaaatagttttgtccctgtatgtgagcactgaaacagcatttggttgacacatctagtttttcatcttgcagttt

SEQ ID NO: 12419 - DNA, 1230 bp, Homo sapiens
gaacactattggataacagtgttacctaagtttttgaaatagaatcttaaaaggattttaaattatgggcatagttattctaattcttctcttgtaatgtatcatcctgcagttgaagctatgtacatatctcttcaaaaggtgtgtttttgcaatacagttgctacaggggctggtgcctttaaatggcaactaaaaggttaattgaatgtgaataactcgttaaagggagagctcagacattccttctagcacacacacagaaaaatagaaatgaactaccatgtgacccacagtccctgtatacgtctggtttgtaacaagagattctttatcaagcaaaacagtatgtaatgacatttctctggaaccttccattacaagccaccttaatgcagtttggaagatacctcccccacctgggggaatttccagctaaagtatataaaagagtccccaaatcatttcccaataaaagtacactgtgcagtttctgaagagtttacactatttaaagcataatcatagcctcacagcagtaacagtcctctggaaatatttgtccttggtgtttactttgcattccttcctctagctgggtgtacgaccaagccagggaggagaggcaccacgagaagtgacttcagactcaggaagcatcgttgtgtccggcttgactccaggagtagaatacgtctacaccatccaagtcctgagagatggacaggaaagagatgcgccaattgtaaacaaagtggtgacacgtaagaagaattttttcccttttctattagtttttaaaactgttctacttttcgaaaaaagctagtgtcaatatcactttttacttatgagaatggcacaggggagatatcttatccttacttatattattaatgctattcctgaatttggagtagcaggttcaattcatgctttatattttatggcatcagaaatgttctttccatgtcaagaatatttatgaactggcaagatgaaaataatttcaatagtattgcaaaatcattaatcataaagaagtctttgtcagagaattactgctgtccatcatattttcataatgtaacctatatttttatgggagggagggagggagggaagaagcatggaagagagggaggtagggaaggaggaaagattacacaggtcaagagctttgtgtcagctttgacttttaaaatgttctttctgcatagcattgtctcc

SEQ ID NO: 12420 - DNA, 1167 bp, Homo sapiens
gagcaacagagttggcctaatttattttagcgttgtgaatactgttgacattttatttcccaaatctaagtatctcctccccttccccctattccagagaccagaccaccacatcatgctgggtgttagataaatatgtttaatcttcttcttatttatcctaacaagcagatatttaaaggaaattatcaactaagcaagaaattttcagaaagtaagacatgtatttgttcaaatactggcttctcacaggaaagtgtattttaccacattctttacttgagcatactgtaacctctgcaaaagttacacattttgggaagaaaaaaatttttttggcaaaaattgtattactgaccaaactttgaaaaaaatgttattctatgcttgtagaaaagttattttagtggaaggtgttgataattaagtggaagtagttgtatgctttgagaagcataccttttttctttcatcaatggaactttaaaaagtttctcactcacccacctgtttcctaaacagatcagtgcattgttgatgacatcacttacaatgtgaacgacacattccacaagcgtcatgaagaggggcacatgctgaactgtacatgcttcggtcagggtcggggcaggtggaagtgtgatcccgtcggtgagtagccctatttccctagatgagtttgcacagggggaatggttagcaagtttcagataagaaaagctatgtgaaatcacatgactgaagttggctccagactttgatcagttgcttgcaaagaactttgcaaagtcttctctctaatactggaccaaaatatctcgatattggtagtcgtctggtttttgctgaatttggtgacaaatttaggcttattttaattgaatggaatttattcttgggtttagaatcataaagataatccatgctattaaaagtattctttccttttttttttgtttgtttttgtttttgtttttgtttttttgagagagagtttcgctcttgttgcccaggctggagtgtatggcacaatctcggctcactgcaacctctgcttcctgggttcaagcaattctgctgcctcagcctcctgagtagctgggattacaggcatgcgccaccaggcccagctaattttgtatctttagtagagatggggtttctcca

SEQ ID NO: 12421 - DNA, 1199 bp, Homo sapiens
attccctttaattttccagttgtagaaacaagagcctgggcggtaggcactgtcaagtgtgactatgagacaaagaaattgcttatacttttatttctttcaacaaaagaagatgctgagtttagaagaaaaaacccacttttgcttgtaattctatatccaaacccatagtttttatttgatccagaataaactggaactgggaaaagttatgaagctgtagttaaatccaggcttctagaacagcaagaaccctttgtgtggatgtgtagatattatcttagtttaacatcccctaacccttcctgtaactattttctatgacacgtttggactacgttttctgcctccagggctcaaaaattctaccccttcacctgacagcacttagatgtctttgatgcacacaaagcttcttcccaagtgagaattcttaggatgaccaaactgaactgatccttttgcacacatacatgtttagacctggtgatcatttatcaagtgcatttcttatccatttccaaacagcccacgaggaaatctgcacaaccaatgaaggggtcatgtaccgcattggagatcagtgggataagcagcatgacatgggtcacatgatgaggtgcacgtgtgttgggaatggtcgtggggaatggacatgcattgcctactcgcagcttcgaggtatgctggctgattaacaaaaatatttgagatggcaaaaggtacagaaagggacacttttttttatgaaaacttgcactatgccaaaagcaggggaagaaatatggaatgccacgtcattcattagtctactgtgcatggtaagataagcctgaaaggcttagcaggcagcctgctaagacaagcggcatagcaatgctaatgttctgaaacactcctagcatgtaagtacttaggctgagccaaaaagatggcttcaaaagtaagaatgaaacatttgatccattcagctttaggctatgccactggattcatgtctagaaaagataggataatttctgtaaagaaatgaagaccttgctattctaaaatcagatccttacagatccagatttcaggaaacaaatacataggggactaactttccttgttcagattagtttttctcctttgcacccagctatataatatgaggaagtattgactttttaaaagtgttttagttttccatttctttg

SEQ ID NO: 12422 - DNA, 1174 bp, Homo sapiens
gtttggactcaagagatcgcagcgctcacgtaacagctgaggattcttccatcttccccagtactgttgggaaatgacaccaagggagtagccttccagttcatttgatttaacacattgggattatgatgtgattaaagatacttgtattttggaatcagtagatgatcccacagggctgaggaatacaaaggatgaatgttttagtgccttagcttattttccagttaaaacaatgttttattcaaagctatcatttaatcttttgtggggggggtgctggggaaatgacagtgaaagtgggatttaaacctgttttgaaggtgtgaaggtaaatatgctaagaagcttagaactatattatcagacattttttattctgagatagactgtctgtgaatgagctgcagaaacctggctctctcagaccagtaattctgtgtacattggaaagctcagcggtaatcttttccttctttgttgtgtattgttcctggcagttttggttcagactcgaggaggaaattccaatggtgccttgtgccacttccccttcctatacaacaaccacaattacactgattgcacttctgagggcagaagagacaacatgaagtggtgtgggaccacacagaactatgatgccgaccagaagtttgggttctgccccatggctggtaagatgaagcccttgtgggttgtcttgtttgacaacaatttagggagtagagactaaagactagtgtccagtttactcccatttcattcattaacacaattttgagacaacagaaaacttcatgtgaagtgtgtttgtgtgtgtgtgtgtgtgtgtgtgtgtgtgtgatgttacatcatatacataaggattgggaagaataattagataattatttatataatttttaaacctcattgacatgatttaatgtcaaaaatataattacttatttgtaagtctggaaatatgaatttgcacaggtttgtctttgtaaagagcacacaactgagtagcttacaacatttaatatatgtatgacggctttagtcacagagctacaatattgacacatggttgtggtttgatgggcataagctctatcacttattaataagtgccaaagtgactaaaactcaatgttttctaacaggtagggaatctcactcttttttt

SEQ ID NO: 12423 - DNA, 1195 bp, Homo sapiens
atcccctgaggtcaggagtttgagacaggagtttgaggtcaggagtttgccaacatggcaaaaccccgtctctactaaaaaatacaaaaaaaatcagctgggcatggtggtgcgtgcctgtaattgcagctacttgggaggttgaggcaggagaatagcttgaacccaggaggcagaggttgcagtgagccgagaccgcgccactgcactccagcctgggcaacagagtgagaccccatctcaaaaacaacccaaaaaaccaaaaaacaaacaaacaaaaagaaatataatcccagtagccccagctgagctggaggatggagaccacttggtagacacttgtggattatttcctaggctaaatgcaaaagctactgctgaataagggacatttttttccagtcccaggccagtagcgacatagatttcagagtgatctctgtgagatcctgaagatcctgactgcagaaagtagtgaattgtcttctctcacccagttttgtgacattcccttttcatgccattaggatctggccccttcaccgatgttcgtgcagctgtttaccaaccgcagcctcacccccagcctcctccctatggccactgtgtcacagacagtggtgtggtctactctgtggggatgcagtggctgaagacacaaggaaataagcaaatgctttgcacgtgcctgggcaacggagtcagctgccaagagacaggtatgcattatctttttgaagaataggactgatgactttattatttagtttttgaaggacaatacattttcaatgtgaaacaataaaacaaacaagaagcctgtaatcttaccaccctgtgataacaattagggttggcatttgaaatagtttcttccaatctttttaatttatgtattttctttctggtcatggatatcatgggtaaaaattttattgtatttatctgtctaaagtgttgttacaagagagctactttctgaataatcatcaatgttttatattctaaatctcaaatttcagcagctttgtgatgtaaacatcttccaataacctaatatatgtattctgcactacaaacatggtagtcactatggcaataacaattgctacacaattctcccccagaatagtctcatatattaattttatggcatagatatagtcataaatattatcccaacatccttaagcag

SEQ ID NO: 12424 - DNA, 2323 bp, Homo sapiens
tctagttcagcatttgaatgtgccattgggcttaacaacttagaaaactaccaggatttccacactttatatgcatatgtctgtttgctttccaccaaaatgacatttctatcctagggtaaaatacaggctctccatgctcccaaaagctggagtgctgtgcctgatgtggccttttcactgaattagtctcagtcttagcctgctgtgtatgagtgaagaccaagcctcccagcctttcttttctgcttaggacccaatttcctgtgatctctctgggaaagcaggattcatgacctcttccttgccatccagatttctctgtggttttccattgtgttctaagcaagacacttaactgaattgactccaagtgaccagacctgttaacgtttcccctgtctctgatgggaaagctgttgtctgtgtctctactttagccaacctaagtacctaccatgggtggaatatgagaccaaaaaaaaaaatctgttctgccctctcctaacattttcgttgtatcttcaacagaccgctgccatgaagggggtcagtcctacaagattggtgacacctggaggagaccacatgagactggtggttacatgttagagtgtgtgtgtcttggtaatggaaaaggagaatggacctgcaagcccataggtgtgtgagtcttagggctgagcaagagctgggatgcttagttctaatgtggggttggaccagaatcacatctacataggtcatagacctgaattccagtgaaaaccaataaagaaatgggaattttgtttgaaataatgaattattatataatccatagtcttcttacaggagttagatcaaaaagtactgactacacatagaagtcttaactttgcttcaaaagcataaggtagaattgaaagatttagaatggagtcatttcttttacctaatagctgatctcagattcctccttcgtcaagatataatttatttaaaagaaaaaaaaatgacactttggacacatttctatatggaatgtcctggaccgaaacatgaaatagtgtgtgcttgtcacactctgctcatttcttttcaaattaaaagttgttgagcttctttggatctcaatcctcagttgaattttgtaagtacaagcctgaaagtttctggctataaattttactctgtttacttgtcttctaatttagaggtttttgtcttgttttgtattgttttgctttccaatatttaaaaatagctttctttgtcattgtatttaggccactcaaaattcataattggtcatttataattaagattggaattttgcatatgtagtctcccacagactagatacatacatagatccttgctactggaaatgctgctgggaagtttggggctcgctgaaaatatgtagtccatgtacttattaggagaatggaatttctgcctgccaactcagcttgagctttcttttgccttggctacttactgtgtgcttagatgctgggtgtgtcattctttctgaacagagtgccacttaaaaaaaatgtggctgaatttttgcttacacactacactttaaattacagggagcttgcacaattcaaaataacctttttttcctgtttttcttccaaatttccctacagctgagaagtgttttgatcatgctgctgggacttcctatgtggtcggagaaacgtgggagaagccctaccaaggctggatgatggtagattgtacttgcctgggagaaggcagcggacgcatcacttgcacttctagaagtatgttttacatctttatgttaaagattaagccaggtattgttttctggattcctagagagaagggtaatactatgttactcagaacacatccagtatatcagcatgctttggtaacttctggaagtcaagaaaactttcataaccaacttattccgcatcttcagagaagactacataaatagaaaaacatatcactttgataaggttcaatctcagctcactgccactgacatagagttgaacaaaaggtttaggtttccttctatgtttgaaatttaaatagggcacattcacaggctaaattgataaaattaaaaagaatttatcccataaattaaaatgatttatctactctggagttagggatagtgtctctgacctaacgcatttgattagtgctgtaaagaagctggcctctggtgtctttactgctccttctaagattgtcttggggtcttaattgttgcctttgggtttgaaggctccttttttgatattgtaaactaataacagctagagagtttgttgaagtaaaacag

SEQ ID NO: 12425 - DNA, 1163 bp, Homo sapiens
ttgatggactctcgctctgtcgcccaggctggagtacagtggtgcgatctcggctcactgcaacctccgccttccggtttcaagtgattcccctgcctcagcctctggagtagctggaactacaggcgcgtgccaccacacctggctaattttttgtatttttagtagagacggggtttcaccatgttagccacgatggtctcgatctcctgacctcgtcatccgcctgccccagcctcccaaagtgctgggattacaggcgtgagtcaccgcgcccggccaagcccttggcattttatctggaatagcatctgtaaactgaagtgtttgacctctgttttcttctctcctctttcatctgtttctgattcgttggctggcagctgcacctgtggggggacctctcatgcagacttgcacatatgcagggagtattgcactgaagatctttgctggaccttcttctcttcagaagataattttcaaaagggagcaatgctgtgaatgcagcttgcttctctctacagattgagaagtccagcttcaaaagttacttgccacttaagcaaggaacttgtcaagagatcatggttcatgttactgaaaagactttaaggatttgtaaggttaatccatagattgctgagaaaaatggaaatatttttatttttacagattttgcacttctgaattcaggttaaaaactaacttgtatttagtctgcttagaggactgtgacttgaaaatttttatataccaatgagctttttggtagcgtccacaatgtttaaaatatttcataggcgagatccgtgttctccatttattaatgcattgtagaccaatttaactgctgtgtttcaggaaaattcttcctagtttaataagcaagctaaaagttttattttttatatttagtgcttaatctttgcctcatgttatgtaaaattagcctgcagatattttctctcaattctgtagactctcgcaagataaacattcaaacagtgaaacaaacaataaaataaataaacctaaggatgtcgtattgttttactctcggtctcagaatttgtattttgcctttctgccttttttatgtcaaaatagatgagattgtgtgcatctataaattgttaccacagtatttttgataatgaata

SEQ ID NO: 12426 - DNA, 1222 bp, Homo sapiens
ttcttaatatgataactctctcttttagaggaaagaagtttgagaagaggcatattgaaatattcactgacctcagcagccgattcagcaaaagtcagctggatattataattcatagcttgaagaaatgtgacatctccctgcaattcttgtaagatcctaagaataatgcatgtagacaaatcctatgatttcctaatatagtgaatgggccctctgtatagagtacttggtttatgggaattttcgctttctgctccaaggctgaatctgtcagatgactgactactcagcaaacatttgctggttactctctgtgttctaggaactgttctgagtggtcgtgacaaaaagatgaaagtcagtgatccagaagaattgagcttagtggcagatcattgtttagtgttcttagactcaaagaattgaggattagaagaaccctttgaggatattcaatttgtctccttcctgcatagaaggctttacccaaacaattagcagattgatggatttttttttttcttaaacagctctagagaactgtgtcctatacagagtgcatgttttagggtagacaggaatgccaacttgggaatcattctaaatacataacatgtttatgtttaactcttttcagatccaaaagttgtggacacatatataaaatttaatttgcttctgttaattcagagatggagtataaaacttcaggggaaaaatatgtatttcacaatttattagggagagaattcctcctcaaaaagtaacttgaatattccctccgggatttactttctctgtgttatatccctaacaaaaatttcttttcactacactaacccttcttgctgcatttgaaacatattttttcttgtcctatttttggtgaaagttgagtgatggtatagaatgttgaattattaatcttctgggaatactcgtttttcaaattgagagctatgccaagaagcctctaggttagagtggtaagcctttggcttcataaaatgcctgcctgggggtattaagaacttgttttgcatgtgtgagtagtcttctcttaagactacagagcgacatctcctttctgtacgactgtggaaaaagagttcagaataacccatcaaaccaatacttgttaagatggtacttcagagaaattaagtgcttttaagtgacacttcttactgagttgaggtttttctcagtacttcagaag

SEQ ID NO: 12427 - DNA, 1189 bp, Homo sapiens
tgagcagatcactttaggccaggagttcgaaaccagcctggtcaacctgtctctactaaaaacacaaaaatagccaggcatggtgatgtgcgtctgtagtcccagctacttgggtgtctgaggcatgagtatcacttaatcccgggaggcggaggttgcagtgagccaggattgcaccactgcactccaacctgagcgatagagcaagactctgtctcaaaaaataaaaataaataaataaaaatattagacagtctgaggttttgtatagaaagtgtgaatgtaaatatttgtggattacttttgggagaaaatgaaatgtagagaaggttatccagtatattttgttatgaaataaactaaaattttcataataggcatgagcaaacaaaataatggagctagagtaattgttctggatttttgtctgtgccagagagtgtattaggttttcatcttctatcaattggaatcctaactttccttgttttccctttgtgttttggaatgtaagattctacaggagagagttaaaaagacttggacagttgtggatgcaaaaaccctaaaaaaagaagatatacaaaaagaaacagtttattgcttaaatgatgatgatgaaactgaagttttaaaagaggatattattcaaggtatgtcagtaagagttttcactgttgcctaaaagacattttcttcaacatgatgtgatgcaggctggggtttgtattattctttgtttaaagttatttctttgagttatagaaatataacagtttgaaaggataatgagaccctaggtcctttagctcatttgttgggtcttaggcaggttgcttctcaggagtacacttgggtgttccatctctgtgagttttaaatgtcttaagtgatagtactcaatacttggctttattttaaagtttgaaactcactagctaggagcatgtttaatatggttgaactaaggtttttttgtttgttttatttttgactttcatggtgattattcttctaagggccaacttcaggttttatgtcctaccagatatgcttccttaatttaggggctgaaaattatttgtatttattatattgcttcatattaaataggattttttaaaagttgtactcctatgttatacccatttggattgaatagtgtgtctagatggcatctttatccaga

SEQ ID NO: 12428 - DNA, 1181 bp, Homo sapiens
ccagtcaaagtccaaggtcccccgtttggaagtgattggactctgtggttggtgtaggcatggtcttttcagggactgaatctagctgtcatcaccattatatggtagccactagcggtttcatatttactatgttcaaggcattgtgctagcacttttatgttattttaattaccctgcattagcagttctgcaaaatcttgtgaagaaatgaagaaaatgttagagctttaacagcttttgccagaattttctgagaggattgctttacttgggaaaataactttgataagtgcttagggtagagaatgagtctccatccccagacttggttggctagtccagaggcttcggaggaaaggaagctcctcagcatcatagaagtagaaaaactggagctggtttaggagaggaggggcttagaagaagaggggagaggcagggagacaaagtgggtgaatttacgcacagtcacggccttctacaatacgtttcaaactcatgaccacaaattactcagtgtcagtacaactctggaaatgccaggtttaagtgctgtatttggggaaactggcagtttggtatctggcattatttcatgcagagcagagaaagcacctgagcacacaggaggccagagtctgaaaagaccaggagagagtcagttactgagaatctactcacatcttaggaaaatatgtcttacccctggccatgggattggggattcagagcagtcttgtgaaaatagcaagggcaagcggaccctagatagcatgtaagttaacaattagtattattatctccattttactgatggataaactgtaaaattggaggagatgcattttcccaaagatcacataggaattcaaacacatgtctctttcaaatactggattttttacgtagccatattgtttcttttgattcctaatgacttcctttcctacgctttttaaaacaacattttaaggtcgtgtatctgaaaccttgtacctactgataggacttttgatgaatagattgttcttttatattgaatttgactttgagacccagcatgttgctagtatttcgacaaaagatgtccctctgacctccgtctaagacttggtgaatcagagccctctagtgatgtcacaaaaccagactctccacagagctgtcggaaaatggat

SEQ ID NO: 12429 - DNA, 1357 bp, Homo sapiens
taaaataacaacaacagcagttttaaaaataactacaacctaggttctgacatcccaaaaaggaatatttcaactataattctcagcattttagaaattaatttcttgacaaatatcaataggtatcattcagactttgcaaatacagagttttgaaatcagaattttgcatctcatctctcccctaaaagaagtatggcaattgtgcttgctgaccatgaggcttgtgaactataatacatacttataggcacaaacacagaagcataccctctctcaggcatcactcaaatctaagaaaatttgttgtcttatgttttagcgagtaaccagctcataaatcacatcgaacagtttttggatactaatgaaacaccgtattttatgaagagcatagactgcatccgagccttccgggaagaagccattaaggtaatgctatcctagcatctcttttcttcctaaacagttggcgactatcacagggaaagaggcatacagcatcctggaaatgagtctgggccgtggaaattatcattctcaatatgaatagcagtgtatgccagtggagctaaaaatgacttaaattcatgttactatcactgtcatttctgagatgggataaagatgagtaggtagggtgttttatccctgaaagttggctttttattgtactgaagacctggcctttgctttctgttcctatttagggaaccaaggaaatttccattataacctctggtggcccactcactattgtaaaggatgggctattttagggaaatggatgggaaatatatattggtataattattgagaaagattttatgaagacaggagtagggatctaaatgtcagaaaaaaaagaacactgacaataagttcctcccatgccttttgtgtgggttttgtctgtttgattgttttattaggaattcttagaaaatatttctaaaacttttccaaattatgtataggcttttatatctctaggtaagaagtgagcaagtttaaattagaaagcatattttttaagtgggcacagttgtagtatatgttcttgtgtgggtgcttattaaatacttggcgaacgtatgaatgaattaatgcttaaataatttaggtgcttacaaagagtgacaagaaaatggaaaaatcattaaaattagattcaataacagattcagaagtagataacctgaatactcttagataaaagacaaattttagaaaagtagagtcaggacaagactgcagatgattcagttggatggagaaagatttggttcaatggaaagagatagtaaaagtgtattgcttttttaaagcactacccaggctaggtggagtgtcttat

SEQ ID NO: 12430 - DNA, 1239 bp, Homo sapiens
cagataggtaatttcataatagaaattcctgtgtttcatggtgtcggctatattgttcattcagattaatcctctcccttgaagggctgaaaaagagctagggaggctattccattagtagcaaaatgttgtaattcactgaaattgctgttaaccaaaaataagtaatacaacatgcagtttgtgtgggttgacaaatgaaacagcccttaaaagggctacttcttaaatgttctcaattaacttaatgtaaacaaaatagaccgataggcatttgaggatttctggaccccattacaccatgttgttgatgtctgggaagctgtgtagtaaatgtcttttgtatctatccttaatgtttggaaacttcccgcctttaagcttcatatgacaactgaccaacaaacactacgtactatgatgtcaatcttttttagagacattctcattactaaaatgagtggatacttgaatgtttaactcctaaaataatgagcggtgaataaatgagcaagtacatgcatgccttccaatgtagagtcattttcattaaaccctctctcaccagagaagcagtggtatgaaattggcctgattcctttctaagtgtgttgttcttgttcacagttggacatgatataggtcgtggatgtatggggaatctaagagagctgccatcgctgtgatgctgggagttctaacaaaacaagttggatgcggccattcaaggggagccaaaatctcaagaaattcccagcaggttacctggaggcggatcatctaattctctgtggaatgaatacacacatatatattacaagggataatttagaccccatacaagtttataaagagtcattgttattttctggttggtgtattattttttctgtggtcttactgatctttgtatattacatacatgctttgaagtttctggaaagtagatcttttcttgacctagtatatcagtgacagttgcagcccttgtgatgtgattagtgtctcatgtggaaccatggcatggttattgatgagtttcttaaccctttccagagtcctcctttgcctgatcctccaacagctgtcacaacttgtgttgagcaagcagtagcatttgcttcctcccaacaagcagctgggttaggaaaaccatgggtaaggacggactcacttctctttttagttgaggccttctagttaccacattactctgcctctgtatataggtggttttct

SEQ ID NO: 12431 - DNA, 1192 bp, Homo sapiens
ccctactccattcctctgccccaatctcagctcagctggcattagcatctgcccaacatttttcttttcttttctttctttcttttttttttttttttgaaagaaaggcaattttatttcaaaaaaaaaaaaaagtgtgctctgggaacagggttagtccatttgggccttcagtgtcctggtggtgattttgtccttcttggtgatgtggatgatgactcccatgcctgaccctgcaccccagtccacagcattcagcatggctggggagatggtttcaaacgggtgttctggatccatgttgggttcccagagggactcacacattccgtacatttgttcggcatagctgccattgaccacaaagtcatcagtcaccatggggaagccgatgaggtctagagagcaactgaagggcttaaaggtcttcaggtccaaaccagcaatgactggatcagtgtagtaggggccaaaatgtttctcatacaagaagttggccaccatgctcgtgaaggtataaggtttgatctgctgaccttccttcaactcatataggttcagctggaacttgaggcactgggcaactctctggacgtcagtggcaagcccggccagaccgatgtacaaccaaccacccatgggaaagatctcctggaagtccgtggtcaccatctgggcctggatcccgaagtgcctgtctgcagcgatggccacacggttcttccccttcatggccatgatggctcctccgttataggacataatagacatgattgtgtggtatacgaggacccctccattgccggagcaattccagtaaaccgggtctagccttcactcctgcccatcatttctgacatttagactctacatagagggtcctgagattccaggcctttactcatcctgcatcccctacctacttggatgaatattaatatttacaataacagagaaaagttctccagaatgtctgggaggtgaaagaagttaaataaatggaaagtgttgttattgtttgcaccatactctagttcttccaagggccggcttctaaacctttcctgaacatctcttttctgatgatgtctcctctacaactcgagatcgtgttcttgtcactcttccatggacatggccaccgctttctaactggcttctctgaccctccttggtttcctttagatccttt

SEQ ID NO: 12432 - DNA, 1229 bp, Homo sapiens
tgtcagtggtgggtgataccccaggatggaaggagttggtatgagccgactgaaatctacttgaaggtcaaaacggagccttatgtcttttgtgttccccagcggttagcccagtgccggccacaggggaagcgcgcaaacgaagtcctcgcgaactgaactgagagcagacaaaagcacgcgctcttctccaccgccacgccggtcctacccaaacccgcgagttatccgtattctccttcaggagtcatagtcaggccagaagagtgcggagggacggggcccgggaagagcagggaacccccagagcccgcagccaacgcggaggtgggcgagcgggcgtgcgcgcactcacttgccggcgcgagggagtgtcgggggggaagggagtggtctccaaaagggggaggggagaaggcagggggcggggagaagccggccctttaggacccggctgcggcggcgagggaggaggaagaagcggaggaggcggctcccgcgctcgcagggccgtgccacctgcccgcccgcccgctcgctcgctcgcccgccgcgccgcgctgccgaccgccagcatgctgccgagagtgggctgccccgcgctgccgctgccgccgccgccgctgctgccgctgctgctgctgctactgggcgcgagtggcggcggcggcggggcgcgcgcggaggtgctgttccgctgcccgccctgcacacccgagcgcctggccgcctgcgggcccccgccggttgcgccgcccgccgcggtggccgcagtggccggaggcgcccgcatgccatgcgcggagctcgtccgggagccgggctgcggctgctgctcggtgtgcgcccggctggagggcgaggcgtgcggcgtctacaccccgcgctgcggccaggggctgcgctgctatccccacccgggctccgagctgcccctgcaggcgctggtcatgggcgagggcacttgtgagaagcgccgggacgccgagtatggcgccagcccggagcaggttgcaggtaacgcggtctggaacaagtagttgggagaaacttggagggcagcggagaagcccgacgggcggctggaccttacggacggttttaggggcggcagagccgagaccttggaccaaatcaagggggactgttgctagcgggacgcggaagtcaggcccggggaggggaactggagttagagcaagtggaagagccctggcgactcatttggt

SEQ ID NO: 12433 - DNA, 1320 bp, Homo sapiens
ccccactggatgggacctctttgaggctggggactgagtcttttcatcttcgggtgtcctgaatggccttgctaatcagaggggtccctgggcgggcagcatcagcatcacgttggagctcgctagcgatgcagaatttccagctctccagggacctactgcatgggaatctgcattttatcaaggtttcctggcgcatatttgaagttgcgaagctccacccggcagcgcatgggtagctgcaaggggtggctgctcagtggacgccgggttgagggacagaaggaaagttgctggctgcgggctcctccatgctcttctcctctctccccagtgcaagatgtctctgaacgggcagcgtggggagtgctggtgtgtgaaccccaacaccgggaagctgatccagggagcccccaccatccggggggaccccgagtgtcatctcttctacaatgagcagcaggaggctcgcggggtgcacacccagcggatgcagtagaccgcagccagccggtgcctggcgcccctgccccccgcccctctccaaacaccggcagaaaacggagagtgcttgggtggtgggtgctggaggattttccagttctgacacacgtatttatatttggaaagagaccagcaccgagctcggcacctccccggcctctctcttcccagctgcagatgccacacctgctccttcttgctttccccgggggaggaagggggttgtggtcggggagctggggtacaggtttggggagggggaagagaaatttttatttttgaacccctgtgtcccttttgcataagattaaaggaaggaaaagtaaagtgtgtgtcttttgcctgagtctttggggtcttccagggagagatgcagagcctggcctaggttggcctacccgccatcatccagctttgcccctggctcctaggaaaatgggaaaggccgtttccgtttcccattcatgaaatggcaataagaaggaatgggaacctcctgaatccagatcaaaccctccagtgcagccccaggactcccaggtgaggcttctgcccccatgtggcccctgcctggcgctgtacaggggcaggatgagtcacgggctggggatggggagatgtggagcgtgggtccggcttcctccctcgcacattcagataacactgcagtgggagataaggaacaggaaacgttgggattggggttgtctggcccctgaaataaaggaggctccctcctgcccagggtgagacatttccactcagcccccaaagaaagggagtagggctgtggttaactggcttattcataaggat

SEQ ID NO: 12434 - DNA, 1226 bp, Homo sapiens
cccatctccccaccaccacctctgtggcctccatggtacccccacagggctggcctcccctagagggtgggcctcaaccacctgctcccgccacgcaccggttagtgagacagggctgccacggcaaccgccaagcccccctcaaggtgggacagtaccccggacccatccactcactcctgagagggctccggcccagaatgggaacctcagagaagagctctaaggagaagaaaccccatagcgtcagagaggatatgtctggcttccaagagaaaggaggctccgttttgcaaagtggaggagggacgagggacaggggtttcaccagccagcaacctgggccttgtactgtctgtgtttttaaaaccactaaagtgcaagaattacattgcactgtttctccactttttattttctcttaggcttttgtttctatttcaaacatactttcttggttttctaatggagtatatagtttagtcatttcacagactctggcctcctctcctgaaatccttttggatggggaaagggaaggtggggagggtccgaggggaaggggaccccagcttccctgtgcccgctcaccccactccaccagtccccggtcgccagccggagtctcctctctaccgccactgtcacaccgtagcccacatggatagcacagttgtcagacaagattccttcagattccgagttgcctaccggttgttttcgttgttgttgttgttgtttttctttttctttttttttttgaagacagcaataaccacagtacatattactgtagttctctatagttttacatacattcataccataactctgttctctcctcttttttgttttcaactttaaaaacaaaaataaacgatgataatctttactggtgaaaaggatggaaaaataaatcaacaaatgcaaccagtttgtgagaaaaaaaaaaaaaagccgaaaaaaaaaaaaaaaacacctgaatgcggaagagctcggctcccgtttagcattttgtacttaaggaaataaaaaaccaacaaaggatctcacattttcttaaaaagtgaagattgctgtatactatttattcaacttataatttatgttactccttgatctttgtcttttgtcatgacaaagcatttatttaataaagttatgcattcagttagcctgcgtcggcttcctccgagggctcagggaaggcaggcagagggagaggc

SEQ ID NO: 12435 - DNA, 3066 bp, Homo sapiens
ggtctggcttttgcaggcaccctctgacctcagcagagctcctgggcctgctgcctgcacaccacatcgcctacctacaatgccaaagcctcactgtcaccctttctgccttggtttccctagctgagccacgctgcccatgcagcagagggcagaaggcttgcacttgggccaaagggcctaaggtccactggacagttgggaaaacacctgaccaccatttaaggactctaagccagaatggaaaattcaccaggactccattcttaagcctatgcgagtcccctagagagaggcattgtactgatatataaatattatataatatatacatgagacatactgacagaatctgtaagctaataaaatgtaagaaaaggttaaaaaaagaataggtaaattgacaagaagtatttattgtttttccatattgctttattgccttccttggggataaaccaattcctatccttttttatatgtgtaagtaaagcctgaagtgtagggggcctttgttcttgaagcagccagggtctccttgccctggccttggccttccctagactgtgtggggctcagcattgggaggggttgcacatgtcccagcctttggcccccttacttttcagcaagccaggggcccagcagtcagctcccaggatgtgtggggagctgtccctgactctgcaggcctgagcgagtgtgtgagcatgcggggacatgggtgtgtatggcacacataggtgcgtgtgtgtcttttgtattttttctcctccaaggagctgtgtcagtgtggacgttctgtttcagggagttggaaaggagggtgtctgcagaaggtggagagcaggggcagaggccccactggccaccccctgcttcccagagtgaaaccttgtgcctggtgaccaaagtccctccaaagtgctcttccttctgggttattcaagccaaatatctgggtttccccctctcctcattccctagcaaaccccaattatcttccaagataggagatatttcccatccccttcctttgtaaatatctcatctcccactggagagcccaggagcctattcctggcatggatgttctgtccacacttgaggctgggcggtgtatcagacccttcaagcagcctggctggggcccaggactgagtctggggtcagctttcacggtcgcttttcccttcctcaccacccaccacagcccaccttgcatgcatggccagcccctccactccagcctgagccatgtgtgcccctgcgggaggacccattcatgccagaaagctggtaactccctcccagcatccctgcggaaggagtcagtttctgagagtgtgacttttcaaggcgaatgatggggaagggttccccagtccccacagtggccccacctctgggccctgcaccagagcccttctgtgtcacggcgggctgtgcacccatgcacacacctacgcacacacaacactccgcactgcagtatattcttgccaaagatttcctttaaaagcaagcacttttactaattattattttgtaaatgtttatcttcttctgtcttctccctccctgaatctattttactgttgtttattgttgaatctgtgtgtcagccaggagagcgctgtctggccttgaacatgggctgggatgggaaagggtctgggagaagatgggcaacaaagagccagggagtcatggacatcgcagcgacgcagaccccagcaggttcagtcccgtgctgccaccagctgtccagctgggtgtctggagggaagagggcagaggagggtcatgtcccttcagctgggggaggggcccagtgagctccacgtggctttttcccaaagggagcaagagggaaggattgggcgagaaaacaatggagaggggacctgcgaaggaaaacagggaggaagtgagcggtttgatcagcctgctatcacggtgttctggctctcttatttagccaggcgcttaagggacagatacatcacatcctaagtttgggaaaggcctttgacccatgtcatctgagcgtctcctccagtagctctgaaagctgtggacaccaatggccaggattccttctcccctggtttttgaggatccctgggtcttctgagactggccaggagagggatggtggggccagtggttgtgtgaaagcaggaggggcagccctcctggacaagtgtgatccccctataaacggctctcaggaggttagtgagtaggagattctgccttgttctgatgagcctgtgcaggggctccaggggagcatgctgtccagggggcacagaagggtggtgagtgtgatcaaatctagtctcactcccactttttagtctcactcctacttttgtccaccacccctgcctcctggatcttctcccactttttttttcagctttaggacctggggagatcctgtgagtcaaggcagacacccaatcctgcccccacactcggggtcctccaagaggttggggggcagagtcccagagcagccctttaccccaggtccaggccctggaatcctgagactcgcgtttccttggccagtggtaacacaggacgtgtgtgcgcatgtgcaagtgtggatgtatgtgtgtgcgtgtgttttgctcatttctttagggaacttgggagtcggggttggaggtgctgggcaatggaacttcaaattcaatgtcgcccagcagtgaggggagtcgggaggtgaggcctgtaggccaaccaattggtggagtctcagcgatagcccaggtgagaagtggttcacccagaggggcagggtgggggcctcgggcagatctgtccctcttggcacctctgtcctcaaatgtccaaaatgttggaggacctctgttcatatcccacgcctgggctcttgccagcagtggagttactgtagagggatgtcccaagcttgttttccaatcagtgttaagctgtttgaaactctcctgtgtctgtgttttgtttgtgcgtgtgtgtgagagcacatcagtgtgtgcaggctgtgtttccccatttctctcctccctt

SEQ ID NO: 12436 - DNA, 1253 bp, Homo sapiens
ccacggacaacgcctgccacctctttgctgagcttgaccccaaccagccggcctctgccatcgtcaacttcgtctccaaggtcatgctgaatgccggccaaaagagatgaaccctgccccttgcccagggccagtgccatggggaaggggcttgtggggaggggacccatgaatcctgaccactcttgaacccagaaggaggactttgggccaatttcggaggagagaagaaagtgcaacgtggggagagggaagtgaattgcagaggggagggggaaaagagagagagagagagagagagagagagagagaaagatggaggagaagaacttggattcccctgggtagatggaaactgcaaaaacccaaagcctccaaaactaaccaggtccacctaacaccccctccctcccctaagaagatggatgtcctcaaaagagaaggaacaaacctccttgggaatccacattttttgggggaatggaaaagctctgtctccctaactcaactgctttgcaaggggaaatcaagctgggagaatctttttctggccacctgtggggtaggttgtcaaaccaaacagagccaccgtgggacatcaagtggaagaacttgtttgcttgaaagtatctcagacccaaggcacctcaggtctctttgctgtgcctccactatattgtcgtgtgggtgtgtgtctgcacccacatcctcacacattgatctagatctgcctttatccactcgaattataaacagctcggcttgtccttgtcccatgtgtttgtagacacacatgcatactgtccaaagattagggttggtggtggcagtgcagcaggggagggacaaacaaccaagctatgggtgacagaggctctctcctggtgcctgcacctgcactctagtgaccctgggtgccgccagacccttctcttctacaaagaccccagcaggagtgggagggtctgcaatggcatcgccctgtcctgccttggccagaagcctggagctttggtttgaggaggtagagatatgtgtatccataggaagagatctgtcagaacaggcagctgttgagctcggggtgtcttccccaaggcatgtggctcagcagcaagaaaggcaagttgctcctgctggggccctggactctgccttagctcccacctctcagccttgttattgggtttcatgcccctggaccagccttatctcagacctgcttacctgcatgatgcctttttgggggctgg

SEQ ID NO: 12437 - DNA, 1213 bp, Homo sapiens
tttgcccccagcacttcctgctcagtgttgggctccactgcccggccctgaagctgagtgttggtgaggctctgccccaaagcctggggtagaggtctttctgtcagctccccttttccccacctcagggtggtgagaggaggttttaggatgcagggcatgggagctcttagcttctttctctggcagagtggatgatacccctgcctcccgctaatgtctgttgtctgttgtctcccctccggctctgtcccttgcagaggtggtgggacacacgcaggggccactagatgggagcctgtatgctaaggtgaagaagaaagactccctgcacggcagcaccggggctgttaatgccacacgtcctacactgtcggccacccccaaccacgtggaacacacgctttctgtgagcagcgactcgggcaactccacagcctccaccaagaccgacaagaccgacgagcctgtccccggggcctccagtgccactgctgccttgagtccccaggagaagcgggagctggaccgcctgctgagtggctttggcttagagcgagagaagcaaggcgccatgtaccacacccagcacctcaggtcccgcccagcagggggctcggctgtgccctcctctggacgccacgttgtcccagcccaggttcatgtcaatggtggggcgttagcatctgagcgggagacagacatcctggacgatgaattgccaaaccaggatggtcacagtgcgggcagcatgggcacactctcttctctggacggggtcaccaacaccagtgaggggggctacccagaggccctgtccccactgaccaacggtctggacaagtcctaccccatggagcctatggtcaatggaggaggctacccctacgagtctgccagccgggcggggcctgcccatgctggccacacggcccccatgcggccctcctactctgcacaggagggtttagctggctaccagagggaggggccccacccagcctggccacagccagtgaccacctcccactatgcccatgaccccagcggtatgttccgctctcaatccttttcggaagctgaaccccagctgcccccagctccggtccgagggggaagcagccgggaggctgtgcaaaggggactgaattcgtggcagcagcagcagcagcagcagcagcagcctcgcccacctccacgccagcaggaaaga

SEQ ID NO: 12438 - DNA, 1261 bp, Homo sapiens
acttatatgtggatgctgagagaatgggcctgtttgggatcaggaatagtgattgacctcacttgcagagatggtttcattcgtgtgaattataaaccagccctgaggcagtgttctacttgtttccagaaatgctttgagctctggtagcattgtgaggataaatgcataaaattcccagggaaccagtttgatggggacagtgctcacttgcctgctggagtttgttataaaccagcattgtgactttattgtcactctccactccttttttcttgttggatcttctaagatctaaacctttgcctcctccatctcctttcttgtttctccttcctttctgggaagcagaaagagcatgaatgtcagagtcagactggcaatgtaatcctgagcaagctccaacccctgagccttagtttctttatcaggaagatggcataacaatatccactttgaaaggcagttgtggaaccaagcaagggaacttccattaacgtgcaggcacatactcaataacatgcctgcctcattccattctaccctctccttcgcccttgctcccaaagccccatataccctctccccattcagtgaggactgccactgacatggtgtccacgtcctgggagcagtaagggtggggagaagcagaagcgcggtgagtggatatgtcccgaccctcatccaacacaaacatctgcctgggagttgacaattcccttcctgagtaatcctctggcactagggctcctgtcctgttcttagggaacatgctcctgggcctggccctgcccactgccttcctgggatgggaagtgtgaagaccctggaaggctgaggccctgccaggggtgcctgaagcttgtcctgctccgatggccctgtcttccctgtccactgggctgggaggcagggaggaggtcctggggaggtctaaggacatgttttcatcacatatgcagctgctgtgcccaccccaggcagcgggcccttcctccctctatccccagacgtttgaaccttgacaccatgcctatcttgggagaccccttccttctcctgtcctgactgctccctccagccatgtctttctcttccttgatggctgtccatagaaccagaagttttagagttcaaagcttatctcctcccactcattttaccacgttggaaactgagtcccaggaaaaggaaatcacttgcccaagtttaagcagtgaagtagtggcccagatggggttgaaacccaagactcttg

SEQ ID NO: 12439 - DNA, 1117 bp, Homo sapiens
tcagtcatgagggagaggctgagactgattttccccatcggagtcagctctgcttctcccgtgctgggggcttcctctaatcccctccatgctggctgcagagatgtcggcccagtgctaggcactagggccctagaactgagggtgtgctggaggagcccaccctagggcccctaggtggtgggcttgggtcccccagtctctgcaatcacatgctttctgtttacagagatgcctccctggtggtgaccacgtcaggagaccacaaagcgaaagtattttgtgtccaaaggcctgaccgttaatggctgcagcccctgcctgtgtgtctggtgttgaggggacgaagggacccctgcccctgtctgccagcagaggcagtagggcacagagggaagaggagggtggggccctggatgactttccagcctcttcaactgacttgctcccctctccttttcttctctttagagacccagcccagggccctcccacccttgtccagacctggtgggcccttcagagggaggggtggacctgtttctctttcactttcatttgctggtgtgagccatggggtgtgtatttgtatgtggggagtaggtgtttgaggttcccgttctttcccttcccaagtctctgggggtggaaaggaggaagagatactagttaaagattttaaaaatgtaaataaaatatacttcccagagacagagtctgtgtggattttgtgatggctggaccctaggaggagctagcgagggccccgtcagggcaaggctgtcccgcagaatcggctggatgttgagatgtgccagctccccatctccaggggtggtctgtgcgcacgacacttcttgcctgcctggagtcggactctgccttaatccacgcgtatgtctgtaggttctttctattgttggtgtgttgagccatttcctcctgcctcgccctgagatatggaatgagataatcataaacggccagaggagctttattcagtcagtgcggggtcaaacagaggcagggtctctgatccagagaagtggggcccggtagagacaggctggatggctgagctggacggatgctctggtaggagtcagcagaggccctt

SEQ ID NO: 12440 - DNA, 1096 bp, Homo sapiens
acacccccccactggagaccctaagcttccatggtgatgaagagattatcgaggtggtagaacttgatcccggtccgccggacccaggtgagaactgccgctcctcaggccatgggacaggagacgctcacccctggcctctgactcctgcttttccccgctcccctccacacccgactggtcattcctaccgatatccctcttcccctcctcccccactcccaccctcacacttagttctcaggcctggctggggtgggggttccctgacgcctcctctggcccttcccctcacacacccccttcccatcatccccttggccctcccttaccgcacggtctctggccagccgtggcctcccgtcctgtgtcccgcgcgcccccgcggaccccggtgtgtctgactccaccttcccttctcgccacatgacccgccccagcctcaggcctcctcatgcttctctccgtacctcttaccgcctcccgagccccatcttctaaccctctccccaaagcagatgacctggcccaggagatggaagatgtggactttgaggaagaagaggaggaagagggcaacgaagagggctgggttctagaaccccaggaaggggtggtcggcagcatggagggccccgacgatagcgaggtcacctttgcattgcactcaggtaggtctttgaggcgatccacctcaaatcagtttaggtgggcgtgtaagcattaaacatcagccatggacagaacgttatgggggacacagagatgggcaagatgctggccttgcgctggaggagcccacaggtgggaaagtgtggcagaatggatgattgcttggcttctggcatcagtcgagacaccctctactttgccagttaaccttgattaacctcttagttttcttttaaaaagttatctttggccgggcgtggtggctcactcctgaaatcccagcactttaggaggctgaggcaggtggatcacttgaggtcaggagttcgagaccagcctggccaacatggcaaaacccagtctctactaaaaatacaaaaatttggctgggcatggtggctcacgcctgtaatcccagcacttt

SEQ ID NO: 12441 - DNA, 1234 bp, Homo sapiens
tggggacggaggagctagggactaactgttgctcttggtgggcttggcagggactaggctgaagatgtgtcttctccccgccacctactgtatgacaccacattcttcctaacagctggggttgtgaggaatatgaaaagagcctattcgatagctagaagggaatatgaaaggtagaagtgacttcaaggtcacgaggttcccctcccacctctgtcacaggcttcttgactacgtagttggagctatttcttcccccagcaaagccagagagctttgtccccggcctcctggacacataggccattatcctgtattcctttggcttggcatcttttagctcaggaaggtagaagagatctgtgcccatgggtctccttgcttcaatcccttcttgtttcagtgacatatgtattgtttatctgggttagggatgggggacagataacagaacgagcaaagtaacctatacaggccagcatggaacagcatctcccctgggcttgctcctggcttgtgacgctataagacagagcaggccacatgtggccatctgctccccattcttgaaagctgctggggcctccttgcaggcttctggatctctggtcagagtgaactcttgcttcctgtattcaggcagctcagagcagaaagtaaggggcagagtcatacgtgtggccaggaagtagccagggtgaagagagactcggtgcgggcagggagaatgcctgggggtccctcacctggctagggagataccgaagcctactgtggtactgaagacttctgggttctttccttctgctaacccagggagggtcctaagaggaaggtgacttctctctgtttgtcttaagttgcactgggggatttctgacttgaggcccatctctccagccagccactgccttctttgtaatattaagtgccttgagctggaatggggaagggggacaagggtcagtctgtcgggtgggggcagaaatcaaatcagcccaaggatatagttaggattaattacttaatagagaaatcctaactatatcacacaaagggatacaactataaatgtaataaagtttatgtctagaagttaaaaccctgtatggctccaggagtatgtgtggctctgcccaaagtatccacttcttccttctgcattctggcttgggctgtcccaccttttccaaggtaatcaaatacactttactgcagcagtttccggggacgg

SEQ ID NO: 12442 - DNA, 1101 bp, Homo sapiens
gggacagaatgggagaatgtctgtagctgagtaaagccctgcagggaattagtttcccctgggtggagactggttctctgatacagtgactggcaggactaggttatgaaaagttaagaacagctaggtgagtgggtgggtgaggatcacaagtcccaggctgcatgaaatcccaaagggcagcctaggcgaagaagtgttccgtgggaaagagcagccctgcgtctaccaagcctggggcctgcagcccgaagattccacagcccctcccttcaggtgtcactgtgtgcaacggaggcctcggatgggcttggtcagggggtgaccagttgggcccagttcccagtgaggagggaatagatgcctggggtgggtctggaaagtgcacagtcagggctgacggccagccagagcattacaagctggttcccacctgtctgggtgtgccttatgccatattgtgttatcctggcaccttgtgacataccctccaacccccacccagggcggacctttgagggcaatgcagagaccatgctgagctcactggacactgtgctggggctaggggatgacacccttctgtggcctggtgagacacccccttactactccccatcctccagccccacgctcagcctgggacaagggccttcccaccccctcactcccctagaaagcaggccagcccagttcctggcccagaagcgacacagctccacctctaggggtagggacagagttctggcctcccttcttcctggagtgctggctccgtaccacctctgcttctcacactaccttcccctgccagtcagccttcagcctcttgggagccttgcaggccccagggcattccagagagatgtctaattgttcatagccttagcccagaacagaaaatagcctttgcttatctggggagaagtcagtaaatccactctgcatgtaaccattgccttgtggtgcataaaaacattcacagatatctgttaatcctcagaacatatattcattcattcattcattcatcaagtactttatgtgcacctaacacataccaggctctgttccaggcaccaggaacacagcaggtacatc

SEQ ID NO: 12443 - DNA, 1188 bp, Homo sapiens
aaaagggcccctccttgccaggggagagacagccacggtcctctttggccgatgctgtattctcattttggcccttgttcttaggcccgtctgcccgccttcctccatctaacctttcctgttttatccgcagcccttttcttctttgagttagtaaagatttattctgtaacctgacactcatctggccctttgcagtttgccagccatattcccatgtgatttcccactggatccaggcccccatccggctggcaggagggggctctgacgtgcaggttggaaatcagaagtctgtgagagcgcgggagtgcatggcagctctgggtcccagacctggcccgacccctctgcttcacctccagctctgctgctcctctactcttgggtcgagatccctttggagccacagcgaggaaccctgtggtcctcaggcaggtgtaccttgagtcagccaggagccctcttttcctgtgtcaaagcctgccctcgggctctgctcacctctggtgaccctccaagatgcccctgccctcagtttcccctcatgatctggcctctgcccccttctctagccacagcctctagtacactttagcaataccaccagactagttagagttccccactcaccaagcaagacatgcagtttcatgcctctgtgccttcgctcatgctgtttcttccgactggaatgccttcccctgctcctcctgccttgtctgcctggcaagttcatctctcacgatcccctcaaaggccccctcctccaggaaggcaacccctgtgcccctcccctccaggctacctctgcactttgtcaatgcttctcttgtggcacttatcacactgtattttacttgtttacatgtttgtctccccttctagactgtgaatccttaagggcatggactgtatcttatgcatctctgtatttctgcgcctagcacggtgcctagcacacagtaggcgctcaataaatgttgaatgaatgaatgatttaatcaagacttgatcacccaacagcttgtctttgttgctacatgagtgaaaacagcagagaactttctcacagttttcccatctcagttccaggcctgctaacttgcagttaggcacttcaagagttttgatcagaaatgatgcccaaaggctgggcgcagtggctcacacctataatcccagctc

SEQ ID NO: 12444 - DNA, 3299 bp, Homo sapiens
cattctttgaattataaatggcctcagcagttttgctcaactactgataaatgctttgcctcctaccatctacctatataccttattgtaatgaatgttccaaaatggtagagtggtagaaaacgccagagtagtttagagcagaggaaaatatttgttttaaaactagctttaaagttttgtttcatttctaccaggagcctctttggtttggtttgattttgcttggaaataattggttttcttataaatgagtgaagcggtgataaaattctttggctagttattaattcttttacgtgtctttgcatttgagaggcactgttaaaaattattgggaaagatttaaagtgcaggctgcaattaaaacatggagaaaagtagaaataatgccataagtctagattgcctcatgaagcagcctcatttgaattgctttcatagctttcatgtgtgtatggtttagaagtacacttacctcagaaacctgatttgatcttcatgtcttgggcaggagttgttgaaaataggttattggaatatataagttatctcactgctcatgtacttgcatgtttgggactcaaattttacttgatgtctgtccattcttgtggccctatcagccttctccttcctttactcctttaatctacttctttgactaccagtggagatttcagctggactatgttgatggggtttgttgttgtttttgagctggctgtatatattttaaaattataaatagataatatattattttttgcacattgtgatcagtttgcccagaattggggatggggcagttagcatgttggggccaggaagggacaagttagataaggactgagtgcttccgttgcaggcagtttgcacaatacctaattaaccttcctattgaaaataccaaatgtgtggttacattactttaaatgacattgaattggaacttgatggcaattagttctagatacaaccttttgatctttgttggaattttaagggaaaaatgaactaaacttcatatttgttgattttaatcacctaatagtactgaaggttggaaagttgcatgtggctggatgctgttaatttctttaatagccatgactataatttaagcctatgagaagatagactgtttcgtagggatatattcacatgtgtgtgcacactcatgagttttgtctcagcaggatagaataagcaaatccatgaactggtcttctattaatactttgattctaaaaattatttgtttacttgctatggtctgttcattctgggcctaaccttaaaggctcaataacaaatacaacaaatgtaaatatgtttacattttaagacatatgcagtggttcttacagatcagttaattaactccagaaagcaaatgttagactacacatttatttttctccttgatcaagtataaaattctgaaacagaggctttaaaatttaaaacctcagcaaaataatccatgaatttactgattcttctgtatcgtgtgtagttaccattatgtaactatacacacatacagctacggatataatgaaaattatctgcaaacacctaaattaaagagaaaaaaaagtagtttgtaaactcatttgtgatctactgaaaagaggttatattaaagcaaattaaaatattttccttctctgtcctctgaaatgactgcagtagatactcttagttatcccatttagggtggttggagggcctttttaatttaattgaccccccgaggtggtcttttgttttaaacagggggcaacagctggatctccaagtacatatggattttgtatatataggagatttttagaaaaatcaacaacctaacaccagattcaagtcacataaaagtgttccaataaaatggatggatgtctttttcctccccattttgctttatactgagtaatgcactcttgcaagtgtatacaaaaactaaatagacttctgccctccaacatctttttattgcattacttcaaaatcctaattttgtctctactgatatgtcttattaacatctgaaaaaatatatattttttattggaaaattctaatttgttaggccttgaaagttttgtgacaattattttgctgtgtttaaccacaatcattcaccttatggcatgctttgattactagacttcaggcagtctcattcattgtatcatacttacacacaattagtaagttgtctccatgtgtgctatatgtctgaggtgtatggagtttttatttaaaaagtgtgccagtctgaatataagcatttgattttgtaacattggacttttcttaaaagtacagaggttcaaagtataggtatgtccattggcataagaatagagtgggtgagggtctggaccaggttccaggttggtccagtcagatgccagaacaaagaagaacagtcaactaaactggtctacttcaaaaatagtgggcctgtgtgaagagtgagaccacatgtgggtgtgcacacctcttgtccccaggtttccctccctttgagcttttctttccctccctaacttctctggcctattgtcattgttgtttctttaaacttaaggagagaaaaacaaaaatgagattcctacactttgcctaattgagccactaccaggttttctggcagctgtggccacattatttgtgagatgattttttttctttatgttcagagtgacttttgattctgattctttatgttttgtatggagcggcacttttatctgtgttttagcagaactgttcctctgtatcctttacggtttttctttgtttttgtttcctttttaaattatgcatagagtttttttgtgtgtatgaaattaaagcctttattaaccttctttgatttgactgttatttctgaaaaggacacattcttgctgatacttgtaacaacctgttcaaagttgtggaaatcaccttctgttggctttctgacatggacttccttgcagcactgttacttcttaaaaggaacagaatggcaaaccagtgtctggccgtagtccccattgattcctgttattttcatctgaggagcctgtgaagctttgcagaggcttctgggtaagtttgtaaacctagcattggccttcactaggctcttgctttgcctcattattaagggttgggagagggagtgaagtagcatatgcatttcatacttgcctttaggtctcaagcctagccccagtggaagtgctgctctcactggtactgtttggaatttgtgaaacctcttaagagggtagtcttgt

SEQ ID NO: 12445 - DNA, 1296 bp, Homo sapiens
tgctattttatggaaactttggtctcacatccgtagctgattatcctctttttctcctatgagtggcacttcttttgtcttaggaatacatgttgtaaatatatatctgtgtatgtgtgtatacacacacacagacacacacacacacacacgggatgaatggagccttaaagagttaggatgagccaccagaatatgcctgctcaaaattaatagcacagcagtttggagaagaaatgaaggtgtcaaagagtccattcacctgagaaatgtgtgaagacatacttatcagttggcttttagcttttatgttccttgagtagtttcactcaagtctgtaaccttttgtgtttccttattagtaaaattcactggaaagccagctcttcatgttacactaatgacagtttgttctctttgcaagagaggggcattactgtcacctgacttgaggagctgttttgttgttgttgttgtctgcaaatttcatgaatttgtgatgtctttgctgtttacatgcagtcccaagaaatggattgttggtgctttggaatatgttacagtcccacatttgatatttcttatatactttgttttctctaaggagatttcttcacacagtatgttcatcatatatcatcatcattattatggtggtaaagatagaatcttttttcttttttgtcattctgccatggagcagcattaccctaatggattgcaaccaaaactttaaacaagtagaaagataatatttctccaattgggactccccagcaggaatacttagggataaggaagaatgctagcatctctgtctctcaaacatagggaggataagaagagtgttcttctggtaaagctaaaattctggaccactgaagctaaaagccctattgcaagtatgaaattaagtacttgagctgtaggacaaaccttgggcatttaaccatttactgtctggctttgcccttaaaatagggttgcaattaaaatgtgattggcttaggtaatcccaaaaactaacaaataacaaaggtgcataatttatttatctactttttaggtgctctgagttgaggcaaagtagagcggcaacattaagtgctatgctagtcacttagctgacgtaaccagcttggttaagcagcttatgaaaccatataaagaattcttttgaggatggaattctgtccacaaaataattttgtgagcccagatatcattaggatcacacagagttaaatatagaaaaatgaaaccatcattatattctttcgtgttttttcttttatt

SEQ ID NO: 12446 - DNA, 1214 bp, Homo sapiens
caactattgcgcatgcccgactgggttgcgtaggagggaaatggtgggggggcgtcgaaatcgggtgaggtggaaagtgcgcgtgcctactacagtcacggcaggggcggggctgcccgggctaggccgctctaggtactggcggggcggggcgagggcgtgtgaggggcggagttttcgactgacgcgcacgcgcctgtctggtcgcgtcgagtgtgcgtgcgtgcgtgcgtgtttgcgtgtggtcacagttcccgccatcagccgctctccctgactaggggtagctagcggcctccctcctttgggttcggtatccctacttccattaccctcggctcctcccactcctcgcgggctccgtgctttccgcgggtctgtccgggggctccggaccctcggcgcaggtaaggcgggccggggtagcttctcaattgagccgttttccctacctcctcctccttctgtgcgatccgcccactcggcgttcactcctctggagttcgccctgctgctactcagcccgcccacaacccctcgatgcacccccagcctcacaggtactacctttgggtgcactgccccggcttccacctctcctttgacttggtctccactgccactcgctccctccgaaactcaaacctggccccttttctctggggctgttgtcgttcgcctcttaccttctaacagggcctgctgtctcttcaggtgactttcgttacggcacatccaccaggccttggacatgatactcattcactctcttgaccatcttcaccttcctcttgaccagtcctcactgcaaaacatgaattgtatttttgttgtgcatttccttgcgcccatttctagccgccagatcaggttgttagatgtaactattttaagtcatgatccatgaaaggaaatgatgattgatgataaaatcctgtgtcctgaagagttgtcctaaagtggttttggggtattcctctcaaaatttcagctctgtataaattcctttattgaggtggcaattcctgacaagtgtctaactggaagagatacctgagagggaatgtcaagtaggcagttggatatagtgggtttggagatcttaggagagttctgggctgcgtacgtaaatgtgcgcggtgtgtgtatgtgtttgtcatctgccatattgatagtaattgaagccatggatgtggatgaaattgccgaaaaag

SEQ ID NO: 12447 - DNA, 2431 bp, Homo sapiens
gaacctgcaagagggccaggtcaccgatccccggggtatccccctgccccctcagtgatccttccctgttccctcccactactcccccaagttggggaaaggagggggaacctacgagaaaaacagctcaggttttatcaccgactgggaatagacaacctcaatgctgaaccgcactggagaaaaggggcaaggtacccctgctgaggtgtatgggctgccatctcaggctgtcttgaggacctgggctccctctgctactcccaggaaatgggctcctgacacagcagtctgccaccacagccccaggagggtgtcaacaccagcaaatgctgtatttgcagcatgtccaagatgacccttctcccctacctctacctagccactggcagggaggggagacagtggtgatagcagcagcactctaggcatggtgaacgcctgggaccaagccatgtggcgttttttattttgcctttctggaagactcaagatatgtctcttcattctctctcagtatttgtttactttggtttttttgtttttaatctcagagagaggtgtgtttagtgggcacaagctgtaatattcagcaaaactttgtcgactggcactgtttacaagtctgttagctgcataagctcaataaaaagttggtctgggcattacatcccctctggcaggccaatagctgcatcaagctgttgggagaaatgggagggcaggggaaagatgtaaagccaaagtacagcaggaacccaccacctgtttcccttccttctcccattctactcccagtccggaatgccacgaggaccttaaccttgtttctggctttagctgctagttttcccaaatctcagtgctttccctttttgaacttcccttctattaaacttaaaacagatgtcttaattaatcaggctgtcttggaagggtattgtattgggagacaaggggcggtggtggacctcaccttcaatccaagttttcaaagatattttctcaataactctaaaagggaggtgcttgggattaaggtgacagtccacttgatccttttctttgttttagtgtgaatttcagcagctccatctgtcttcatgattgtacttgagcagtattagctgtatgagttaattttattcagattgaagatggagggctgggttctgctcactcagtcttttttttttttttttttttttttttttgaccattctcttttagtctatgggaattacagggttgccgctaaaatattcacttgttcatatcgtgtcagagatttcctcttctctggagcttaggtggctcttcacaatccataggcttgaatctgcaacctagtgtaaactgccttgctttccccggttctttcccctgctagcacctgctttctcatccctatctccagtcaaagatgggattgcttaatccaactctggagagggaccaagtcttttctgcccacatctcacacaattgaggtgtctgaacaagcttggggagggtctataaggggtaggctcaaaaaaaaaaaaacccatttgcagaggcagttttgccaacacaagggctctttcaagccgactttcacaaagagagccggacttgttagttggcttctgtctctttagagccaagaaaatagtaattaagtggcctagatataggaagggcagaataagcacttactccccctgccttccaagatgaagaggagaagcaggccaaccctcaataattgcaagcctgaagagaagtgatcttagagaaagcagagaacagaatggactggatagacatcttgactctattcagcccgtagtctgtgatctggagagtccagttaaggtaacccagatttttgacaaccgccttcctgctgagccaaagttttctcattacccctccactggggaagcagctgaggcccagggccttgctccctgggaaattctcttctctccatctttcggtgcattggccatgttactgtgccaaagtgtcttaattcttgtcccatctattctcagctggccttggaacccacataggagttggtgggggagggatggaatgggtattattcattgtagttgatcctggtgtgtgtattatataaagagacccctccccttattttgtgttttccatccctctcccttaacaggattgaaataaaacatgcttctgtttttgtaaaaataatttttcctttacactggagattttattctatcagtatatgggtaactaggcactttggtcaggtgatccttgtcatgcctgcttctcccctctgtctacctacacaacacacacacacacacacacacagccctgctaagatggcagtagtggttcttttgtgaacatgttttttggggagactccatctgaggtacaaaagctgtttgggaggctg

SEQ ID NO: 12448 - DNA, 1214 bp, Homo sapiens
gggaaatgaggcacagaaacctgccctgtggagttgtagccacgtcagttccttggaagtctacagtgggtcatgctgattcatgattactttcttttaggaaggcagtacagaatagggcttagaacacaggccctgaagctaggctgtctctgctcctggcttactttgtaaccaaccttaggcaaattattaacttctgtgatttagtttttctcacttggaaaatagagataccagtttcatagggtagtgaaaaggagggttacatcaggtgacacatgtatgatactgagtgcagagcctggcccacagtaagtatttactgactgattcttagttgttgtgattaattattgtgattgcctccccctttccctccttgccaggtatcagtgcaaccagtgctcctatcgctgtcaccgggctgatcagctgagcagccacaagctgcggcatcagggcaagtctctgatgtgtgaggtgtgtgccttcgcctgcaagcggaagtatgagctgcagaagcacatggcttcccagcaccaccctggcacaccggccccactctacccttgccactactgcagttaccagagccgccacaagcaggctgtgctgagccatgagaactgcaagcatacccgcctccgtgagttccactgtgccctctgtgactaccgcaccttcagcaacaccacactcttgttccataaacgcaaggcccatggctatgtacctggagaccaggcctggcagctccgctatgcaagccaggagccagaaggggccatgcagggcccaacacccccaccagattcagagccctcaaaccagctgtcagcccgacctgaggggccaggtcacgaacctgggactgtggtggaccccagcttggaccaggccctgccagagatgagtgaggaggtcaacactggaagacaggagggcagtgaggctccccatgggggtgacctgggtggcagtcccagcccagcagaggtggaggagggcagctgcacactacacctagaggccctgggagtagagctggagtctgtgactgagccaccccttgaggaggtcactgaaacagcccctatggagttcaggcccctgggactggaagggccagatggactggaaggaccagagctatctagctttgaaggtattgggacttctgacttgagtgctgaagaaaatccccttctgga

SEQ ID NO: 12449 - DNA, 1245 bp, Homo sapiens
ttaattataggaaagttacttaacttttctgagtcttggattcatcatcagtaaactgaatgtaaggttttttttaggattaaatgagataatatggataaaatgcctagcatggtaccagacattcattaggtgcccaaactagtattcaagtttgtttccccttcatttactgtgcttttccagtttgtttactcaacagaatattgagcacttcctgtgtatcagtcactgtgttggggacatcagctggaggagaatgtgctccttgctcctagtgtgatgagttagttcattgttgaagctaatgttctgtgagcagtgatggtggcatgcgcagaggtgaggcatcctgttcaaactcaggagtcagggaagactgcctaggtcatgttgcagctgattttttaagttgggtgaagaagaagaaagggctccaggaacagcacttgtaagggaatgaagagctgagctagcatgatgcacgtgggaatcaatagtggggctgtttttcagggggaccagcctgagttttcatttccctaggcattctcctaccactttggtatgtctgttgtgttgcattggtggggaaaatgtggcttcccgaaagaggattaagtgacgggattatgaattattttgagtgtacttaatacacatgcatgcgtgcttgtagtctcgtaaagtgaatggcaggatttgacttttccctttgtctctatgcttctctaccacaaacacacgctgtaattgttccaagcacggtatttccatagtttggatttgtgtggtggtccattttctgtaacctcattttgaggtgactggcctcaaaatccagttttagcatttatgctgtttttagctcattatcattttgaatattggcagtgctgcattgtgattttttgtactccccttgagaaagagtccatgtaggtcagcctttgcaggtaaagagggcgatatcccatggcttctgcagtgtttgttggtggtattcattcgtggctgtagacaggaatcttagttcttccttggccattacactgttaatcagaatacaaggtactctccccatttttgcattttaaatataacttaagcgaaaaaaccatctctcctagggctgggttcagtggctcaggcttgtaatcccagtttattgggaggctgagagaggaggatcgcttgaggccaggagtcgagaccagcctgggcagcatagtgagataccgccac

SEQ ID NO: 12450 - DNA, 1208 bp, Homo sapiens
cacgtatgcagagccgctttggcaagaaggagttcagtttcttcccccagtcctttatcctgccccaggacgccaagctcctgcgcaaagcgtgggagagcagcagccgccaaaagtggattgtgaagccagtgagtgaatcacagtgggcaggagactatggtctgtgagtgggaacaacagagtattggacctggagcaaatctcatctcctttctgctcctagccagcatcagctcgaggcattggcatccaggttattcacaagtggagtcagctccccaagcgaaggcccctcctggtacagaggtgagcctgtagcacatatcccttaccccatcctcccacctccttggcctcgaggttcccttcttacaatgttctgccctttgttctcccagccaaagagcttccttagccaactgttctaaggtctttatcttggggactgttagctggcttttcctgtggcttggttacccactgagccccatcatctggctgtatgagaagctggcctttgtcctatgtaggtatctacacaaaccctacctcatcagcggcagcaagtttgacctgcggatctatgtttatgtcacttcctacgatcctctgcggatttacctcttttcagatggactggtccgctttgccagttgcaagtatgtgacagtggtgaggtatcctctgacaatattggggattttattttccttggagggagggaaactagaagacaccaaacagaaaaatagtttttgttagcaaggggaaaggcaggaaatgggaaatatggaggctctctacttcgttaaatctggggagggtcttcctgcatgcgggactgaggtgggataaaggagatgagtttagctgtggtttttcagaactttgccagtagacacacttctcaggctcttgtggctatgaaaagatctgtgtacttgttctacacctcttcaggatttggggaaatgtttggccccttctccatctgctctgttaccatcttacctctgccttttgtttccttacttccaggtattcgccttccatgaagagccttggcaataagttcatgcacctgaccaactacagtgtcaataaaaagaatgccgagtaccaggccaatgcagatgaaatggcttgccagggccacaaatggtactgagggcagagtgtcccagtccagtgaaggcctagaggaa

SEQ ID NO: 12451 - DNA, 1094 bp, Homo sapiens
cactaggctgccctcagtagttccatgagagtcccggagctgtaggaccccaggggtgtgctccctgttccccagcttcttgagtctctgcccctggcttacactctctcacaccctttttctccctgttccttggaccacaggacttctatgcatctgtgctggatgtcctgacaccagatgatgttcggattctggttgagatggaagatgagttttctcgccgtggtcagtttgaacgaatttttccttctcatatctcctctcgctatctccgcttttttgagcagccacgatatttcaacattctcaccacccaatgggaacagaaataccatggcaacaagcttaaaggtgatgtgccctccctgccctcagaaagccaagtttagtgagagattaaatcccagtataccaagaaatgggcctctctggaaagaattggccaattgattctaccttcttaaaccccaactcctgctaatcttgtcctaggagtagatctgctccggagttggtgctacaaagggttccacatgggagttgtctctgattctgctccagtggtgagtgctgccagtgtggaggacagctccttctcaggcccctccctcctctgccttatgagtgcagcaggagttgggttggtatgtataggcctctctcacttctccgctaggctctgcttctgtctcaccattctttcctttcaagggaatagttgcctccaggattccctgggtacctttctttcaaggatcaaaaagtgctttgtaggcctcaacttcttgtttgattcagaagagaactgagacttttacccacctgggcccatgcctgaggggtagggaaggggagaaccccatgatccatttagaggtagagctggagggtaccaagaccccaaacactcctgccttgcctccgccaagccttttggtctcattgcttcctttgctcttagtggtctctcccgacatcacttctgactatctcaaaggatgacgtgatactcaatgccttcagcaaatcagagactagcaagctggggtgagtgctgcctgggcaagggaggggctgctggctgtgagttt

SEQ ID NO: 12452 - DNA, 1683 bp, Homo sapiens
cccagttctgccacttactgtgtgaccttgggcatgtcatctaacttttaagtctccatttctttgtagtatgaatataatacctacagtgcagggttgcgaagatttaaaccaaatgtagtgaaagtacgtaggacatagagggcactttgcatggtcacaccttctccacttgctgtccaagccctgtgccctaggtgggaagagacaggcaagaaacgtaaaaccctctcctccaggaggtggagctgccatcgagatattttagaagtgaagatgccagaacagggtctagatagctcatggccctcaccttcaccccagtgcacacacaaacatcaccattcaccctcctattacattatcactcctctggggatttattctttggttaaacacttcacagtcagagcacagaatccctgagaaaggaagcacattaagcattagaagtatgtgaactgagtgggattattaaattatttcaagagaagctttgaaaagaaggggaaagcaagcacagtgggtgtcaggtggctggaaaggggagaagcagggtacagaaaataagagaacttgattggaactggacccaaagagcagatatatggacctaacagctgtacgaaggggcagttgtcattacaggtaccttctcttggtttcaagctgtttggctgagggtgagtatccccctgtcaccctagccaaagtacatacccagtggcttctggggcagtccagtgctgctgagggccagtgaaggagactgatcatctggacacaaagacctttctacttccttctcagctgaattagttacccaagataggtgaccaacaaaggcagacagggatctcctctcctgggctccccttgatttgtcctctaagattaaggcttacctgtgactgttgttcgaatcccccaactgctgtgagacttggaaacactgatggttttcagatggctaagagagctccatttcttgccacctgagattctgaccaagcctttcacaacccttcttggccttttagagttccccctgtagcagagtttgcccgctcattaatatccggggatctatgccagctcatttggcttgccccttcaccagcgttggatcagtgaaagttgcaagcagtcatatgttgctctcggcaaatgttttacaggtgaaaacacaagaagggtcaatagcaggtggtggttttctaaaacccatctgtgtcataattataatagactgagatacatggaatgccagggactgccacaggcaaagctaacagaattttgaaaagatatttaagtttcagttagtaaactggggacaccaaagcctactcagaatagttatgggactaaaatatggaggaaaagcacctaacaaggtgcctgataatatatgatgcagatttaaagtagtggattctaaaacagaccaaaactaccacccagaacatataaagtaaaagcactataacatgcaatagtgttacaatactattacaatagcgtgttaatattaccaaactatggtaaaatatactttgattttatccataattaaagctgaggatgtattgatagttaacttagaaagattaaagcccccatcattagcagtcagagaagagcagtttaaactgcaagataccacttaacactaaagtggct

SEQ ID NO: 12453 - DNA, 1118 bp, Homo sapiens
tgcctccctgcctcatctctattctcattccactatgccccaagccctggtggtctggccctttctttttcctcctatcctcagggacctgtgctgctctgccctcatgtcccacttggttgtttagttgaggcactttataatttttctcttgtcttgtgttcctttctgctttatttccctgctgtgtcctgtccttagcagctcaaccccatcctttgccagctcctcctatcccgtgggcactggccaagctttagggaggctcctggtctgggaagtaaagagtaaacctggggcagtgggtcaggccagtagttacactcttaggtcactgtagtctgtgtaaccttcactgcatccttgccccattcagcccggcctttcatgatgcaggagagcagggatcccgcagtacatggcgccagcactggagttggtgagcatgtgctctctcttgagattaggagcttccttactgctcctctgggtgatccaagtgtagtgggaccccctactagggtcaggaagtggacactaacatctgtgcaggtgttgacttgaaaaataaagtgttgattggctagaactgctgcctccctgactgtgagctgccttccacaccctgcactgcactgtgttctctcctcacccttaacctgcttcactccagtctgttctggctgtttattaccttgttgcaaaacagggccgaagcaaggattaccttgacaaccctagcttctccttagccatcttccttgacagtgtgatctgtttagtgagatttagcatgtgtgaataaagtatatgcaggaggaaattgctttgtcttcccaatcggtagaaattcgggaccataaaaattgtgttttaccatgtggcctacaaccttaacactgctttcttaagaagtcttcacccatctacatgctaacaactcactcagcctggatttatctttactggggaagccaaacaagcaatagaggacctttacctgtgttagaaatgagttggagccaaggaacactgaagaaatagtatcttaacagttactgagtccattgtatgtgcttggctctgctctgagtgatttatatgtattaagatttttc

SEQ ID NO: 12454 - DNA, 1191 bp, Homo sapiens
ccctttctccccacaggtatagacaaggctgagcagggttcctgtggcccaggatggaggccaccgctgccctgccatcccgtctgcctgccatgggacggctcctctgagtgttccctggccccacgtgtgtggtgtttgtgtgtctgtgcctggccaagggaggtgccaacactgggcttgccacagccccaggagaggaatttggggcctaggaaccgagggcacacgggactctagcctcatccccaggacccccttggctcagagtgtggtgctagaaactggcccccagcccagccccagtactgccacctttacacctacccctgcaagtccccagagggctgcccacgatagaagctgccaagcagggagaacctgtgccaactgtggagtggggaggttgggcctggaccctcaacccctgcaaccttccctagccccctcaatagatgagcaggtcaggctgtggcccttacctcacccgcagttctcgcccagtgctgcagccggctcacctctctccgcttcttgcacatcactggcctgtgtgtgctgcttgctcctgttctgttcgcttgctcccgttccgttcggcttttgctttgcgttagggtgaagaccctagcgtccagctcccctcaacgctatattttgacactaaaaaagaaggtttctaaattgtaggagcaggatggaaatactttgctgcccttgccatcttttaggatgggcccccaggagactgaggtcttcctgggccctcattgctgcttatcgtaccccccatcacctgcacatgggacagaccgggctggagggtgaccttggctgtgtgcgtcccagcaaaagagctctggcccgcatctcgctgtgccctgaagggggatgaagggcgatgcctcgcccgaggctttgggctgctgcactgcatgctgggactgctcctactctctgtcccacccctcacccagctgtggtccggctttgggagagtggtgaattgcgctgcccgaactcggagcggagcagggtagggaccgtgtacagcttgataacccttaataaaaagggagtttgaccagacttcttgttgtctcgcgcggctagaatcctgggaacaagagaaatgggatggggactctgccggggtctagaagaaagtatgtttaggccgtcgctcagata

SEQ ID NO: 12455 - DNA, 1178 bp, Homo sapiens
tcctccctccacaggcattcttcagcattgcggcagctcctgaactcgatgatgaccgtggacccgcatcagcgtcctcacattcctctcctcctcagtcagctggaggcgcttcagcccccagctcctggccaacatactacccaaatctgaaaaagcagcatgttgagaagatggccccttgtgccttggaaagaggttcccatccctcattggaatcaccacccattccatccaggacttctcttacacttgggggtagcggggtcaggacaatcatctcagtcctgcatcttttcttctgctttcttccctccaagagcaaaacctgggcaaggggacttactgagtgggggtgggtgggggttgggaaaagggaaactggtgggatatggaacatggctctgagcaggactgttgagctcacatagtgttctgactccaaatctgggagcaggagaatgtgtaaacaagaataaagtggaagcaggttggtgtagatcttagtctcagtgttcctggagtgagagaagaggtgcaaggggcccaaagtcaggttgccatttcaggcgaactgcctgggaaggaggaatggtgcagagtcggcaatggtgtgacttcattctacaggaggttggttagcagtggacagttctagcttgtcttagatcaaaacttaaagctgcttgggctcaagctggcatctgcctgtgtcaagaactagggccccctaaaaacactcaactagttctttccttccttcactcctggggtgagtagcttagtcaaagctgcctagccggtttgctaggcaagggcctctgggtggagacacctgaggaagctttgagacaggtagattacaggtctcccatcctcagcctaggggcgaggggagtggaggtggcagcggcagctgttttggcctgtgtctccctgatcgttcaagctcatacatggttaatgattaatgaggcagtgtggtgtggcagtatccagctgccacttcctgcctactctgctgagtaaacaggggccctgtcttagctgggcttcaaacctgttccctagggaagggctctgttccctgaatcaccagggaggaaaggcaagggcagggttggcatctcctgctcttttgtgatccaagcctcctcccccgaaccatgtctacccca

SEQ ID NO: 12456 - DNA, 2994 bp, Homo sapiens
cacccagggtgcgggggtggaggtggggagaggagccagatgggattgatccccagagccagatgggatttaaaggtgagggaggagggcatcctgatggcgtgtggtcagttgatgccagattggatggctgagacacctctgcagcttacaggaaagaaagagggaaagggttctatgaattctagctgttcatactcaaagcaaataattaatcaagtggggggggggcctctagctgtaaacccatacctctaggaaaccttttgtcatgtggagccacagtgctcacttgacagattccccactgagaagtgggctaagaggttggcctgcattgctgggtgcctccaggtggggagtcctgtacctgggagcccgggcaggctgctactctcttctcacctctgcccagccccaaccctccactcttgccaactgagtcatcctagctggtagatgatagggtggaagagagactcgcaaggtgaggacttgtggatgtggggctcatgctgtgtcccctctctctatccctcagcgtgaatgcatctcagtccacgtggggcaggcaggtgtccagatgggcaatgcctgctgggagctctattgcttggaacatgggattcagcctgatgggcagatgcccagtgacaagaccattggtggaggggacgactccttcaccaccttcttctgtgaaactggtgctggaaaacacgtaccccgggcagtttttgtggatctggagcctacggtcattggtgagaggaagtggggacaaaattgaagggggtggagcatgactcaaagcttctccctggagagagagggtatttagaccaggcattcctagccctgaaaattcctagccgtacttgaagctgcagaaggcaagctgatctgagactggcctgggcagctggtctgggtttctctcacactctggtatctcaggctggcaggaggatgagtccttccatgcatctggccacagctaccaccctgggggaggaaggtccctgctgagcatagctttgtggtttttgcccttccagatgagatccgaaatggcccataccgacagctcttccacccagagcagctcatcactgggaaagaggatgctgccaacaactatgcccgtggtcactataccattggcaaggagatcattgacccagtgctggatcggatccgcaagctggtgagagtgtgtcttgggagggagggaacttttgagactgtgctaatggtcaggaatattttttttcagatcctttcaggaggtcatctctaactatacatggtctcgagtgtggtgctgctatggcatcctcagtatttgccctgactgctgatgtatcttacgctttatggagccaggtgatagagtccctcaggcccctcccctacctaaactgttctttctcgttcttgcctttcagtctgaccagtgcacaggacttcagggcttcctggtgttccacagctttggtgggggcactggctctggcttcacctcactcctgatggagcggctctctgttgactatggcaagaaatccaagctggaattctccatctacccagccccccaggtgtctacagccgtggtcgagccctacaactctatcctgaccacccacaccaccctggagcactcagactgtgccttcatggtggacaacgaagcaatctatgacatctgccgccgcaacctagacatcgagcgcccaacctacaccaacctcaatcgcctcattagccaaattgtctcctccatcacagcttctctgcgctttgacggggccctcaatgtggacctgacagagttccagaccaacctggtgccctaccctcgcatccacttccccctggccacctatgcaccagtcatctctgcagaaaaggcataccacgagcagctgtcggtggcagagatcaccaatgcctgctttgagcctgccaaccagatggtaaagtgtgatccccggcacggcaagtacatggcctgctgcctgctgtaccgtggagatgtggtgcccaaggatgtcaacgctgccattgccgccatcaagaccaagcgcagcattcagtttgtggactggtgccccacaggcttcaaggttggtatcaactaccagcctcccactgtggtgcctgggggtgacctggccaaggtgcagcgtgccgtgtgcatgctgagcaacacgaccgccatcgccgaggcctgggcccgcctggaccacaagttcgacctgatgtatgccaagagggcgtttgtgcactggtatgtgggtgagggcatggaggagggtgagttctccgaggcccgtgaggatatggctgccctggagaaggattatgaggaggtgggcatcgactcctatgaggacgaggatgagggagaagaataaagcagctgcctggagcctattcactatgtttattgcaaaatcctttcgaaataaacagtttccttgcacggtttcttgttccctctgagtgcttgagcttctgctgccttccccttcatgctgctgctgctctgtttgctgttcatgacccttatcccttccatcgctgaaggtgagacctgcaaaggggttcttgccaggcccaggaagcataaccccagggactttaaattgaagtcctagggttactcagtatagggaggaaatgaggaccaaaatccaggcacaaactgttgaaggatgagtcttcagctcctttccaagtaggagtataatccagtggtttctgtctttgaaagttagactgctaccctgttcttcctgctgcctctacatttaccaactctggaagcaaggcttggcccaggctcctctgtgcattatgagggtttgggagtggggctgggctggcccagagttcctgggcatggagccacgtcataagcttgggggatgggagggaacacaggcgatctcctagagttgtttgtgccactgcacctctgagcagctt

SEQ ID NO: 12457 - DNA, 1121 bp, Homo sapiens
tgagtggcacctactgcctacccagtcccccagctgtgtgctgctccctgtaatctgtcccttgctgatggcctgtttctctgatccagtgggagatccagaataccagccatctggccgttgatggggaccaggcagctgcttggcccgtgggtattccagcaccatcccgcccggcctcccgctttgaggtgctgcgctgggactacttcacggagcagcacgctttctcctgcgccgatggctcaccccgctgcccactgcgtggggctgaccgggctgatgtggccgatgttctggggacagctctagaggagctgaaccgccgctaccacccggccttgcggctccagaagcagcagctggtgaatggctaccgacgctttgatccggcccggggtatggaatacacgctggacttgcagctggaggcactgaccccccagggaggccgccggcccctcactcgccgagtgcagctgctccggccgctgagccgcgtggagatcttgcctgtgccctatgtcactgaggcctcacgtctcactgtgctgctgcctctagctgcggctgagcgtgacctggcccctggcttcttggaggcctttgccactgcagcactggagcctggtgatgctgcggcagccctgaccctgctgctactgtatgagccgcgccaggcccagcgcgtggcccatgcagatgtcttcgcacctgtcaaggcccacgtggcagagctggagcggcgtttccccggtgcccgggtgccatggctcagtgtgcagacagccgcaccctcaccactgcgcctcatggatctactctccaagaagcacccgctggacacactgttcctgctggccgggccagacacggtgctcacgcctgacttcctgaaccgctgccgcatgcatgccatctccggctggcaggccttctttcccatgcatttccaagccttccacccagctgtggccccaccacaagggcctgggcccccagagctgggccgtgacactggccgctttgatcgccaggcagccagcgaggcctgcttctacaactccgactatgtggcagcccgtgggcgcctggcggcagcctcagaacaagaagaggag

SEQ ID NO: 12458 - DNA, 1194 bp, Homo sapiens
attgacgatgagtcggcctccttcactgtcaccgtcacaggtgtgggcccagcccagctccccggggtcacagagacagccctgagccctggaggagctggccacatagccccagctagcaccccggggaggagggaggtgtgggctgcaggtgcatgtgccagggttcttgctgagatgagcccagggcccctattcaaggaaacaagcccctccccggtgcccaaggccaggcctagctctgctccacagctcatttactgagcactttccctgaatcaggcactgggagtagcaggtgagtaatgcaaatacggtccctattctgaatgagctgccaggctaggtgaggaggcagctgttaaccaggggtcgcaaacgggtagtcctggggccctgcgcattccacacatgtgctttgtttggtctgcagagtcttaccaaagtcaggacagttcaaataacaatccggagttatgcgtcctcttgaaaaagccgaagacccggcggctctggtcccgcttccccccatggcgacgaacagctggcactgagtagcagctgcccccatagtttggggcccacattcctctgtcccacctccctgccattgctttttgcctctccccagactgcttcagccgctaacctaacctggcccctgtgggcatttgagtttgcgacccctgtgttaaaccaataaacatgcaaataaatgtacagtgacacctggtgataagtactgtgagggccaagggcagagggctcaagagcacagagcaggagggtcagggaggcctgggagaaagtcacccttccacacacgggagccagcagcacgcagacacggccgcttccctctaggactgcacagcctggcaggaaagccagacgcattccaggatcttagagcatgggttgttgagggccagtctagggaccctggggctgggagccaccaccctggccaggcaacaggaagtgctttcaaagctgatactggagctaagtggggtggggtgtgggggaatattcaaagcgggagaagcacaggacaactgtggaagtgacggaggttcagtgccggagacctcggggtgacggctcacagcgcccagcccagtgtgtgtctggggctgggggtccatagggctaggcagctctggggggcacagaaccccagtggctgcactg

SEQ ID NO: 12459 - DNA, 1145 bp, Homo sapiens
ccacgcgcagcacctgtacagtgcccttgcagcaactgtcagttcctggaacctggagaacctctcacttgagggcatagctgagtaacagcctcagtgtgccctgaccctctgggtggggttaggaggcacccaggatcctcagttacccagagcctttgctctcgggcccaggctttctatgaagtggagcagcgtggctgagtcggccctgcctcatcagtcacagaaggagagggtggagccttgtttctgagtagggtgggtgtggggcagtggggggcggtaggcctcagaggtattccagagtagagattcatggagcttgggaaagggagggtcttggccccaggggcacaggctgctttgtgacccacctcagagtgtggttcacacctcttctccccagcagcactgggacgctggccccagggatctgggcccctccatgaccttccacactggatgcctctttccctgcaggcccttccacctgcctcgtatccctgttgctgactccgtccaccctgttcctgttagatgaggatgctgcagggtccccggcagagccctctcctccagcagcatctggcgaagcctctgagaaggtgcctccctcggggccgggccctgctgtgcgtgtcagggagcagcagccactcagcagcctgagctccgtgctgctctaccgctcagcccctgaggacttgcggctgctcttctacgatgaggtgtgtatgtgtatctccagtgagagggagggaggggagatggtgagcacaggttggggccatgagggcagggtgggaaatgggtctaggaaccctgggcattggtggcaggatggcacttacagatgagagaactagggttggaggaactgggggactctaggcttggatgaatatcaagtcagggaggcagctgtaggcaggggagacacctggactgggagcccagccatttagctgggccacgaggctttcagtgaggtttccggcagctttgagttggcaggattgggccggttgtatgccagccgtttggcctttgtgaccaccacctgaggagatacggttactggtcctatttacaggtgaggaagctgaggcttggggatgttaaccagtttgcccagtccaaag

SEQ ID NO: 12460 - DNA, 2514 bp, Homo sapiens
gttttatttatatgtatttccatatttcattcctgtgtgtcactgctgcattggtgtggcagcaagtgaccaaatgctacaggtcttactatggacaccaggtcaggtgcaaccacacaaaacaaagccagttccatgagctgcctatgatatgcattgcggaagtaacattttacccagggtgtgccattgcagtgatataaatatatttttttcttagactaaatatgagctgactatctcttttgatgtgtgtacataggtgtgagtgtgtctgtatgcgtgcctgtctgtgtgcgggtgtgtgtatgtgcgtagcctcatgcttaggactacccatgaatgttgtggaatgctacacctggagagttctggttttccaccagtttcaagatgaagaactacatgatacagtggacctggagaccatccccttggaaagacaacccagagatgttcagcatcctgtatctacacgcatcctgtatctacacgtgtattttgtagctgtcacactaaccttaataagaattctacagctttggacagaggcattttcaccttaatggtgaagtaatttaaaatataaatccattcaggtgacaacccatcatcaaaattacaaattttctgattgaactcatctgaatcatcagttccttgatggagagagagaaggagatggaatgtgtctggtaaccccaaatggagtacaagtagcctttgttttcctgcataaatggacttgttgaatgcgaacgaatatatgcaattcatatacttttggagatgaacgtagatatgtgtgtcagctttgagatggtgtgtcctggattaatactttgtctcccaatatcacagaaaaatacatgccagtgactcttgaggttaaggtagttgggatgaaatggcctcaggcaatttcacattccctaattacctggaaagttctacagtaattaatatgcagctaactcctgttgccctcacaagagcatcagccttctagaatcggagctccggagtgtgaagattcagtattgatatgatatgtataccaaactccagccaacttactgccatttttcataatctgagtggctgccttgcttatcctaagctgtggttgcagaaaccgtggccatttatataagctataacatcaaatcagggaaaaatgaggaaaaaaaatagattctgaaccatttattgttgaataagtagagaaaatcatcaataaatatttattacattctgacagggtgtgtggcattgtgttctatgccagagtgacaaagttgattcacccctttttggggaccttaatatattttttaagggatgtgcctatgcattgatgcctgaaaaatatgtataaagaaatgaggttgactcttctgagcagttcatcttttccagaggtaagggtaggaggccaacttcagggtctgggtctgagcccgtgggcaagccctggccgagtgagctccaatgctaactcatgtgccgatctctagagcagtgggaaactaccccgctgcaccaaatcaagtagcttcaccttgtgtatgcaggccccaagttattttttagcaatcttacgagtgaaatgttctggtgggttgaaaaacgttcttattttaaagaaaggttgtgctcgctacactgctggtgtgtgcattctgagacctcttgtattcaatctgtgaaggatatgtgtattaatccgtacacccgtatagcctcaatatttgtctgaagacacttaaattctgacccataaaggaaagttctagaagcaatattttcacttatttaacattctccaaacaacatcaagcattgatacacactgaagagtgcgtttattttttgtatcactctaagtatgttggaatatgcaaggactgtggttcaaattagaatgtataaggcatattataatttagttcatactgaataagaaattaacagaacattgttcggttcacacgttccaaactttgagtgatttctggagttagacatagattttctattttgttttaatttgtcaaggtatttttcttcccttcatgaactttaggtacacataacttatgtcatttatttatggtcttttatacctagtttgtaaaattgtaaaatagcaaactaaatgcaaagagtttgcatttgaaaataataaagtagttgccgtatacaaccctgcaatctggttgtctctttcaataacttttgctatatatatggtgtgcctaaatgaattaattatttgttgtcatttaattaaaacaaaaaatcttaaattccaactgagcatacttagaggttaaaaaattattatcttctaaagattcttcacccttcagaacaatgcatttgaaaaatctgacttagaccatcgtaattaagactgtagactatggttggcattcaggcttcaccacttactaattatacagtctagggcaagtctcttaacttctctctgcccatttccttgcttgtagg

SEQ ID NO: 12461 - DNA, 1424 bp, Homo sapiens
ctatgtacagggacctggcaagaattggtatcacagccatcacgcaccagaataagattttgagcagtgtccaggcaatgcgaacccaaatgcagcagatgcacggcagaatggttcccgtctgagccagtactgaataaactcaaaactcttgaaattagtttacctcatccatgcactttaattgaagaactgcactttttttacttcgtcttcgccctctgaaattaaagaaatgaaaaaaaaaaacaatatctgcagcgttgcttggtgcacagattgctgaaactgtggggcttacagaaatgactgccggtcatttgaatgagacctggaacaaatcgtttctcagaagtacttttctgttcatcaccagtctgtaaaatacatgtacctatagaaatagaacactgcctctgagttttgatgctgtatttgctgccagacactgagcttctgagacatccctgattctctctccatttggaattacaaccattgtattttgtttgtggcataaattacagtcatctgtctttcactggaatgaagaccatgcctaggaacattttttaaggactcagctgtggcttttagggcttggttcataccatgggggaaaaaaaagtcctaggagaaagcgacgtggctcattagtgttgcctcttcagtgctcaagccgcctggtggattcctatgacacagggggcctggaaagaaagggaaagtggatttaaaatatatatatacgtaacccaagccccataacccctaactggacaaatgaggtctgtttctttgggcctgaggctgtgccatataaagtcttattttgggactttacaaacttgtcctaactatcttgtggatagtgggctgtgacaatctggaatagagaacgttcacacttcgctcctttaaagaagcgaccccagatctgcaaggtaagtccaacaaccaagaatgattttttctccagtgaaaactccttttgtgctttaaacttgatctcattcgaaatactgaaaacagaaaaatactctctcatgtctctcaggttgtgttgatgtttttcaggatttcagtccttttttgacagcgaaagaggagaccaaacacagtgtggtttccctgctattcttccggggagaagtgacatatgacccagatgaggtcaggctctgagggatggtcctagatgctcactggctgttggctgtgtgctttccatcacgaagggctcctcctgtcctttggtgccattcattcatggtacacatatttattatcttctgggcaccaggcagcaagcacaggaggctttctctctaaccttgttaggtcatgggtcccgtcctttggagagtttacctcaatggagaagtactggcgagacttttccattagcctcattttctgtcctg

SEQ ID NO: 12462 - DNA, 1221 bp, Homo sapiens
agaagccatctctcctgcaaacactggccattgtgtaccactgacatccatggcttcaggtgtcttgactttcataaagggctgttttcactcctccttgcccacaggctggagacctttcattgcatctgtttatttcctagctcacctcctccaccctctaatttgaaccagtaatgaaatgcagtcagcctacttcagctgttttctttttcctccaaagttccccccaaactgtttttaattcactgcttgtgatactggactcaagaaaacaattttctagctcaggaaccatgtgaagctttcctctctttcttttctccgtatctcctcttctcttctccatcccatttgggtgtcacaaggaccaaactgctgcagtaaaatgacttgtaggtgtttaatggcaagtcattgaggaagtgaataaaagaaaattgcagcattcacgtcagtggggagcaaggagaactgctgagctttgaaccaaagaaagttaaatttaccattttcttaaagggagccacctctgtttgacatcaaagcatctcctgtaatttctccttgtgaaatgcaccactgttagagagtcatgatagagccccctaatctgtgctgtttctgtttatcaaaaacacacacagagagaaaacccacatgtaccttctcagtgcattgtggtctgctctcaaaccaaatgtaaccacaggtacatagcaaatggggattctatttcgaaagcattctcagtttctcagggatttgtagaactgggaatacaacattctttgggagtgaaatttatcttggacctctattggaaagctcagatcattcaactggaaagctttggtgaattttttcctttcctcctcttttggtttttgcttcatcgttttttaaaaatggtattttgctacaatttcacttgtgtccatttggtatgtggaaaaacagagtctgttcctaataatgctgctcgcccacactatgactgcaaagggctctccaccctattacccccatgtttcaagtttatgtccattggtggctgttgcatatgtagtaactaatggcttctgctggcagtgactggctttgccctagtccatctttggaggcttaggatcctttctggatttatcattatgacttgggagtctcaccatcactccaccttggcagttaagaagtcaggagaactatttgcatatgccc

SEQ ID NO: 12463 - DNA, 1214 bp, Homo sapiens
ttttttttttttgaggtattagagagcaaagttctgacaggagcactactaattaactgataattgtcttcctttggcaagctctgctcttcctgcccttaatttgcaggtctctgctcagtggttgaaacaatacccatactagtttttcctttatgagtaaatttgaactgttgccacttgaaattgtagctgttgtaataggtgaatttgaggttgttggaccaccacaaggaactgccgagaactcacaagcagtaaatccaccattgcctctggatttcaggcaaaagattgaaacaattaaacaaacaaaaaaaaaacttcctcaataaaatattgtcttatctcccataagatcctttattagtgatgattggtgctcagtagtttgcttcattattgaaagaaaaataatcaggtgtcctatgagaataaaatgggattgacaaatcactgcatgatgaaactttgtagttgatacatctgctttggatctttgcagtgggaggaagtgagtatcatggatgaaaaaaatacaccaatccgaacctaccaagtgtgcaatgtgatggaacccagccagaataactggctacgaactgattggatcacccgagaaggggctcagagggtgtatattgagattaaattcaccttgagggactgcaatagtcttccgggcgtcatggggacttgcaaggagacgtttaacctgtactactatgaatcagacaacgacaaagagcgtttcatcagagagaaccagtttgtcaaaattgacaccattgctgctgatgagagcttcacccaagtggacattggtgacagaatcatgaagctgaacaccgagatccgggatgtagggccattaagcaaaaaggggttttacctggcttttcaggatgtgggggcctgcatcgccctggtatcagtccgtgtgttctataaaaagtgtccactcacagtccgcaatctggcccagtttcctgacaccatcacaggggctgatacgtcttccctggtggaagttcgaggctcctgtgtcaacaactcagaagagaaagatgtgccaaaaatgtactgtggggcagatggtgaatggctggtacccattggcaactgcctatgcaacgctgggcatgaggagcggagcggagaatgccaaggtaagagggtccatattgcagttttttcactggggcttagtgcga

SEQ ID NO: 12464 - DNA, 1925 bp, Homo sapiens
tgcctgggttgaggctcatgggaaactgtattctccaagtcagatcggagcatttgtgtcgatgaagatgaaagagactgcagaaaattacttggggcacacagcaaaaaatgctgtgatcgcagtcccagcttatttcaatgacttgcagaggcaggccactaaagatgctggccagatatctggactgaatgtgcttcgggtgattaatgaacccacagctgctgctcttgcctatggtctagacaaatcaaaagacaaagtcattgctgtatatgatttaggtggtggaacttttgatatttctatcctggaatttcagaaaggagtattcgaggtgaaatccacaaatggggacactttcttaggtggggaagactttgaccaggccttgctacagcacattgtgaaggagttcaagagagagacgggggttgatttgaccaaagacaacgtggcatttcagagggtgtgggaagctgctgaaaaggctaaatgtgaactctcctcatctgtgcagactgacatcaatttgccctatcttacaatggattcttctggacccaagcatttgaatacaaagttgacccatgctcaatttgaagggattgtcactgatctaatcaggaggactatcgctccatgccaaaaagctatgcaagatgcagaagtcagcaagagtgatataggagaagtgattcttgtgggtggcatgactaggatgcccaagttcaacagactgtgcaggactttttttggcagagcccccaagtaaagctgtcaatcctgatgaggctgtggccattggagctgccattcagggagatgtgttggccggcgatgtcacagatgtgctgctccttgatgtcattcccctgtctctgggtattgaaactctgcgaggtgtctttaccaaacttattaataggaataccactattccaaccaagaagagccaggtattctcaactgctgctgatgggcagacacaagtggaaattaaagtgtgtcagggtgagagagagatggctggagacaacaaactccttggacagtttactttgattggaattccaccagcccctcgtggagttcctcagatcaaagttacatttgacattgatgccaatgggatcatacatgtttcagctaaagataaaggcacaggacatgagcagcagattgtaatccagtcttctggtgggttaagcaaagatgatgttgaaaatatggttaaaaatgcagagaaatatgctaaggaagaccagcgaaggaaggaatgagttgaagcagttaatatggctgaaggcatcattcatgacacagaaaccaagatggaagaattcaaggaccaattacctgctgatagtgcaacaagctgaaagaagagatttccaaagtgagggagctcctagctaaaaagacagtgaaacaggagaaaacattagacaggcagcatcctctcttcagcaggcatcattgaagctcttcaaaatggcatacaaaaagatggcaactgaacgagaaggctctggaagttctggcactggggaacaaaaggaagatcaaaaggaggaaaaacagtaataatagcagaaattttgaagccagaaggaccacatatgaagcttaggagtaaagagacttcctgagcagaaacgggcaaacttcagtctttttactgtgtttttgcagtattctatatataatttccttaatttgtaaatttagttactattagctagtgatcatttaatggatggtgattctaacagtataaagttcacaatgttcgatgtccctagcttatcatttttcagctgcatgtaaaaggaagtaggatgaattgatcattataaagatttaactattttatgctgaagtggccatattttcaaggggtgaaaccatctcgcacacaatca

SEQ ID NO: 12465 - DNA, 1197 bp, Homo sapiens
tgatgagtgattgcactgtactttatgtagccatccctaatataggttgtttataattttactattggaaataatgttgtagtaaatgtctttctacataaagcctttttgaatttaggattatttcctttgggtagtattaatattatgaataagagagtatgaagctttaaggctctgatatattggtaaattgtttacaaagaattttaccaacttatacctcagtgaagccttattttccctggtcagcattgagggtttttcactctttcccccaaataaaacaccttagggaatttgatgagctgaaaaaagactattttatcttattttgcatttgtgaggttgaatccttctctgaatgtttaatatttggttttcttttttgttgactttttctaagtttgtactggggtaaatcagtttcttaagcaatggttaatacagcgttgtgaccagttcctttatttttctagatgtaggtgcaaaaaactacagacatctctgtgctgtttattacaacaagaatcctgggtttgagatcattcatgggctgctggacagaattatgcagttgctcgatgtgcctcctggtgaagacaaggggggatatgtgatcaaagcatcagaaggtaagacagatgagccgaatccagagttagtgacagtgtcaggaagaggctacaccttgtttttgatgaagttggtagttttgatttgggattttagaaagaaagggagagttttatttcaattaattgtcaatattatccagaaaatatcccctttccctccagcattttaagaaaacacttttcagaactctcgtaagtgctgcacagtatactttcgttccaactgagctgtaacccctagttactggcacctttaagccatcaaaatggctaaatcactggcacctttaagccatcagcacatggtgaacccagaagttttaactggaagctggtaagacctaaagtgatggtttgcactcaaaagctgcctgtctgatggctttaagacaaaagaaaaaagaaaacaaaaacaaaaacctcagaagttattctgaaagatttcacacatgttaatcaagtcataaagtttgcagagcaagggtgggaatcctcgtgtataaaatcccaagtacagtaaaatctttgttggagagtttaagctaggctaactaaatgg

SEQ ID NO: 12466 - DNA, 1324 bp, Homo sapiens
catgttagccaggatggtctcgatctcctgaccttgtgatccgcctgccttggcctcccaaagtgcggggattacaggcgtgagccaccgcgcctggcctcaacaatgcacatctttgaccatattaagtggatatatagccatacataagcttgcccttatattgtttgttttcatttaaatgtttttgggtgtaccctatagtggaaagagcatgggttttacagtcagttaattctggtcaaatcctggttttgaccagataattaatcgtattagcaatataattaattaatatatataattaatattatatttattattattatctaatatatataataatatataatataatattaattatattaataataatataattaatcgtattagctccagccaattagtttgactttggccaagttacttaatcattctgagctttgtttctccatctgttttataggaataataatacttactttgcatggttgtcttgagaattaaataagattatagataaattgacagatagttaatacctagcatgtgccagataatcgataccacagattaacagttaatgttagttttcgttttcctccatttatgtgcttacttttatattattttaatattagagtacagtgtcttaaaatattcatgttttacttggatatctagaagataaaaggcattctgtattttatgtcaactattgctagtagcttttacctatgggagtaaatccgtggaagaagttttgctcaatgtatgctaacatgaagcagctttctgttttcagtttattccctcagatattagtttgttttttctctttttaatttggaaagcaaaatgaggccagcattcgttctatgtttgtgttagagcagcggtctccagaatgtattgaagggccacaagtgttataaagttaaatgatgactgctgactttcagtcttcctctctatacttaggtacttctttttaaaaatgagttttgttacaggtttagatgatttttttttttacaaaataaaaatttaataaattaattttcagaaatcaatagcttttatagatacaatatgtctaatttcaagctctaagggaagaaaagacccatgttataatagcacaaaacataaatgataacatacttaggaataaacacaagaaatattatttgtagaaaatgttaaagtgctaatgagagatgaaataagacccaaacaaatgggaagatacaccacgttctttcatagaaatacgcagcatcataaagatatcacttctctcattaatgggtgcagcaca

SEQ ID NO: 12467 - DNA, 1097 bp, Homo sapiens
ggtgagaagaaactaggtgcgtgaggtgggtcgaccttggtgattggttctgggcactatcgtggtggtgggactgggattaagactgtcgtttggggtttgagagttgcagctttgcttttccccaagtgcgttttaatcatatactgttgataggttgggtaactcggggactgcttactaccagcagtcctgtggggtaggtgttatcaggctcgtttcacagatgaggagcccgaggcacaggttttcaaatggttttcgcaggaagtctgatactagaaagtgtgctctaagctgctgtataaaagatccctcgaaaatgaaaaggctggaggaatgtctttaaaattatatggaagctagaaaggcagtaggctttgtgaacgaaattatagctgaaaagaatgacaaatagctgacatttattgagcttttattacatgccacgcactgtttggagagctttatgtacagtgtcttcacactgttaacagtcctctggggtgggggttattcccattttacagcgggagaaactgcagattggacgacttagcttgcctcagatctcagctagtaagaagctgggattcagacaggcctgtgtaaatccagagctctgaaatctaagcactatattttgctgcctctccttggtggctggctgaatagtttccacagtggattttagtctgggtggccaggagagttgtagtttgatgataccttctttcatgtttatcaacctattttgtttccccaaattagttctgagagttaagggtgctgatgagttgctcctgaaagtgtattagaagggtattataggggacaggtggtgtgacatgggaatcttttgcacagacttgattttgttttctggcatttttctgggcagttcctcacacttggggatgagtaagccttctaattgtcgcatgcgttttctctctagacttttcctggtttctcttttgtataaaaatattggttttgtaggatgacattgggtgtggggcagagtggtccattggacctaagggtcaaggtgacaagtcacctcgtatctttggatctcagttactgaatttgta

SEQ ID NO: 12468 - DNA, 1151 bp, Homo sapiens
atggtctttttgtgagcaaagaatgtggtactgtatatttttataagataaagttaggacattttgaaaaaccatttcagacggttgttcgtttattttgtgagtaggttttagttcagaattagtaagataagcaaagcaatataaagaatatcttacaatttatatgagtatctagatatatttctgcttttaaaaattatttttgtggaaactttatttttaaactaattgtggttcgattttaaaagtttgatcttgataggatacatctttttgaaaaattcacaaaaggttttttccttcttgctgaatcacatccacagttgaagagtacttcttttaaaatgccttaatattgctagaaatgttaatctaatgctaagtgaatatgtaaggcagctgttattattaactatgttaaactcatttttatacatttaggaaatcatggatcggatctacaaaaatgtcatgaataaagtcagtgaaatgagtagttttcaacgtaatctgtttattctggcctataattacaaaatggaacagatttcaaaaggacgtaatactccactgtgcgacaggtaagtaaagactctctacctccttctttctcctcttgataatttaatcatttagttcacattaatagcccaattaattgagatagttataagaaagaaatatatttcataaagtcaagagaactctttaaaaaaaatccatcccaggccaggcgcggtggctcatgcctgtaatcccagcactttgggaggccgaggcaggtggatcatgaggtcaggagatcgagaccatcctggctaacacagtgaaaccccgtctctactaaaaacacaaaaagaaattagcggggcttggtggcgggcgcctgtaatcccagctactcaggaggctgaggcaggagaatggtgcgaacccaggaggcggagcttgcagtgagccaagattgcgccactgcacgatctgtctgcctgggcgacagagcgagaatccgtctcaaaaaaaaaaaaaaaatccatcctggctgaacacggtggctcactcctgtaatcccagtgctttgggaggccaaggcgggcagatcacctgaggtcaggaattcaagaccagcctggccaacgtgacaaaac

SEQ ID NO: 12469 - DNA, 1156 bp, Homo sapiens
ctggcctgtttttcttttaaaagcatgggccgggcgcggtggctcacgcctgtaatcccagcactttgggaggccgaggcgggtggatcatgaggtcaggagatcgagaccatcctggctaacaaggtgaaaccccgtctctactaaaaatacaaaaaattagccgggcgcggtggcgggcgcctgtagtcccagctactcgggaggctgaggcaggagaatggcgtgaacccgggaagcggagcttgcagtgagccgagattgcgccactgcagtccgcagtccagcctgggcgacagagcgagactccgtctcaaaaaaaaaaaaaaaaaaaaaaaagcatgtatttagcagtacaaaaattagggcctaattttaatatgtgcttttaatttcagcataaccattaatgcttaattttgcaaagttttaaataatttgatagcaaattacttagagaatggccagtatttatatatgtattaaatgttactaatattattactcattgttttcccctctccacctttctttgttttgcagatcgtaaaaaggaccttgtaaaactacaggcaggggaatatgtttctcttgggaaagtagaggcagctttgaagaatcttccactagtagataacatttgtgcatatgcaaacaggtaagaacgtggaattcatactacttttacttaaaatatttgatgtccatagacatttcctacctgtatggaccttctttgtaaaaatgttccgagaactcttcctatctgttacttgtgggaatggcctccttctcattgcagccattagctgactcttttccttgtaaggcttcccctgatctttctctctgtccctgttttctgctttacgtctcactgcagtgtcccatggagggaggtgaagaaaataaaaccttccttcctgctgccttggtacccctacctacctgtccctcagcaggggaagcttcacagaactactccagaggaatggggagtaaagaagtggcagtgaggagtgtgctgcttacttactcctgctctacacttgagcctgctcggcactccaggcaggtcttggggctcctatgtaagctgtgttaagctgcagcctaaacacacagcctccccacctcatgatgatgaagaggcagc

SEQ ID NO: 12470 - DNA, 1451 bp, Homo sapiens
agctttcagagttactgggattacaggcatgagccatcatgcctggctctaactcgttttcaatgacagaatatatattctattttgttcctatatcatattttatttaactcattttcctcttgatggggacttgttaaatagtttattgttttacttatgtttgtattttgaggaatagattctttagaagtgacattcatggttcacttgttggttgtgcattttgatggatacgcaaaaagtggggaagttacaccatttgctaagaacttaaataccttttcttcttttctttttttttaatcatcttagcaagtctggaaaagtttgaaattccagtaaaaattcgtttgagtcctgaaccgtggacccctgaaactggtctggtgacagatgccttcaagctgaaacgcaaagagcttaaaacacattaccaggcggacattgagcgaatgtatggaagaaaataattattctcttctggcatcagtttgctacagtgagctcagatcaaataggaaaatacttgaaatgcatgtctcaagctgcaaggcaaactccattcctcatattaaactattacttctcatgacgtcaccatttttaactgacaggattagtaaaacattaagacagcaaacttgtgtctgtctcttctttcattttccccgccaccaacttactttaccacctatgactgtacttgtcagtatgagaatttttctgaatcatattggggaagcagtgattttaaaacctcaagtttttaaacatgatttatatgttctgtataatgttcagtttgtaactttttaaaagtttggatgtatagagggataaataggaaatataagaattggttatttgggggcttttttacttactgtatttaaaaatacaagggtattgatatgaaattatgtaaatttcaaatgcttatgaatcaaatcattgttgaacaaaagatttgttgctgtgtaattattgtcttgtatgcatttgagagaaataaatatacccatacttatgttttaagaagttgagatcttgtgaatatatgcctgtcagtgtcttctttatatatttattttttattagaaaaaatgaagtttggttggtgatgcatgaaacaaaatagcaagagagggttatagtttaatagtaagggagataacacagcatgtgtagcaccagttgataattggtctctagtagcttactgtcaaaatgttcaatgaagtcttctgttcatctgttgaaactaggaaaatacccaaacttaaatggaagaattctgaaagagaggatagaatttaaagaacaagagtatataaagttattctttgaatatttcgttgactatatgtacattgagttatctatatttgtaaacaaattagtcatggaaaattattctatctcaaagtctccttttagtctagataatc

SEQ ID NO: 12471 - DNA, 1215 bp, Homo sapiens
ctaaaaatacaaaaattaggccgggtacagtggctcatgcctataattccagcactttgggaggcagaggtgggcggatcacaaggtcaagagatcaagaccatcctcgccaacaaggtgaaaccccacctctattaaaaatacaaaaattagccgggagtggtggtgcgtgcctgtagtcccagctacttgggaggctgaggcaggagaatcgcttgaacctgggaggcagaagttgcagtgagctgagattgtgccactgcactccagcctgggcgacagagcgagacttcgtctcaaacaaacaaaaaaattagccgggcatggtggcaggtgcctgtaatcccagctactcagggggctgaggcaggggaatggcttgaacccaggaggcagaggttgcagtgagccaaggtcataccagtgcactccaggcgggtgacagagcaagactgcgtctcaagaaaaaaaaaaaaaaaaagaaaaagtaaaagcttgtagtattctgtcttgctgcctgctatttgatgttttacctgtgcattttcaatgttagctttgaggtctggtatcattcatattagagtggtttgggacctccagtgatttcctagaagagtgtgtttcctgttggattctttaggagatcccatctggtagatttttagagaactcgatggaaaaatgttctctttagttcatctcagcagacatatttagggaaaacagcaaagcaagcaggagaacaaagggaaaaattcaccaattcctcaatataaccattgttcaaaggaaataactcagattagcatataaaataatcattaggcttttactatccaatatttcttcaggttaccatgtaattacaattatggcatcagcttgaagtttatcatgtatgattgaccactgtgtttactttagctaaccttcagttttgtggtttaactttttaatgtgttagaattttttctttctttttttctttctttctttcttttctttctttctttcttttccttcctttcttccttccttcttctctctctctccttccctcccttccttccttcccttcctccctccctcctttctttctttctttttctcttttcttttcttttctttcttttctttcctcgcttcttgtcacccaggccagagtgcaatggtgtgatctcaggtcactgcagcctccgtctcctgggttca

SEQ ID NO: 12472 - DNA, 3127 bp, Homo sapiens
atgtaaaggtgtgttttggggcatttgtggaacttacccatggggactaatatggaaaaggtctgtccatagtggttccctgaagactggaattacttcagcaaaacttccccatgaacagctaatgtgtagtgaaagaatgagctagcaaatgagttttagcggggacaaaaaatcaaacaaaaaagtgaatgcttagaaccttctcaaagcagtcacaagtacagacacttcacttagcctagggggccttccagggttcttgtggctgttgtcagagcaggagctgggggagggaagacttgttctctctttcttgaggggtggcattaggaacttacgaaaccagagacctttccctatgacttggcagtatgtgaatatcctctacacttagttattgataaacttcttaaagagatctgttattttcaggtagtgccataatctgcacttagcattggcttgcttcagttgtttctcttcccagccagtatgccacaggtgaactttcggggttgtcattaagtaagttgtgaaatttctgtaataacaaaggcagtccgcattcttccctttcccccaaattcctagggcaaaacttttttatggtgctgttaacatgggagtcacacaagccgcctgactttttctcattgccattagtaatgactgatggaaaacccagccaccactgtgatgcgaaatgatcagtctgttgcctgaaacagcccagtcctcttaactgaaacagcattctacttcttgttccaagatgagcctctgcaatattctggcaatttaatataccccctacaaaagcactccacagcttttacactattttgactttgagttataactagtattattcatgttttcataaaaagaagttagtgacccagagctataatcatccatcaagtcttccacaataattcccaactcataaattgctttcctaacaactagcaaaagctattgttcataatggcatttctaaagcttttgggcactgtgtaccaggatgaggaagagaagaaatgaggagcctgtcttttaatattccagtatttgtgtgtttgattttttttgacaacagtacatatatctatttctctagggatatggaagtaagtggagaagggcctacctttttaaaggacaaatataaaaatagcaacagtatctttgctaatcttactaatagatattgattaaaaaaaaaaaacctcagtactgcatcactgtgttgggatcataccaggacaatagggtcattccatatgataaaactaaaggactaaatttgttttataatgatgtcttagagggactgaaaggtttaaggaggcgatcaaactaaaatgtcttaatggctgtgtgacacacgtaaggaaaggaaagggggtcacgcacatcatgtactggaatgatctgcattaaacatagacttgtcttcagaaataagactgaagggttttgttgttccttagagttttcgtgttacatcacctaaagagatttcttttaaaaactttctagactctttgcaaaatgtatattactaacatagtttggaagaaaaattgagtagtggtaagttttgttcaagcacaatgttgaatgttaagcttcctgtattaattttagttcagttaatggttcagcccatacaaaggtgctatcctagggattttatgaattcctgaaaggaaaatagaatatgatcaattccttgccctgtggaagagtgcagaactgtggttttgttttcctttgacttctgtaaaatgtgaccgtttgacatctgtggtagattgaacggaatatcacagctgctgagtttactccatagctttcaaaccttttttattttaagaaattcttgaaaaaccctatgttccatgggaacataaagttattatagtgcctcctaaggggttaatataaatcaaggaggaagtttatatttaaggaagaattggagtgacgtatcttagaaaaggaaaggctgatgtttccatatagcttgctctccaccaggcctatcatttttctttttagagacaaacgtgacaggctagtcttgtctctctcatatgctaggtagcaaatggggtgatatttttatagaagtgggcaaaaattattttctcaattttactgagtaggcacagaagaaaagtacagataggctgatggttattgccttattttgactgcatttctcttaaatggatcatttaaattagttcttcaagtaacagtttactggttgttccattcctgaatatgcaggctaatttgtacagatagggattaaggaatacagactattagagaagatccttatatttacatctagtatatatgtggtaaggaaatgccgattcttcattataaacaagttttaaaattgttctttcttagttcaaatgatagcaatacccctatagcattaggtagaaacaaattattcattacatcgtaaatctctttactatgtcctagctctgtcctgctacctaaaggatataaagaaatactattgctctagaatgtattactttgttctcccatgaaagaattcagtttgttagtacctatatttttaaactggtgaaactgacccaaatatgtaataaataccatagtagctcagacccaaggagatatttttctaaaatcagttttcgttaaagtacttctacttccgttattggatatggtatctcctaaagtgtaaaaaaaatctgttactatatagtgataaaccatctgctcatcgtaagtgtaaggcttaacaaataagtaatacatgctatatttattcaagtgtctattgcttaattgttaattgtgagcagatttattgaatgcctattctattttctgcagtttacaatacaataactctttgagtaagttgaagtttaattgtgcaacaaatttgtattagagtacaatttaaagtgtttttctctatagccttttttgactggggaagcaaggggtaatgttaattagtacactttgttcttgtactagctatgtttctataagatatggtgccctgtgtatcccagagatgctagaaaactgttctttgctcctatttgtgggt

SEQ ID NO: 12473 - DNA, 1707 bp, Homo sapiens
taaatatgatgaccttgatagttttaatgaaatcttcaattcttgcagctgtgttttggaaagtgattaagcaatatttctcaaacctgatgattcttggatatttagctattgtcctccaaagagtcatcgtttcacgttttcaaacatgtgctttgtgctgaagattcttgtcagatatcctgtgcttccagagtatttttatcttcaattttatttaattttgtttcattttgttttcataagacaatgtttcagatatgtaatggggcaaaccactatagatttctgttggatagaaaaatgaaatgttactaataagtttaaattgacccttcgttgactatcagtactgttgatacatttattagaatgtatgtctcagaagatggtttctgtttaaatttatggtcaagttacaacaactgaattctaatatggattaaaaactccacataaatatttttccccatgcgtcttgggttataattttccttttagacttgcaaatatgcttttattgcaattttgtctccatctgtactgtagaattacaagccttgtgctctttatctctacattttccacttctacatgatgcaattaagatgccaatgaaaagtattgtgaacattattctcaggacacttttaccatacttgagtagtactaagtcaggtgtaacatggaaagctaagggtttcaccttctgattttgacataattggaaattttctataatggtaagatgtttataggaaagtaatggtagttcatgtttgagaatttttttattgctttcatttcccagttaaatgatatttaacacctgggaaaacaggacagctcagattgtcgagttagtaaacatgagcgatgtaaaaactttatttgaaatctcctaagtgagacattaaacattttagtgctagtttaagccattaaaagtaaagtttaagtttacgtcattgtctcaagtgtggctgtaaaaatcagatctagagtttagagacatacttgttaactttggagcacaggtttgatatttatgcttctaaatacattaaaacatttctgaattgcagttgaatggttggagattgctggcgatgtgatgctgcactgaaaaaactggtcacacaaaatgtttatatgtttgactgcataagtattattttaggtcataaaggttataacaaaatacatttaacattgctttctttttagcaagaggtcacagatgctattttttctcagtttttaatgctttaatttgaaagaaaaatgcatcctaaccattccatcctgttggtgcagagaaattttggtgatttattagaagacttttaaggagggtggatacatagtttttcaactgcaaaaatcatgtcatctcttcagtaactgttaaagtgtaattctctgccttcattatcaagtccaggacagtgtttattttgaatcgttaacattatttaaagactgaaaattcattgcaattagggaacgcacagcctcacaaaaagtggttgtgattgcaaggattctttatgtcagtgaacttaaaaagggaatgggggaagagatgcatgcctttctaaaggtatgctagagtcacctgtgtagcattgtaattatgtactatcaaacccccaagatgctgatgataggccttctctgtaagaatccttctcatagtgaagcact

SEQ ID NO: 12474 - DNA, 1176 bp, Homo sapiens
ttcagtgagcttaaatgaaaaattccgtcttttggctgtgtaagtttttgcctgcatatgcaaaggcttcataaaataatctctgtgactaaaatttcatttcatctgttctcaatcatcccttaacccagcgctatattaccttatgcctccaattcagtggtagccctctacggaatagaattccactccaacccctcattcatgatgcactaaatgagaatgtaagaatgatgctactgtgtgaagtaggagacactttctcaaaccgtatccctttttttgatgtatgtcaaccagatatctatgttttcaaacaatagtgtttttaagctgtaaatgaaccgtagtactgcttttgtagaactaaaattgtataattgttacatcatcttaattttgcagctaacagaacaagaagtagaaacaatattggataaagcaatggtcctttttaggtttatgcaagaaaaagatgtatttgaacgttattataaacaacacttggcaaggagacttctcacaaataaaagtgtttctgatgactctgaaaaaaacatgatatctaagttaaaggtaaggtgtgttttagatgaaatagagtgcacctaactgaggtttattatgattgtgtactgacaacgtgattggaaattaatttggtagattattaagtgtttatttctagaaataaaggtagattgttttggagaagaacacagactacactaacatttgttcaagttcagggacattcagagtttgctggaatttctgttggtgtgtcaggatacattcatggaggcctggaagggaggattagtaaaagggaaacaataaagaggctatgctgtgtagttctttttcacaaagtgtggtccatagaatacttgcacgtgaatcacctgagatgctagttaaaaacagttctgggccctgcctttcatgggggtatattggaatctctgaaagaatctgggaatttgcattttaaaatcctaaagtttgataaccacaggcacagagcaactgttggaaaaatttacaggaagattatcagggatagcaataacatgaaataatttatttctttctgtactttctcatagaaacatctaccatttatttgtgtatatttgtgtttttcctccacagactgaatgtggatgtcagttc

SEQ ID NO: 12475 - DNA, 1144 bp, Homo sapiens
agccaacaggaataatattgaaaatatttaataactgcttagaccaggataccgtgtgggccatgctcccctccataggccctgactatgtggacattaacctaccgccaactatttgctagtttgtaaagaggtccaagggggtgtaggttacaatttgtcacccacactgggacagttttgagaatgacaggtgtaaaccaggactttcctggcaaaagcaagaattagagtcacctcagccttttggaactcaacgcagtgaatattcaccaaccaaaaagaaaactttttaaaaatatgtcagctaagtctcacttgtgcatattgactctacatcacctctatgcactccaagttaatagacttgagttcactaactaatctggcactaattgtcactctggaaaattgttctcgcacctcaatttccctaccttgaaagtaagcttattgctgtttctaccttaattcattccatgtgaatttcatttaaatggatttataaataagcgtttctttctttgtcaatgtgtaaattgcaaaatatctcctgtggctttacattgtaatagcactggggagaaatgtgatgagacaaataaaaattcctgaatgaacaatagtgagaattgtgctgacagattccatatctttaaggtctgaggatgtttaatcctagagtataaagcctcaaccgtgtctttagtccctgtgtacaaaagctgttctctgtaggaagtcagccagctgttgcttagctctgttctagagaagaggaaatcgccactgatttcacaaaggtgaatattccacccttctgcatatacccatattttcccattcctgagaccctgtctcaaatcccatcattcttgggaattcctggctcatgacaccagctggtggctctccctcaagttacatattttgtgccttttgtatgcatcacaagatgggtattttatcccataacatcctgttcagtaagtacctgtgtttaacagtataccatttttgtatgacttcccaccaccaaattctcaagtataacaaattgggctaagcagcttgagccctagctctgggggccctcactgatgctggggaaggtggctaaagtttcatgtggcaagaatgaagg

SEQ ID NO: 12476 - DNA, 1776 bp, Homo sapiens
gaagggtttgggtgccatatcccaaggccccctacagtagattattttattggattgtctcagtaactcagaggtggacagagaaggcggttatgccaggttcaagatgaacaactgaggttgagtgacaagttcataggagaggcatagaaaggggaaggagtcccgtattctttctgctgtggtaagcctgccaaaatgcatactgagtcttttctgccagaataacagtaggtaaccgcttcctcacctcactatgtaatcaagttaggaaggaaatacacccttcctaactcagaaatctgaagaagggaaagggaaaggatgtttaagtgaatttaagctgtcatgaatgacatgtttttctatgtgtagttgtgtttattttgctccaaatgaaactttccatgtttgtaataatacttttgttgacaaattattatactacttactttataagaatctgattgccctattcattaaagcctctatattatattttttgtgtgtttgtttttcacttagataatcaaactaaatagacgtctacaacttctggaagaggagaacaaagaacgtgctaaaagagaaatggtcatgtattcaattactgtagctttctggctgcttaatagctggctctggtttcgccgctagaggtaacatcagccctcaaaaatactgtctcaacagctggaaatataaaagatttgcaaacttctttgtttctgtctctgcattgtatgccattttatagtccacaccctgaaaatgtatttcttccagaaagtctggaggaaggacctatatttgtagaagtaaaggtatattctgtcactcagctgtattcacgtctgagcagttctgcagtaacacctgcttaaaattctccctttgcatgttttgtaaataggctccagttttgttttttaaaaggaatttattttttgcctcatcagtccacccaactgattctgaatgggagagagtctgtagagaattgattcagaaaagtgtctgtgaaagaaaaacaattattttgtcctgtttctcaaacagtgttaagcagttttgttaatagacatttttgcatcgacacttcaacattaacactttcaaagtcatggtctggtgccagatttaagaaactcgaaccacctaatatttcataaccttcttcattaggtacttgtacagattaatttctaacattgcagcagtttcatatgtgtgcaatatgtgcattctttcattttagttttgcacttggttttctataaagtacgtttttactcagttcatgcgtgaacaatttaaaaaacgacagaataaggtacaaatgtagtgtatttaataaactgtcaaccaaagaagtatttgtctgttgaaggattttatttcatcatttgtgcaatcagctacattttgtatcatattaccttatgagtcttcccgtctcagagcaagtaatacaattaatgacctggtaggtagcaagaacctgctgtgcttcctttcagaccttcatcctggtggtggtggctgttggttgcattgtaggtggttttctaatttataatatctataaagtggttcaggtttaaataccttgagttgtgtatacttttttttttttgagatggagtctcgctctgttgctgatgctggagtcccgtggcatgatctcagctcactgcaacctccacctcccaggttcaagtgatccttctgcctcagcctccagagtagctgggattacaggcgctggccaccaca

SEQ ID NO: 12477 - DNA, 1202 bp, Homo sapiens
tgtttcttaaattttaatgagtttaaaattgcaggcttctaatagaatatgaatatcttcaatttatttggtgatcttgtcctttttttaaatttttatatatgaccatggtgagacatttgtaaacttaaaaaaagctctattaattaaaccatttttgtattattattttaagtatttcagttattattcagattcacatagttgattaccatttttaatcagtgaatttttccaggatgttttctacatctttgtctgctttcctataactcagtactgtaactcagtactctgaaatagtttcctttgttaatagagtcacttttatagtactgtgcttgaggtcatatacagagtattgtgtccaaatttatcattgcacaaagtgtttttggaaattcttggttactccttagtaaattacctgtaattgggttacatgctggtagggtttaaaatctgattgctaagtgaattctctataaagtgagttttgatacatagaaacttttcatataattcttaaactcatgtgtcatgtattttcatttatagttttcatattcattaacatatgttgttccttaccatttacagctcagaattctgcaaatgcagattttgcaaactttgatgcatttggacagtctagtggttcgagtaattttggaggtttccccacagcaagtcactctccttttcagccccaaactacaggtagagcttctccagcattgtgcttaaatgtttactttacaaaacaaaactctctaaatgtagttttgaaaaattagtctaaacttaaattctgtaattatctgactttaaaatggttctatcttcaaaagctctggggaaacctgaactctttatttttttctatgttcatttgtttttctgcattatttggtatattgtctgtttgacaacatccattctcctccttttcctgcgcatgaatcttccttatatctaccatgcacacaggacagaggcatgacactactataagtatttctctctctctgtctctttttttttttttttggcaatcctcctgcctcaggatggaatacaggcacatgccaccactcccagctaaattttttttttttttttggtagcagctgggtctcactatgttgcccaggctggtcttgaactcctggcctcaagttatcctcctgccttgacctccc

SEQ ID NO: 12478 - DNA, 1235 bp, Homo sapiens
actcagaaacttggaatcgttttttttaaaaatgcctctgagcaacccatataagtcacaaagtctgtgtgttagagcttatgcatttgtttttatgagagattttaataaatttaattatttgcttgtccagactatagcatattagctgtttagaagggatggcttgaaaggaaggagactgaaaaacactctgagagcatacactgtccaaggccattagtgtaaggaccgctacccagcctagaggacatcactatactacatcatctgatgattattctttattatgcctctaggtaattaagtaaaggtgaaattgcatacacagatatgtagtacatattttaaaagttttatcttaaattgattaaaactttttaaaaagctttggtattaaaagaggtaaacatcagtttcctcaaacattttattcatgttgaatgcctttttgcaatgatgactgagttgttatcatagtattttaaaacctgtatagtgttttagacttgttaaaacattgctgtctagtgtacatctagctaaaagtgtggtttatctaaaccgttttaataagcaagatgactgggaaatctctgccccttttctgagcagtatgcctcttcttttagaattaaatgaatgctgcacaggtccagatgtgtgttgatgtagacttgaaatgtctccacattttggaggacttcctcagcccttttcattgagggaaaatatatttgaatttctgttttagattgtatcgggtcccagttgattcatgtgtacaaagttatgctacctaattacagaccattacccaaatatcctaccaggctttccatctgaatagtaaattaaacagttgttatcaaaatgattttaaagactatttctttttctgggtaactattgaagtttgtaattaaatgggggctcttactgactttaaattagcgcttataaaataaaaatgtttagttcaagaagagacccaagctgggtatggtggtgtgagagcctgtgagtcctagctacctggaggtgaggtgggaacatcacttgagcccaggagttggaggctgcagtgcgctacgatcacaccactgcacaccagcctggggatagagtgagatcccatctctaaaaaatgaaaaaaagaagagaggtagctttaaagtggtttttctcatgatattcactgtttattattaaagaaaatcagctttcgttagact

SEQ ID NO: 12479 - DNA, 1224 bp, Homo sapiens
catgccatcagccacttacccagtacgatccacttgttcaagtgatgtgagcagcctcgtcatcatgataatgttccagcactttgttgatgatgattctagggtttcatatagaacagcaggataacatggatcaagaaaccagatggaatgtttttgtcatgaaagaatccaacttcttacatcaaaggttgggggaggaagagaagatacaaatggcagtgagaaaagaaagggggcgacgactagccaaggtacaaatggaaaatcatcctcccctaatttagaacctggtgtgtgtttctctgctactttttatgtaatagtaagctgacacagctcaaatcaagaatttagttgtctttcaaatatttcctgacaagttgattctccttatccaaaaagaatgaacaatgctagtagttactgctaaaatatacacaggtgcctagtcgtccccaccctgtcatttgcccttgtttatccaggaacccactgtttctgtaactctgctggtgtttacagtacaggaacaaagagtgtgagctgtaaaatctctctaatcttgattcaaattccagctccatacctctgaagacttgcacttttggcagcttatttagtttccctgaatttcagtttttctagttgtaaaatttggatcatgataacgatttcatggttgtcatcagagttaaattagatcgatgtatgtatgccctcaataaatgttaactattattcaattattaaccatttaactattcctacctgtcaacataggctttattttcaagttcagagtctaaatttcttttaggtctagactgacttttaagagtaagattggggcctatatgcttaaattagtttacattgtaattctagcattatctgcttaacctctctccatgaaaagaaatttgactaaaatcattttgtacattagttgtatgtatcaagggcataaaaatgaaaatttcaacccagatcaaataaaaataaccccttctcccctctttagacaaatctccttaataagcatatatccagggaatactttttagttaacatggatcattctgtattattattgaactcaagaatttaagagctagaaagaacccttgggagagtctgacctccagtgtttacaagggaagaaatggagacagacttattagaaatggagatttggtgacttattgatgagaagatagctgc

SEQ ID NO: 12480 - DNA, 1224 bp, Homo sapiens
cgtgacctctgtcatcctgtcagttcatctaagttgcagaaacaaacccaatgtgggaatgaggggaggcttagaactaagcctttcagtattttaaaaatattttaaaaattattattgaatagtcctgggagtttggtagtttaaggatttcatgtcaattttaaaagattatttttggaatcataatgaatttaactgtggcctttcttttaaaaaaatattattgtgttctagatgatgtattcatctgaagagtataagaagctcattatttctttgttttaatatcactcattagcacagaaatgaaaatgtcatataattcaatgttttgataaggaatctctgtttcactttaattaactttttgagaagcttatgcatgtcaactgtaatatgttacctacatttatataaaatatatttcctgtttctaaattccttcttctttacacacaaaatttagttgtgaaaactccaaatctctatcagcattcacaataaacagatgtaatcctgtacttacaataatattgtttttaagtgtatcttccagaattttctacttaaaatgaggggaaaaaaaagcaaggaaaaaacttaaggaattcccagaaattgcaacagggtctgcttctgtgctgatgagtggctccttgaggaacatcagccctcttattaatataacatctggcttgcatcttgcacaaataaaaacataagagtgagactgaagtaacagaagagggaagtgggaggatgggatgtgggttttccagcataataatttttaacagccaagaaatctaattagaagaaatgtcatttaatgaggctctggtcaaggtaattccacagaagaaggcaaagcctcatgggaccacaacaaaaacattgaatctgttagataatttacaaaataggtaaatggtatgcattgctgaaggacctcattcaatcaaaaccgtgattatcagtggcttctctggggaccatttatgactttaaccacagaaattccattccttggttaatatgttttgagaaggcctgtactgttctcatctgcacgatcagatttctgtcatttcctttgtgcattgtcagcctggaagacgagcgcatacctaattaacaacagaaacagaagccaattctcatgctgttacatagatgagtggaatggttcctcctctatacgaaacatcatttctaacaatt

SEQ ID NO: 12481 - DNA, 1531 bp, Homo sapiens
tccctctttactgggtttgagttaggtgcataacatggaaaggagtggtgccttcaaatgaatgtgaccactccgtattgtggagtgacttccctagggcatcctatacatcctaccacagaaggccaagggacagagcaccaacttcagtatccaagaaattagatccacaactcttgattttccacactgaggactgtcgcgagtaagttgtaagtttgccgtcttccttctggcttagcaggtgctgcagctgtactctcgactcctgtctgtgagcgtgagctcaggaaatgagagtggagtctattccaaaaaaaaaatgtgatgaagtttttcataaaagtgcattcatatgccaaatcctttttggaggattctggatgctattgttcatttctctactagtaaaatgatcaagccttcatttattttaggctttgttttttgatccattttgttttccctgctgtaatgagaataattgtttggaaatgtcatattctgtatttatgattctctgagaaatgcttttgtataagtcttaggtttgacattgcagtagttgacatacacggtaaaggataacctagtgacaaatcactgaagatgcttcctttgttacctcaaaaaaaaaaatccagacaaaatagcatttataaatatagaaaacaggattggctgttttccaagaacttcaagttaacaattcttatgcaaggaaaagttcttaatgctaaagacttgttctgcatgaaggagacattctttaataatggaagaggtggttttatttttactacaagccgactcatatttccaaacctataaccaattgctgatctcctgtgtaaagcatttttttccttttatctgaaacagtgatttatatgaactgttggaataatggaacctcaaactacagatgtgtatgtaaaattgcataaatgcactgacttccttctccctgactatatttttaataaacagcattatcctacatggtcagttttattaaattatacacaactagagggttcttctaagaagtgctatgtgcttgcgtgggtgacttttggaaagcttcctattttggtaagtaatgcagtgagtgaacttagctttttttggaggcagatagtggagaacgctgtagaaaacaaatacacttaaaaaggtggccctgctacctgcttgttggtggagcatttgtgtaaggtatccctatgcgccggcaaaatagtgccattggcgttgaaaatgtgcacagacaatagggcctactggttggaacactatgaagtcatcgtgcttgactttcaagactggctcttctgcccttagcaaatgtccagtctatttcactgaaacagaaaaagcaaagtagaattgatttacaaaagtgaaagatggatttttgttagaagagtgatgactgaatttaattttatttttaaaggtctgtgtacagttacacaactcacatacgtatatgcacatatacacgcacacatacattgtcttgatacaa

SEQ ID NO: 12482 - DNA, 3010 bp, Homo sapiens
actcttgtcacccaggctgaagtgcagtggcgtgatcttggctcactgcaacctctgcctcctgggctcaggcgagatcctcctgcttcagcctcctgtgtagctgggactacaggcacaacacagcaccatgtctggctaatttttgtatttttgtagagatagggtttctccatgtttcccaggctggtctgaaactctcaagcgactggctcacctcggcctcccagagtgctgggattacgggcgtgaaccactgtgggtattccattttaaaaatcagaagacataaagaactgttgcctccatgttatacagcgagtttttaaatgataaattaaagcaggttccttgcacttaatgtatattgaatgtgcaattgccaagcaagaaagaatatcttgtgtgtaatattgtacggcaaagcagtggaatgttttctgatagctgatgttttttaaaaacttaagttccttgtctttctttttctcttaatcaggattccggagtttgaatccacctttgacaattgtccgaaagacgtttgaatcaacagaaaacccagatgacttcttgccctctgtaatgacttgtgtgaactatcttaagttgccggactattcaagcattgagataatgcgtgaaaaactgttgatagcagcaagagaagggcagcagtcgttccatctttcctgatcatagcaagaaatgcagtgtctgcctgttacagcaaaagaaacaaatcatgatttcttttctaatgttatcacctgagtcaaggaaacatgttacgccttcttgttgtaggaaaaacggcttgcagattataaagagacatttggttgatattcattaatggccccatggacttaaagtgatcaggccctaaaacgttgttgtgatgaggtttctttagcaagttcttgtttaaattatcatttatttgatgagtgaagtttttaacatgctttgctgtgtgaaatttaaaaaagggatgtttttccaggctggaacaataaatgtggctgtgcagtttaattctgggctgtgtgtatccatctagctaagtctgcagttttctttcctccaaagacaactcttgtacataagtacagaaatttaagctcacatgtatttgacaaatatagtttagtagactagctctatgtgcttttcactttcctctgattttctctccctgattcattattatctgtgcagctcacagttttttttttgtatacaactcacagttctcaaattttcgttacccatgggcttctgttgtcccatgttctctccagttaagatctaatttaaaattcattggattgaaatttattgaatataattcagcttttgtaactaggtagacttttcttatagtttagttttaatatagtttagggtattactggctttttcccaggtgacacactaaggactgtttacatggcaattccagcagcaacagcctctggaatgagacaaggaaagctcatttgtttcttttatgaaggttaagaagtctacagcttgggctggccggtatttattattctgtggccagaggattttaaattaatgtaaattttttaaacaaaataagcagttttccttccctgttggagtaaaaaaatttttttccctttgttgttttacgtttttgttcatagtcttctttattccacgctcctcttccccttctcccagtgctgacttgggacaaaacagttcagcctttgtctcgacgcagataaaagcacctgtaagcaatgctgtccagtcattttatgtgctgatttctcaaatctgcaataatccatcaggttaatgtttttacctgaaaataaagaaagtttgcttcacctttttgtttatagttttgtgctgtatgcataactttcaattgtatagatgtatttcaatgcaaggaaatccacatatctccatgattcgggtcatggctgattttgctattcaaacaatttataatagcaacttgaagaaactaaaatgtgaagagaaaatgggaggagattccttcctaaggtccaaaactaggcctgtggcataaatttgaaggaattttccataattcatctccttgaaaataagagatgagctagtttttttttttaattgaactttgagaaatcaatttttttgactgttctgtaagttttaattaattgacacaaaagcccttttccctatcccaccacccaaaagaaactcagtggcttgtttgacatagattgctgtgtcaatttacacttaaatggccttatatggaaatgtcccctcctgagagttcacttgggcagtgaccccattaagtggaagggaactgtcagaggagttgggggcagagaattctctccctgtctctgcagagactgacaagtgaatggcttttccctgaaatccaagaagggaattgtgtttctgcagttttcaccactaacagcacagttgctgagcagcttcatcaagtgaagttaaagactgaaacaatttgttttcaactgttctgatatcttcctgcaaattaagcacaaggatttttgtgtgaacatagcattttgttcctgatttttaaagggttctgttaaaatttagacatgtataaacaaaataatgtttcatctgtacttgacattttatccatgttgcagccctggcaaatttggcctcattgattccagcatctaataagtatatatgatgattttgactcaaactctaaagtcttgagtgtttcaaagtcagtcgttacctgtttaaaagcctcagcctttagcttattcctccttcaatacacgggacctttggttaatttggggcaggaaaactcttaaagtaatctctcttggcagaggccttattgcaccagagggaaaaagtatatacttcatttgctgttactccagttatgccttaaattcatttgcttggtaatcctatcaacgagcactaacttcttagtatactttaaacacttagttgg

SEQ ID NO: 12483 - DNA, 1072 bp, Homo sapiens
tacaaagtgtaaagacctacccatttgctgtgtcctagttcagcttgcttctcccacttctttctccagctcaatgttctctcccttggcatctgttactgtatacctttgtgtttctgaaagccaggatttataaaatctccctgactagaagcagattatccatttaaagcacctaaagtaatgagaagaaaggaaaactgaaatcaagggtcatcaggtgtttttggtttgagaggaagggtttctcaggaaccaagtccctgcagatgggcagggtacttaatagcgtacagctaaaaaggaaatggaatctctaaattttattttattttattattatttttttttttttggaaagaggtcccaagcagaaggttttagtactgagactgatactcttttatggtacacgtagacctttattttcactcacgtaaacaaatgtttccttagtaattctttttacccttatttaaactcacagctggatcagctcctttgtggcagtaaagcagacacttgggatgcaaagacactgatggaatgctgtaggcctgatcatggttatactcatgacaggtaagtactggggtctgccagtttttctgttgattctgaagaatgtggagaggggtgtgtgtgtacacacacatgcgcacatgtgtaaacaacaaaagttggagtggttcattttaaaatgtgtctacctgttaatggatgcttacttctgttttggccttatttctctgaagatgggaaattaagacccaagggtttctttctcaagtatttctgtgaaaatactaggggttggggaagacagatttaatcttgttccccattattacatatagtaaagcagaaatatctgtacagtaccagatcaagtcttacttattacaactgtaatcattccatttgaattctagtctagtcataacagaaacgaatttaagtacattgtaatggaaaatgtatgtgtaatttaaaagtgctaatctaatttttatgtcatgtgatgcgatgcagtgtgattaaaactctattttaacctgatgaaataattttg

SEQ ID NO: 12484 - DNA, 1085 bp, Homo sapiens
ttaatcactatcactagatagtatgttttttatatttacgatttcccaactgtattattagtattggctgtatacttatacagtattggattcaaaattagcctagaatttatgaaaagtttgtctagttctagggtccacattcttaaaattaactaatatgcaacctattatgcacttactgtgaaatttgatttgcatatgcttaaactgagcagcagcatctcataatgaagaagcacttcagctctcttttcttatgcttacttcctttgtaatctcagtgactctttcatatgtagattatgaccaggaaaaaaataaagaggctaagagttgaacccatcagctttattaggatagcttatattttattaggatatcttttatttttttaaacaaccgtaagttaattttgcttgacaccatttctcccccatttgtgttttttagaccaaagagagtctacagtatgcattagaaaccttgactatgaatggctgctcagttgaagatctaggactggatttcactctgccagggtttcccaatatcgaactgaagaaaggagggaaggatataccagtcactatccacaatttagaggagtatctaagagtatgtaactgtgtctttggggggtaggccagttgtgaagacggaggactttgcctgattgtaccttgcttctggctgcacacgctatggcttgagaccttccacatccccaggaccactgcatgaaggctgctttacaaggcactagcttctctttgctcttgagtgcacatatcagatatttcctgtcttatataaccttgaattatttctcctcaggcttgaatgctatctaattacaccacgttttcttagtttaaaaaacaagtgaaaagagacattatttgtgttctcactaaattgcatttttgcatttccatcaaggcagctagcttgacagaatttactccaggcaccgtgcagtgcacacttttatgtttggtgacacctttcaaattactaacttatgggcgaggtgcagtggctcacgcctgtaatcctcccagcactttgtgaggcagaagcag

SEQ ID NO: 12485 - DNA, 1131 bp, Homo sapiens
atagttttacagcatacttaagattatgtgcaatctcttttctgaaacccctggagtttggtcggtttcaaaggtcctacagtgtgtagtacattaaaattcccagcagtttctgaatagcactgtatattatatgcattaaatatttttatagcataacatgaatattcttactaaaatcagataaataaagactgtaaatagccttatgtctgtttggatcagattttgccaccaagtgacttgtgttttcagagcctttggatgtagagattgtgaatacaggattgtgggctgtacaaaacagttgtctttattgaaataattgacgtggtaacatcgttcaaaccaaatctgccataaaagataaagatgaatagacaaattattctcttttataaagctgcttattaaatcttctctttgaggagacttttgttttgaaaaggctttgtttaacctgtttgtttatttataactttagcttcctggagaagagcccattggaagagtggaaccagtgggtaatgcacctttgttggcattagttcacaagatgaacaactgcctcagccagatggaacaatttccagtcaaagtacatgatttccctagtggaaatgggacaggaggcaggtaaggaccattgcctggctatacccttgccactggaatttggtacttaatttcactgaagtaagatggcaagaggtctggtaaagtcttgattggcccagaaaacattcagctgtaatgatgaaagaaattaagcactctaaagaatgaatcaaatgctttcttatctttaaaattataccatatgccttaaacaggatgctttataaatatataatccagtgattgtatttgtaacttgtaataggcttagttttccttaaattgatacacttcagcatacaaaacttccttaagaactttatgtttaacttcagtagggataaaaaattttttgtggctgtgagtaatgtttacattttgagcgatatgatttatatgtaatattagtggctataactttgtattttgatggggtcaaatgtttgaagttttactagtttaataaatatatatatttttaatgtagttttaaggactcttgaggtgctacag

SEQ ID NO: 12486 - DNA, 2256 bp, Homo sapiens
gtgtataaaaataattaagtgaatggatttctgaagccatcagcatttgtaatttaagcagccgggtcttatttgccatagcttattacatccttaataggcgcatgtttctggtctgtaaatctttacttcagctctccaggaaacacaagttaaggataatgcagatatgtatgtactttaggaagtaaagggaacacttaggaaagtgttatattgcagggttccaaaaaattattacactttgtttacaattcatgtaatgacctgcagtgtattttaagtttttaaacagttctccaggtggtacatcgtagcccattttcaaagtgaaagttaatttggttatggaatctggagtttttaaactgtaagcatagaccaggatgaattttaaatgtagcagctatttgccttgatcagaagttatatcctttctacatacactgggactttaatatctcctttttgtttcttgtagagaaaaaattaaaggttggattaaggagcaggcacataaatttgtagaacgttatttcagttctgagaatatggatggaagcaaccctgcattgaatgtccttcagagactttgtgctgcaaccgaacaactcaacctccaggtgctgtgtccagtgcattttgctggtctttttcagtctcttcccagcatctcctgctactcttttccttcatgactctctagcttcctatggatttagctatcctacatcgacttttaccttatatacacccttggtgctggcatttcttttacttatcccttgactatcaggattcatcagtctgtattaaatgtactagaaacctcatctttgactttctttccttcacatctcatcattcttgacaaatgaagaaacttcagaaatgtcctcacaagcacatctgttttctaagtcatcctcaactataggtatagatgataggccttccttagcccctctcttcacatggggtctcagagtggcaggagaggctagaggtttactaataagtgttttacgtttcatctggttctcagtttttgttcttatttttatttttatttatttatttattttgatgtttttgatgtaccttgagcagttttggtagtatgttttccaagaaattgttcattttgctgagaccttaaatgtattaatttaaagccacaccttgtattcttgattcatctttccattctggtgttatagccccttattcttcagttttctgttctcatcttttaaaatactcttttttaaagaaaactacattggttgaatatgaagattttcttcttatgttattatggattcctggttttcctcatgaaatatttagtgtgtgtgtgtgtgtgtttaaaatcataatttccaaggatttactaagactgtaccactcccctgccctcttttttaagggcgttgagaatatattcatttccttttgaggatatgtgagttgtgtattttttaagtgctgcttaaatcaatatagaaatacttttcctaactctttcaggtggatggtggagctgagtgccttgtagaaatccgtagcatagtctcagagtcagatgtttcatcatttgaaatccaacatagtggatttgtgaagcagctgttgctttatttgacatctaaaagtgaaaaggatgctgtgagcagagagatcagattaaagcgatttcttcatgtatttttttcttctccagtaagttatctaataatgcctgtgtatcttttaagaatcagtgctcactaatgcatatattttcatctcagtaataatttccagcaggtcttggtcaagacattgagggaaaacttctaggttttcacatagttggaatccttcaacttctgtatatcaaagtaaatagtaaaacaatgaaatggggatttaacaaagcccatgtcactatttctatgattgaagtatcttgagtcttttttgcttgcaggatgagccattaatagtagtctctcacctgtgaatgtattttacttgcaatatttgtttttaaatgtattgaagtttgtattagttccttttagtgaaacagacatctataataagatagaggagttatattttcttgttttgtacataaaatacagttgtaacagttccaatcaagggcgcttaatgaccatttatgtcaccgtttataatgtggattacaaagccacagagtggctccccttccttcactcttaagtgggccagagcaagagggtaatcctt

SEQ ID NO: 12487 - DNA, 1532 bp, Homo sapiens
cttaagctgctaagtgacttgcatcctatggtgggttacatgttagagatagtatacatggatgtaaattagagaaaatatgtagaagataagttattgggaaagaacttaaatgataaccttatggtaactatatatatgttcccagctgcaagttattcagtgtattgatgtggcagagcaggccttgactgccttggagatgttgtcacggagacatagtaaagccattctacaggcggtaagtgttgttactgaaggggactacatttcactttatgtagaatttttaaaatccacatttgtacaggctacttgattgcagtttttgtaagatacaaatgttgtttccagagtaatgtgctagactttttatgagttaaattattttttattgctgataaaggatttttctttaccttaacagttttctatattttagggtggtttggcagactgcttgctgtacctagaattcttcagcataaatgcccaaagaaatgcattagcaattgcagctaattgctgccagagtatcacgccagatgaatttcattttgtggcagattcactcccattgctaacccaaaggctaacacatcaggtaaaatatgcatctattttatgtgccataaagtgttttattactaatttttttaattttatattttattttattttatttttttgagatgggagtctcgctctgttacccaggctagagtgcagtggtgtgatctcagctcactgccacctccgcctcctgggttcaagcgattctcctgcctcagcttcccgagtagctgggattacaggcgtgtgccaccacacccagctcatttttgtatttttagtagagatggggttttgctatgttggccaggctggtcttgaactcctgacctcaggtgatccacccacctcagccccccatagtgctgggattacaggcgtgagctaccgcgcccagccacttttttaaatgacaatttcaattagtattttaaatctttaactgcatatataatcgaaaatgttctgatattttttatttttatccagttatgtgccatattaggttattttataaaattttggtagatttattcaaatgaatagtaattcatatgtttgatgactttaacaattttgacttttaagggatggctttgttatttcagcaaacattgagtgtttactctgtgatatgatcagaagttccttctgaaaagattactctttcttgagaggcattggaggaggcagatgggagcaggagaatatgggttaagaccagaagagagactagactatgtcccaaacagaaatgaaaaatgtagtttgtggctatctggggttggagaagagcaaaagtgattatctaggtggcagaatcaatggacctgatgataacagtgtgaaaagcagggtttatgggccggggatggtgaggacaaattgtgagtacagcttcaaggctatggagaaattgaatttttttttagctacagagaaatattttaaagcgttgt

SEQ ID NO: 12488 - DNA, 1199 bp, Homo sapiens
gtgttcaaatgattctcctgcttcatcctcctgagtagctagaattacaggtgcctgccactgcacctggctaatttttgtatttttagtagaggcgggctttcatcatgttggccaggctggtcttgagctcctgacctcaggtgatcctcccgtctcggcctcccaaagtgctgggattacaggtgtgagccactatgcctggcctgttttgttttgttttcactttttggaactaataaaaatcatactgttttcatatggttttataggttctgatgaccaatatctgattgggaaataatgtcatacagaaaacagagcaagggtgcttaacatattagctcttcaaaatatcaaaatatttaccttagatttttcttgaaatatttacacattcctgctggcactgatttaatatattagggtggtcttgaaagtttgtagcttctcttaaaagtccagaaagcaaagtaacattgactgaatcagttaagcgagatgaatcagttacttgaaatttttagatacatcagttgcatgaagtcatcttagttgttcactctgcccttcttttttctttagctttgttagaggcaaggggtcttccccctcacctatttggtcctcttggtcctcggatgtcacagcttttccatagaacaattggaagtggagctagtaagtaaaaatgttccttccctgaaatccctcaataattagccaactgctattgttacttgtaacctattgatgtaagtattaagaagtttttcatcaactttaacccatttttaaaaataaggctgtgtacaatcacaccttaaatacagctttcattgctgaattatccagattttgtagcgagattgattctgtttgaacaaaataagaataaagaatctcaaacaattacattgataattatggcacctgatggcatgttttgcatagatttgaatcttgagtttgtcataatgatgtatttgtcaaggtgagaggataaaatattaaacagtttgctagctgaattttttataactttaaatatttggacataaggatgttggttttcatgtgtactttttatatatatatattttttttgagatggagtcttgctctgtcgtccaggcgggagtgcagtggcgtgatctcagcttactgcaacctctgcctctcgggtccagtcctcccac

SEQ ID NO: 12489 - DNA, 1485 bp, Homo sapiens
cttttaatcagatattttagtatccaaagtcacatctgcttttgttttgttcttttatttcgttttacagatttgaaccttctgaaaacctatgtttaatactggacttagtaggaacatattcatactttattttttgaaagcattatatatgacagttgtaattatgacaggctgatattaactgttttcttatctaacctcttagaagctgcagttcatcatctgctgtgatagttccacaaccagaggatccagacagagccaatacttcagaaagacaaaaaacggggcaggtgcctaagaaagacaattctcgaggagtgaagcgcagtgctagtccagactacaacaggaccaattctcctagctctgcaaaaaaaccaaaagcacttcagcatactgaatctccctcagaaacaaataagccacatagtaagtcaaagaagagacatttagaccaggagcaacaactgaaatctgcacaatcaccatcaacaagcaaggctcataccaggaagagtggggccactggcggttcacggagtcagaaaagaaaaaggacagagagttcttgtgtaaagagtggctccgggtctgaatcaactggtgcagaagagagatctgcgaaacctaccaagctggcttcaaaatcagccacctcagccaaagctgggtgtagcaccatcactgattcttcttctgctgcctctacttcctcctcgtcttctgctgtagcctcggcctcctccactgtaccaccaggtgccagagtgaaacaaggaaaagatcagaacaaggccaggcgttcccgttcagcgtccagtcccagccccagaagaagtagcagggaaaaggaacagagtaaaactggtggctcttcaaaatttgattgggctgctcgtttcagccctaaagttagccttcctaaaacaaaactgtctcttccagggtcttctaagtcagagacatcaaaacctggaccttctggattacaggccaaattagcaagtaagtttacaaaaaggtatttttctttaattaaagaaagtttctcttggtttgtcaaaagcaattatgctttaaagttaagggttttttccccccagtcttagataatcttagatgtattactgtctgtgtaattaagtacataacagcatgtagtaagtgctactacatttagttttgttgagacaggtaaggaatactaccttcctattattacgaaaccatcacattttagtgtctgtgtctttattggtcctcgcggcatctcctacttcactgatttcctaatatcaggatgggacataaagttggattttcttctataccacatacaaaattatcatttagttaggagttctttttagttatgagttgccatgatcagagatcaaatatatatatgtttttttagatggagtctcactctgtcgcctaggctggagtgcagtggcgcagtctcggctcactgcaacc

SEQ ID NO: 12490 - DNA, 1195 bp, Homo sapiens
ttcatgtaggtttatttattgtttagtgcttgaaatgattttctgtgtaaaatcagtttgagaattggttcgtctgtctctgcatttgctgtgtttacctgaattttaagtacaaattggaaatcggtatcagtgtgggaatcatcaattgtcttttccgtaaacttttaaagccattacagtcacattatgtattaaaagtgtgtttagatctaaagtctaaatttgctttttgttaaaatgtagcatatttgaatatctgcactaaaattgctgaaaaatgtgttactgcttaagcaaccttaacaacgctgtgcaattatgactactggtgataataaactcttcggtattgcggggcgggggtggttctgagaggcaatttctttttgccagattatttagtagaataataattaaaatttataaatatttggaaaaagggtagggtcaacaatgaattgtgggaagctttaagaaatatataaaaatatttcattttcagtattgtatttgcatctcagtttcctgatagatttctgttttgattttctgctgacaggtcacatttagggcaggcaaaacataagggatatagccctcctgagagtagaaaatctaattctaaggcacccaaagtgcagtctaatactacttctgaactgtcaaggggacacctttctaaaaggtaaatcttcatgttgcttatacattttcaaggcagaattatttgcattcaaatcattgcataatgttaaaacttgaggttattccaaaacgttttgatacatattttcattattctctaagtaacttttaggattgacagtttatcacctttgcagtgattagtgcagtataccctagacagtgagtttgtcaatgataaaatgatatttttgtttggagagccgtaagattccccctttgcttaacaaaccattatggccattttttatttctttttattttttaatcttttttttagtttttattgtcagagccatagtttaggtttaagtcagtgattcttaagatttaattgttaagagactttggaaagcaatgttaactttgaagatttgatagtactacaatataaaaatctctaaccttcattttgaaagtgcgtatgttaatgcttatttcttctaagctttgacaaagcagttgtgcttgtgaatagggcatcaat

SEQ ID NO: 12491 - DNA, 1142 bp, Homo sapiens
gaggctccggggccgtggacggcccggaaatggaaactaggaagcagctccagtgacaacagttgtgggaagcgagggtcagagaagggagaggccagagagactttagaccgcagtaaggggtttcctgcccagggggacggcgagggacggttgagggagggcgagcccggagacggggtctgcgcggggcagttttttaagccgtgggaagttgaggctgagggaggatgatgacgaggggggcatgcagggaggcctaaagaagccgagaaacttgactgagaggaatagagtatccttttaaatagatcagaatggaaattggtggtaggtgggtttaactaggacttgggggagggaggtgggccaattgtcaccccaatcgtattagcattcagagcgagtcaggcgattaatttatttatatgtggattacataaaacctattatttacaacgtttgtccatcagttcagcccctctccttccttctccatagtgagtgggtttctagtacaggaacaagttagaggggagttcgaataacgaaggtagtaaaacctcaaatcctgtcttcctcggcgtctctcccttcctcagaataagaaatccttcatttcctagacggaaaaatgcggaaaaacataaaaacacatgtaaatcggggggaaatcacactttgaactcctggtgggggacaggagggaattggttaccttacgtggtgaggagataacggaaggggcagcttccaaacccttaagacaaatgttgtgtttttttgataatgctgttttactttgggggaggtttagcctaagcatcgagtctggtggtgggcatagtttaattgcttctttagttaattgggggagggaatgtgtttgtgtgtaaaggttgggccggtgcggggggaggcgggtacggttaatagcgcagtgaatccgttctaagtggacgtctaactgctctcctgctgtctcctttcctagtcgcggtcctcgatcttgcctgggctgccagatcacccgatctccgggctttactccgttttgtaggccctttagtgatgtgtttaactttatgttcctctcgagagtctcattaggtatttttggcatttcattttttaaagaccta

SEQ ID NO: 12492 - DNA, 1182 bp, Homo sapiens
tcatgttcttcactttcattgtatcaactccatgacactgaatatattcttttttgttttgtagggtggatctatgacatcacgcaaaaatatgatttttccttctacatatgtggtttgctttacatgataggaatactctttttacttattcagccgtgcattcgaattatagaacaatccagaagaaaatacatggatggtgcacatgtttagtatcatgtaatgttccgtgtaggtttcattgtaatactcatgcctacctcgcatggttgctgtgaggcacctatgacaggacgtgggaaagcattttgtacggtaactggcactgtcatttgtaaatgccattgtcacagcctcatttgtaagcagcactgcctctctgtttggggagatgtaatgctggaagatcttaaggactacatacattctagagatgacagtgttgttcaaagacagcctagtaagtaattggtagaaatgcccttataaaaaccattctcttgtcatctactgggactagggttttaaatacagcttttaaaaacaaaaacagggaataaaagcttttcaactcaaccacttctttgtaagacaaaactgaagtatctgtgtgcttccagaaagcttacagataaatgggtttcaagcacaagaatatgactagatttcagaaattaattattacagggagctattgatctactagcatcaaacaaaggcaagctctaattccacaggtaatacaatttagtgcaattaaagaaacacggcttgtatttttatgagggaattctgcagctagggattgtgactcctaaatcctcctctaaaagaaggcacttgccattaatcctaattcagtgctatccagttataaatggaatcttgagacaaaaccttaacaaagaaataacagtaatgatttccttagcagaagccgtatttgtacgcacaacattaaatcaagggctacaattcaagcacttttattcgtatcattggcctcttagatgatataagcatgaggtggggcctgtaatatttttttctgagtttcttctgcccaaaaatataatatagaactaattgctaactgacaaataaagttaatagttaaatcatctccaaggaatgttgctaatccaaagtataacactatcaatttgtgaggataataaa

SEQ ID NO: 12493 - DNA, 1887 bp, Homo sapiens
agttgacatgcgaataaattgatactgaaacttagcaacttcttaaaagtgtaaagaagcctcataagatcataaggaaaatgtatatatgcttttcacagctttctagaattttttgacatttgattttcttgagacttgtaaacctggatatgttgaagggtatttgttaattttacttttcaaagatactttaaaacagtagagctagcaatgacaccttgcatttcatttcaacactgcttcaaggtttcttttgtatataattcttagaatgctcatttcttttaaatggtttaatttgtacagcagaggaatgttattgtagtagtatgtaactattacctaatactgagtttttgcaaaaaacaatgaatgctcatatgtaattgaaatacttcagatcacatgaaaatgctgatttaacatttaagtatcacagcattaaaagaaaaagaaagtaaaccagtcctttgtattcagttacctaatggggtgccatcaataagctgcgatacagccctggagctcagtcagccacaccttcctgcatcctattggccttattcattttaaatgagttaatgaatctgccagatctgtgaatgatagagattatgctaaattaatgctgattctttgtgtgtgtgggaaatctctgtagagcaccttttctttcttagactaagtaacccagtacaatagttgtgaactgaataattaaaactttggcttctcttaggaaaagacgacttcctagtcataggtgtcctatggggaaatttattttttttaatgtcctgttccttaatgctgcaaattatcagtatttataaagtaactgattttgcaccacttttttgttactgtgaccacggcagaacaatgtcttctagactatatctatgtaaagttattagaatggtatctgttcattttagtgatatgaagatcacaactaacaactgacaaatcagagtttgccagttcaaattcagcatggctgcagctgattaagaaattgatatgattattctttgctagcctctcttactaatggaattatatactggccagtaaaatgggcctcccaattgctgtttcagcaggttttaaaccttcaggaacaccagttaggaaaatagctccagaaaatatagatatattttatttttattaaaatggcagtctacatcataattggcatttctcaagactgtctttaccagaatctgtgtgaaataaggcaatctagtctccttgaaaaaaaaatctcttggatgtttaggaaggaagacttggccgtgatgtggtgtcctggctttgtggtgtagtgctgtgtgtatggagttagtgtaaaaacatggattacaccaagtggaagaaacgtcttcttgccaagctcattcttagaacttacacatctagaacagcttccactttggcagtgaggtcgtagccttttaggtggaagaagtgagggtgcagcgtgtcagacacaacattcatgttactcttacattggaatctgaaggtagttcagacttcgtgggttttgtttttaagcaaaacaatgtgaaaacatttaagtttgaaatgttgcatttgaagttatgatcatttaatatattcatattaccaagactattatactggaagtggtttttgtgttataaaggtttaattttacataaggcagttacttaatgtgatttttaacccttaaaaaagtggagatgtatacatttgttaacaatgccatgaaagcattttctttctcctaaggaaaagtgaatttcttatcagaatatctggctggccctgtaatttaaattaaaataaaattttggagaaacagcattgtctgtctttatgatgtgttataga

SEQ ID NO: 12494 - DNA, 1925 bp, Homo sapiens
atcttcacgcctagcccagctgtcagagagctcagatagcagcagcaataacagctagcattagcagagcacttccgtgtgccgggcaatgctgtgtgctctttatgacctcttaagagtgtaagtcattctcatcctcattattatttttgctgcccattttaaagatgaggaaacaggtgcagagaggttaacaccctggaggtcacacagcagggaggtggcagacatgggcaggctgactccagctttcgagctctccccatttctcactgtgctctttgggtgaatctgggtgaatggtgtcacttcctggccctcctgtggctcaggctgaggctggtggtctttgtgactcagccaggatgcagggctcactggggtttttctttttcctcccagggatcaacaagcgtggggccaagaactgcaatgccatccgccacttcgagaacaccttcgtggtggagacgctcatctgcggggtggtgtgaggccctcctcccccagaaccccctgccgtgttcctcttttcttctttccggctgctctctggccctcctccttccccctgcttagcttgtactttggacgcgtttctatagaggtgacatgtctctccattcctctccaaccctgcccacctccctgtaccagagctgtgatctctcggtggggggcccatctctgctgacctgggtgtggcggagggagaggcgatgctgcaaagtgttttctgtgtcccactgtcttgaagctgggcctgccaaagcctgggcccacagctgcaccggcagcccaaggggaaggaccggttgggggagccgggcatgtgaggccctgggcaaggggatggggctgtgggggcggggcggcatgggcttcagaagtatctgcacaattagaaaagtcctcagaagctttttcttggagggtacactttcttcactgtccctattcctagacctggggcttgagctgaggatgggacgatgtgcccagggagggacccaccagagcacaagagaaggtggctacctgggggtgtcccagggactctgtcagtgccttcagcccaccagcaggagcttggagtttggggagtggggatgagtccgtcaagcacaactgttctctgagtggaaccaaagaagcaaggagctaggacccccagtcctgccccccaggagcacaagcagggtcccctcagtcaaggcagtgggatgggcggctgaggaacggggcaggcaaggtcactgctcagtcacgtccacgggggacgagccgtgggttctgctgagtaggtggagctcattgctttctccaagcttggaactgttttgaaagataacacagagggaaagggagagccacctggtacttgtccaccctgcctcctctgttctgaaattccatccccctcagcttaggggaatgcacctttttccctttccttctcacttttgcatgtttttactgatcattcgatatgctaaccgttctcagccctgagccttggagaggagggctgtaacgccttcagtcagtctctggggatgaaactcttaaatgctttgtatattttctcaattagatctcttttcagaagtgtctatagaacaataaaaatcttttacttctgaccttgacttgagtgtggctggaggggagatgggtgtaggaggggtgctccgggcagggtcgaggagctggacctcgggagcagcaggcagggagaagcctgcagaccttgacatctggcccctaaagagctgggcatcctggattcagccaaggagtgtaggatatccccttcgtagcaccctggatctgagccaggtagagttcacactttccgggtgaggaggggaacagggctgggagagcttaccgactcgcccaaggtcgtgctgctttaagtgcct

SEQ ID NO: 12495 - DNA, 1213 bp, Homo sapiens
gggagagcaccagacagatgtggcagtactcaatgcttgagtcactgagagctgtgttgtgtttcctggccagcaagtgagtgtaggcagtaagtcatgagggagtctagtagcaagataagaagcagaaagacttcagcagacacatttggaaaacatagctacttagtgtatggacagttgtatatcttttataataattaacagcatcactttattatagtatactatgttcatgtaatagtgattctgagtaccactaaatattatttttaatccattttttatgatgatgtggaaatatgtaattcttttaagattttcatctaaaatggtttaaaattcttgagtttgtattgcttaagaggtctaaataattggcttcctagattggctaaagaagcaagattaaaataattcaatttctaaataaatataatgctgcaataaccagataacgttatatctttaaactatctctttcagaatgatgtcccaggaatgttagcttatagccttaagctctgcatgtctttaatgcagaataaacagtttcggaataaagtactaagagttctagttaaaatctacatgaacttggagaaacctgatttcatcaatgtttgtcaggtaatgacattaaattatgtttcattacattgctccacgctgtactgtgctatgctataccacttcacattttattactttatattactataatggctttatacatgtatctcagctgatcttcacagcagccctgtgaaaataaggtatgtgctttatattcctttttattaataagaaactaaatctcacaacactaaaaagctattttgttgtaacacattctttctttgtattcttttttcattttgaaaatccaataatttaaggaaatttttagaaataacgaaggttttttaaaaagctagaagattaaaacagtgcctatgctatactatatcattctaaagagaattcaaagtgtataaattatatatggtttcattacccatacacaccaaaacatttgggtatcttttctttatctctttctatatataaatttgcttgcacataaaaaaaaattcagatggtacagaaaatatataaaatgaaaagtaaggcttctctttcccatcatttgggctttttcccaaaggtaagacatagatgtttttccctacttattcacacatgtggatct

SEQ ID NO: 12496 - DNA, 1134 bp, Homo sapiens
cagaaaagaagtaatttttctggggttaagaaaaaataacagtttattataattcattaacaagtacactttgttaagtcagataagtcattttgtggagaaggctaaagtaaataagatactgaagtatttatatgtgtgtttgtttttaataaaaagtggaaatttgtttctataaagactgtgtaagccattgaaaggataaattgaaatgttatttgcatagtctgagatggatttgggcaaatgttataaaacaaagggaaaaaattgaagcatttgtgattttttttttttctaaccagagtgtaactgggtctctttaaaggcttgtcctcttgtttgagttatacaattatatgagagagagccccactacctccttctctcttagcaagtgaacattctggggaaaaggcagtaatcatagaaaacattgtcttttttcttcttactttctctttttgatgtctttgttatgacttacctttacagggtcatgaaaaagaagcattacagttaatggcaacataccttcccaaggatacttctccaggatcagcctatcaggaaggtggaggtctctatgcactaggtcttattcatgccaatcatggtggtgatataattgactatctgcttaatcagcttaagaacgccagcaatgatgtaagtattaaaatggaaaactaaatttccaaaactcaagaatccaggataacatatttgccacattattttagtgactggagattttgtagaatttgcgaatacccaaaacaactgtcatcttggattttttttttttaggtaatttcatttccttcttgataagctaaaattgtgtttctcactcctttaaaccctgcgtgtatttgtaaaacatgttgttttcccacactttcatcttaaaatgttacaactacaagtgaccttagttatcatctagtctaggccctaacattttactggaaattaaggcctaaagaagttgcagtctctcagaagttagaatccttgcttgttttgatctttgataattgtttaaaatgtaaatcttttggaaaagcttactaagtagccctgttcttattttaaggaaccttaaaatgtaattttacactaacttctata

SEQ ID NO: 12497 - DNA, 1234 bp, Homo sapiens
agtttctacctatattttgtagcctcttaaaattccgatggatttctctagttgaagaggaagtgaattttgctccatttgtcaaagttatcttttaaaacaagttttgtgatatataggctttctaaaatggtatatcctgtgtgtccactttcataactgacttttgcaaacaggaatttattagggtgatctgcttactccatactgcttggcgataatatagaaaaaatgttatctaaatgtctcctttgaaatcactgtaggatttgatggtacattctgtcaaagtttaaaaggaaaacaaccctaaatatgaatgtgcgaaccctaaatgtatgaatgtgcttccacataaagtatcctttttaccaggtggtttaaaaaaatgctatcagaagctaatgatttttttgatagtttatgcaaaaagagtgctactttcagttggatgttttactgactttaaaaacataactctctgttaacattttactcgttacttgccaggggaagcagctggcctggccctaggtttggttatgttgggctctaaaaatgctcaggctattgaggacatggttggttatgcacaagaaactcaacatgagaagattctgcgtggtcttgcagttggcatagctttagtaatgtatgggaggatggaagaggctgatgctctcattgaatctctctgtcgtgacaaggtgagatcacatacgtccctcactgtccatttatctccagcatgtaaaaaacacttaacttcactggaaattaactctgttcccatcagaacatgtaggtacacttattcataaaacttctggcaatgtatatgaagcctaatagaatttaagaaataaaagcactgattagaaaaggtacatgggagtaatttgaggattttaaattttgctatagcttcagatcggtgatactcataagcagattcagcatagttctttaggaattcacgagttgatttcttttagaaataataatttttgggccaggcgtggtggctcacgcctgtaatcctagcattttgggaggccgaggcaggtggatcacttgaggtcaggagttcaaaactagcctggccaacatggtgaaaccctgtctctgctaaacgtagaaaaaaaattagccaggcttggtggcggacacctgtaatcccagctacttgggagcctgaggcatgagaattgcttgagcctgggagacagaggtt

SEQ ID NO: 12498 - DNA, 1168 bp, Homo sapiens
aaaaataattgctaaagcaaaaatgcagaagtcagaatttcttcattatcaaggcttctttatcagtttattattcaactaaagtgatactgggggatttaaatctttcatgtaacttaggaaatgtccaggaattactataaatgacttttgtcttctggaacaaaatgcaaagtaaccaagaaataggaaaatagatgtagagcagtgtgctacccccaacatggctgttcctgccatggaggaggtaccagagaataactggaatccagacctatggctgaggactcacttatactgagaaaggagtcccctttctgtacatatattctctgaatattgaagatcagatttcttctatcaataattagaactctatgaaagatttttaattctgcaatttatgttttaaatgctcattgtttcctataactttttcaaaaacaacttggttaaaactcttctgtcttaacttaaaatagattacctataacagtggcttcgctttctgtttcttatcagaacccctgaacagtgcccaagtgttgtctctttgttgtcagagagttacaaccctcatgtgcgctacggagctgcaatggccttggggatatgctgtgctggtacaggaaacaaggtaaagcccacagccaatggggtcagttctttcttggcgccagactgttttccctcgccgcagaatttatgtaacagctgtaaaaatacaagtgcaatgtgatctgtaagagtaaacttgccatacaaagcttcccagtactccctcattctgcgatgctggattgcccaaagctgcttaagaataaatcgtcacattacatggatagctgtaactgaaacagtgcttttgaatttctttttgaaatcattgatttctgggttttttgtttttgttttttttgtttgtttatttgttttgaaacggaatttcactctttcatccaggctggagtgcagtggcgcagtctcaccatgttggccaggctggtctcgaactcctgacctcaggtgatccacccgccttggcctcccacagtgctgggattacaggcatgagccaccgcaccaggctttttttctttctttttttttttttttttttttttcttttgagtcttgctctgttgcttgggctgaagtgcagtggcag

SEQ ID NO: 12499 - DNA, 1204 bp, Homo sapiens
ttagtttgggccttagagaaaggcagatttatactaaccttcctattttctaaacttacttttgaaaattatctttcagccttgatagtttcctaagctttacccaacttgcacagtacagcgtaggctatcatgatcactcagtctgtctgagaattgaggtgactcacgttagctcccatcaagcctttggcaatacctcatggaaaacccttgattacagctttcaaggcagttaattacaaaatgacttagaggtttatagctggaaactggaatcttgttagttttcaaaggggtaaaatattcagtccattaggagtttggaaactataatctgtcgtggcacaaactggtatattaggactgcagaggcagggttggggcctagttttagatttcaacagttaatagtaaagaggaaaaaaaagaatgtcttgaaattaagaatgaccctagctactactgttctttcttccctttcccaggatctcacttgcttatctgaagaagattgtccaggctcatattgggaatgcttatgaggaaattcatgccgagacctgctattcaatgcatgtatcgttgcctctgcactgacctgaagaaccctgtctccaagtctttggttgaagagaagatatatgactgttgagtgtgctctttcacagaacttggttttcaaataaatataagatctccagatggacaagacatttgtttttcagcctgggtttttaataaatgtatctaatcctccccacaccatgaaatgcctaaatcccaagagccagagtcttgatttgctaggatgagtatgcacgactttcatattgatgaaaaagtcaaactattcttaaattatagaccatgaaaataatggaagggaaaaaaatcaaaccttgctcatcacccccaagaattctctacagttttgttgtggttgtgggttgttgtttaatatggggtctaatcagccagggcaacatggtgagacccccatctctacaaaaaaattgaaaaattagctgggtaggccaggcagggtggctcacgcctataatcccagcactttggaaggccaaggtgggcagattgcttgagccaaggagtttgagaccagcctgggcaacatggcaaaaactcacctctacaaaaaaaaaaaaaaaattagacatgcacagtggcacgtgcctgtagtcct

SEQ ID NO: 12500 - DNA, 1136 bp, Homo sapiens
cggtgggtttacctggtgatgcgggtgggtctgagtggtgtgttaaggaacagtgtttgctgtcattgtccacatgggcatggatttcatatgtggctgtgctgtcataatgcttacgaggtacaggcatcctctctcctggtgagtgattttctactgtattcccagcagtttatattctaatttctatggagatttaataatttctgtaatcaaagctatattcctaaatacctcaagtttttgaaacctcatcaaaataaagtttatttggcaacttagtatgtaggcgtgtatgtctaagagaacatatatttcagctgcatattagaccctatattagaacataaatttatttacttatttattgtagagaaagggtcttgctatgttgcccaggctggtcttgaactcctgggctcaaacagtcgtctcaccttggcctcccaaagtgctgggattacaggcgtgagccactgtgtctggccagaacacacatttaaacttaggtagtggaaaagagtacgtctctttgtggaaagcccttttgagtgataggttgaatttagcatctgtagtcctttcccagatggggctggagatgggaagagaggagaaggctgaaatgtgaagctgctgcggtggctgagctttgagtgcagagtaaatgacagaagggcagcagaggcaagctggcatttgaccccgtgcattaatgactgccctatggaccaaggtgaacacatgagaatgtcagaacaccaacggtggggacagtggtggagggagcagcaggaccatacattgtggtagccgttgttggaaggctcttcctcaggttatcactcttgcagggaagatcacaggagattttcattttctgtttgtatttctgtttaagtctgggggtcaaaagagggctcatggtataggtcaactgagatgtgtttgtaagaacaggcttagtctatgtacgagactgtgaaggccatgattagtagagccagtgtgggagcaaagccccacattcacctcctctggttttctcattgagggccaagaggagatagaagccccgagaggggaactgacttgcctgggatccacatggagtagtgacacagagcgagcccagg

SEQ ID NO: 12501 - DNA, 2306 bp, Homo sapiens
cactccaatcctgtgttttagccccatttgggggaagaagaaatcgtggctcagagtggttgtaaaccactcattcagcttgtaagcgtcagggcctgattccacagtgctccttgaggagagggcagggtgggagaaagaaagggcagggtgggagaggaagcgggaccctaccctgacagcttagggactccgggactgagcctgtgcccaggtccacttgcccgtctgggaccacccagcctcccaaggggggcgccaggagagccctgggctcatcttttctctctcctctgtactgtccgctctcccccacaggaagaaaaccgtctaccggagtctgtgcctggccctggccctgctcgtggccgtgacggtgttccaacgcagtctcacccctggtcagtttctgcaggagcctccgccacccaccctggagccacagaaggcccagaagccaaatggacagctggtgaaccccaacaacttctggaagaacccgaaagatgtggctgcgcccacgcccatggcctctcaggggccccaggcctgggacgtgaccaccactaactgctcagccaatatcaacttgacccaccagccctggttccaggtcctggagccgcagttccggcagtttctcttctaccgccactgccgctacttccccatgctgctgaaccacccggagaagtgcaggggcgatgtctacctgctggtggttgtcaagtcggtcatcacgcagcacgaccgccgcgaggccatccgccagacctggggccgcgagcggcagtccgcgggtgggggccgaggcgccgtgcgcaccctcttcctgctgggcacggcctccaagcaggaggagcgcacgcactaccagcagctgctggcctacgaagaccgcctctacggcgacatcctgcagtggggctttctcgacaccttcttcaacctgaccctcaaggagatccacttcctcaagtggctggacatctactgcccccacgtccccttcattttcaaaggcgacgatgacgtcttcgtcaaccccaccaacctgctagaatttctggctgaccggcagccacaggaaaacctgttcgtgggcgatgtcctgcagcacgctcggcccattcgcaggaaagacaacaaatactacatcccgggggccctgtacggcaaggccagctatccgccgtatgcaggcggcggtggcttcctcatggccggcagcctggcccggcgcctgcaccatgcctgcgacaccctggagctctacccgatcgacgacgtctttctgggcatgtgcctggaggtgctgggcgtgcagcccacggcccacgagggcttcaagactttcggcatctcccggaaccgcaacagccgcatgaacaaggagccgtgctttttccgcgccatgctcgtggtgcacaagctgctgccccctgagctgctcgccatgtgggggctggtgcacagcaatctcacctgctcccgcaagctccaggtgctctgaccccagccgggctactaggacaggccagggcacttgctcctgagcccccatggtattggggctggagccacagtgcccaggcctagcctttggtccccaaggggaggtggagggttgaggcctacgtgccactgggtgtggtggggtgcaggtagccagaaagggacctccctgtgtggataattctaggaaactgaggcccaggaacggttggagctgcccagtctggaggccctctctgaggagcgaggcgccaggccctggcagccctcctgacctgggtccgttgctggccccctcagatgtggtgggaggtcctggtgacctctggaggaacgctgtgctcaggtacctgggctaggcctggcctgatgggtctgtggccgcccctcgtcttcacagggaagagtcttctgtgaaatgcctcagtctccccagaggccgggcggccctggcaggagaaactcaaccctgtgcgggctcacaggcaccccccagtccacaccctggtctcctgggagagagggcccagccggctctccgcagccccaggcctgcctggagacgggccgcctctgccacagggcctccactcctggctgtgtcctgtaaggtctggaagggcgaccgctctgactacctcagcgcccctcagaatctccctggggctgcagccctaccccaccccgacacagggcagaagagcagcgctcctggccccccgaagtcccagagctgctgacccccaccccaggcaagtctctcccgcagcccccacacccccaggcctggc

SEQ ID NO: 12502 - DNA, 1112 bp, Homo sapiens
gatggctccccagcatgtacagttaacttgggacatgtgtagtaggtgctttttataatgggcaatttcatttggtgttctaggtttggttttgtagacttcaacagtgaggaggatgccaaagctgccaaggaggccatggaagacggtgaaattgatggaaataaagttaccttggactgggccaaacctaagggtgaaggtggcttcgggggtcgtggtggaggcagaggcggctttggaggacgaggtggtggtagaggaggccgaggaggatttggtggcagaggccggggaggctttggaggtaaggcacgcagagataatgacaccacatagcatgtgctcttcagaccctgtgccctgtcacggttcctaatcactggggaggaggagctttgtacccattcttttaacagtgtcttgccttcctcctgtagggcgaggaggcttccgaggaggcagaggaggaggaggtgaccacaagccacaaggaaagaagacgaagtttgaatagcttctgtccctctgctttcccttttccatttgaaagaaaggactctggggtttttactgttacctgatcaatgacagagccttctgaggacattccaagacagtatacagtcctgtggtctccttggaaatccgtctagttaacatttcaagggcaataccgtgttggttttgactggatattcatataaactttttaaagagttgagtgatagagctaacccttatctgtaagttttgaatttatattgtttcatcccatgtacaaaaccattttttcctacaaatagtttgggttttgttgttgtttcttttttttgttttgtttttgttttttttttttttgcgttcgtggggttgtaaaagaaaagaaagcagaatgttttatcatggtttttgcttcagcggctttaggacaaattaaaagtcaactctggtgccagacgtgttacttcctaaagagtgtttcccctggaatgtcactggagagcatggcaaagccagctctgccacttgcttcacccatcccaatggaaatggcttagtgcgtgtttccagtatcccagccctaactaacttggttgaaatgctggtga

SEQ ID NO: 12503 - DNA, 1128 bp, Homo sapiens
aagggtatgttctgtctattgaaatgtaagggttttattaacattaatgcactttcctgctttataaaagaaatattggtttgatttccttaggcgtgtaatcttggacagtttaacctgtaagtttgtgcctcagtaacccatctgtaccatggggataatgtactcatagggtgattttaaaagacaagctaatacttacaaagaagcaagaaatgtgcctatcttacaataaatactttgtaagtagtagcagttctttcagtgaggtgaggttactatgaaaaaattccaagtatttgtaaaactagtgggaagtaagagggaagctcgagttttgattgaaaagtggcataaaactaagggcatttattgtactcagatctgaagcaagttctgtgttgctgaggtaaaagcatttgtgttaatatggttttaaaaaccatgagttcttctccctccattgcaggattgcttatattgaatttaagacagaagctgatgcagagaaaacctttgaagaaaagcagggaacagagatcgatgggcgatctatttccctgtactatactggagagaaaggtcaaaatcaagactatagaggtggaaagaatagcacttggagtggtaagaaattaggcttgttacaaggtttcagaattggtggagggaactcctttgtgtctttgtatttcataagtttataaatactttttaatcaaagttactcaaatgtaggtgaagatcaaggacatgataccccaagtcatactcttatttggaatagtaatttccaatcttgaatgagagctctaaaatcattttgcattggaatacagtaggcaaatcaagcttcctttgtaggcatgttttatactttaaatgacttgaccatgtgcgttttgaactcagatgattctaggaaaacagaccagtcatcagcctatgtaagaacaaccagcaggacattgcaacacgtactaggtacttaatatgttgagtaacagaaatggatttagcttacgtcatgagtatttgtatattaactcaagcactgaaattcttaggaataagatattactgttgtgaccgaagctgggaaccactgtttcagagtcttaggaatgt

SEQ ID NO: 12504 - DNA, 1166 bp, Homo sapiens
ctctcgaagtgctgggattacaggcgtgagccaccctgccagtaagttttaataatttggtgttaggtgggagaatcgcttgaacctgggaggcagaggttgcagtgagccaagttcgcgccactgtactccagcctgggcaacagattgagacaccgtctcaatttaaaataatgtttattttcttggaagtacctgaaactattagacctgtctagtcatcatagtgaatacttttatccagacaggattctcctgtattagtgcttataggtgttcttttgtcagctgctactgtgaattcttataagcaatttagctccatgatgaagacctcaaacgtgaatgtgcatgtcatatcttcatgctgagaccttgttctgtagctgcagtttgcagagccttgactttgttttgctaatactaggggtgctttttaaaatgtgatctttgtttgcaccatcacatttgtctagaatacatattgtggattttgatttgtgttttcacctgttgtaattttgccctcctctccaccttgaaggaaatttggttatgtggattttgaatctgctgaagacctggagaaagcgttggaactcactggtttgaaagtctttggcaatgaaattaaactagagaaaccaaaaggaaaagacagtaagaaaggtatgtaaggctttatgagattatgcaatgaactcaggagctagactgctagggaaaatgctttgtaacccatttcccttggtttcctcttatttttttaaatcatttttttcctttggtttcctcttaatgtgggaattaaatgagctacagtgtttacaagagtacttggcactgcttgtcagtgttatagtgtaaattcctgagttaggcaagcaagagcacttttatacagaacaagaattattagatgcacctaaattaacgtaaagggatctttcttcactgaaactagattaggtccctaattactccctatatacagttgtaatgttttgaattggtacattcactttttttgttatgcgcgtctactctaggttgaactccagtgtacctaacagagagtttgacatcagctgtgacaacatggagggaccacttgtgtgttgacactgctatatctccatatttagcaccgagccttgtacattata

SEQ ID NO: 12505 - DNA, 1990 bp, Homo sapiens
gtatttttaagtgttcaaaagagttccttatgtctgggtattcaccttatgataggggctctgacttaagacaacataacagaagcctggagtttaacatgctaatgtgtctagtgcatgtggtcttgaaccagaggcattgccagagtctaacatctcattgggaccatggttatctttttgggtgtggggctggacttactggtttggttttcatttattctcaaggtcgtcatacctcagaagaaaggcaagaaggctgctgcaacctcagcaaagaaggtggtcgtttccccaacaaaaaaggttgcagttgccacaccagccaagaaagcagctgtcactccaggcaaaaaggcagcagcaacacctgccaagaagacagttacaccagccaaagcagttaccacacctggcaagaagggagccacaccaggcaaagcattggtagcaactcctggtaagaagggtgctgccatcccagccaagggggcaaagaatggcaagaatgccaagaaggaagacagtgatgaagaggaggatgatgacagtgaggaggatgaggaggatgacgaggacgaggatgaggatgaagatgaaattgaaccagcagcgatgaaagcagcagctgctgcccctgcctcagaggatgaggacgatgaggatgacgaagatgatgaggatgacgatgacgatgaggaagatggtaaggagttgtcttggtagttactgggcttctgattacaaggtatcttgagattctgggatcaacatattccttccacgacaacctggagatgagattagaatccttgtgggaattctctgggttgttgtggtgtgctagacttaattacccatgaatgatttttgtgcctcttgagaaaatttcaatagcacattctattagtgttttttataatgtaggattttgtttctaagtgattttttttttttttaaatttttttgagatggagcttttgctgtttcccaggctggagtgcaatggcgcgctatctcggctcactgcagcctccatctcctgggttcaagcagttctgcctcagcctcccgagtagctgggattacaggtgcccaccaccacaccctactaatttttgtatttttagtagagacgacatttcaccatgttggccaggctggtctcgaacttttgacctcaggtgatccacccaccttggtctcccaaagtgctaggattacaggcgtgagccactgcgcccggccccaagtgatctattcttgccatgactgttaactaaacatggtgacaggattgcattttctttacattagatttgaaaaccgatgttggttttgggagattgctgcaatttttaggtgacttctctttcagactctgaagaagaagctatggagactacaccagccaaaggaaagaaagctgcaaaagttgttcctgtgaaagccaagaacgtggctgaggatgaagatgaagaagaggatgatgaggacgaggatgacgacgacgacgaagatgatgaagatgatgatgatgaagatgatgaggaggaggaagaagaggaggaggaaggtacttaaattagattctgacatacgacatgagttatgtttaaaggaggcacttaagtgtttgtggctactgatgtgtgatacattgtttgacatcttgtccagagcctgtcaaagaagcacctggaaaacgaaagaaggaaatggccaaacagaaagcagctcctgaagccaagaaacagaaagtggaaggtaacttgcagaattaggggatatgggggagataaacagcacaaatgatgaataacaaagggacttaatactgaaacctgatgttacattgtagtgtgctgatgtgctgtgtatagaaattttgctttggaaactaactttttaccacactacaagtagactgagttgagctttttttgtgcaggcacagaaccgactacggctttcaatctctttgttgga

SEQ ID NO: 12506 - DNA, 1990 bp, Homo sapiens; identical to SEQ ID NO: 12505

SEQ ID NO: 12507 - DNA, 2177 bp, Homo sapiens
caggaggctgacaatgaggtagacgaagaagaggaagaaggtggggaggaagaggaggaggaagaagaaggtgatggtgagtagccttgtctatcttccccttttcaggtactttttcctggccttgtctggcagaaggggaaggaaggaattggggctcctgggagtgggacaatggtacttggggccagtggaccacatggccctgggcacccacctgtagagtcagggaaggtctccctgacatggagttgtgcccatgcccactcacactcactcgcacacctgaaagtttctttcgtgcagctctgaaagccactgatctattgggctggccttttggggtgcagctgcttgggcctctctcctctggagagtcccacctgtgtagtgggcgtgggtgccctgattgggcccagttgcaggcagtagaggcagggcagggaccttgcagtccactacatgttcctcgggatttccccaggagccacagtaggagggaagtgtggtttacctggcctttgattctctccaggtgaggaagaggatggagatgaagatgaggaagctgagtcagctacgggcaagcgggcagctgaagatgatgaggtgggttctggcttgagaagaaggggggtttggcatctgggtctccccacctgcctttagctgaggtgctcaagctgcggagggactgtttctgactttgtaggtggccactgtgtggtcctgaatcttaagaacaggaaggaaacagggctgggctcaacttcccagaggccttgggctgtggagctgggggtccctggttcttgctctgccagcaggagctgaggcagtgggctggatagggctcctggggttggaggggcctttgacagtctttctctgcttaggatgacgatgtcgataccaagaagcagaagaccgacgaggatgactagacagcaaaaaaggaaaagttaaactaaaaaaaaaaaggccgccgtgacctattcaccctccacttcccgtctcagaatctaaacgtggtcaccttcgagtagagaggcccgcccgcccaccgtgggcagtgccacccgcagatgacacgcgctctccaccacccaacccaaaccatgagaatttgcaacaggggaggaaaaaagaaccaaaacttccaaggccctgctttttttcttaaaagtactttaaaaaggaaatttgtttgtattttttatttacattttatatttttgtacatattgttagggtcagccatttttaatgatctcggatgaccaaaccagccttcggagcgttctctgtcctacttctgactttacttgtggtgtgaccatgttcattataatctcaaaggagaaaaaaaaccttgtaaaaaaagcaaaaatgacaacagaaaaacaatcttattccgagcattccagtaacttttttgtgtatgtacttagctgtactataagtagttggtttgtatgagatggttaaaaaggccaaagataaaaggtttctttttttttccttttttgtctatgaagttgctgtttattttttttggcctgtttgatgtatgtgtgaaacaatgttgtccaacaataaacaggaattttattttgctgagttgttctaacaaagctgtctcaagcctggtttttctgtttcagtttcttcagaccttccagggcacaaggataggagggggaggatcctggggacagtgggttgacattttgggaggcagttggatgtgtcctgtgatgggcagcagagtctggtgggtgggcagggactgagctgcagttggctgggggggctgctcactggggcagtcagtgattgccccaagaagccttaactggggaggaggacttcatcactgggtgccacatggggaccctggtgccctgggggtgggggtttgcagtcctagacactggaaacgggccacacgggactgccattatgtggagcgcagggtgctggtggtataggccaagagggaacttgccaagcctcccaggatgagcgtccaagtggtggctgcctctgcaggcctcacaggtttagctccatgacgtggctccccctgctggtggcacgtggtaccccccggcctcttagaatgccggggttttggtttggcactggtgcagcctggcagtcatccaacctttggt

SEQ ID NO: 12508 - DNA, 2177 bp, Homo sapiens; identical to SEQ ID NO: 12507

SEQ ID NO: 12509 - DNA, 2177 bp, Homo sapiens; identical to SEQ ID NO: 12507

SEQ ID NO: 12510 - DNA, 2177 bp, Homo sapiens; identical to SEQ ID NO: 12507

SEQ ID NO: 12511 - DNA, 1122 bp, Homo sapiens
tttctgggaattaattgtggctcttggagtgacaacagaagaaacccccagatgacactgaaaaaccagaatcatctttgacttagctttttttttttttttttttttttttgagacggagtctcgctctgtcacccaggctggagtgcagtggcgtgatctcagctccctgcaacctccgcctcccggattccagccatcccgagtagcctcagcctcccgagtagctgggattacaggcatgcactaccatgcccaactgatttttgtatttttagtagagacagggtttcagttggccagactggtctcaaactccccctgacctcagatgatccacccttctcagccttccaaagtactgggataataggcatgagccaccatgccccgccagctttcatttttttaagagttataatttgaaggagttgagtttcttcccaatactatagcattttttaaaaactgggtgaaattcaggaatctgaatgtagattttgacaggattcaaggcaatatccctgtgcctccaaataacctgaaagaaacagtggcccttttgggaacatgcccttgggaaaaggccttgtattatttcttcctcagtcaggaggtgctgggaagcaaataaaagtgcaaagggagcctctaagaatctctttggatatgtctcttctagcttgtttctgaccagttccaggcacataactgtacatgtcagtaggataatgggctgactagaaaaaagaaaggtttgcgttattgtttgactttgctagggagaagactgtgttatgtttcaaatactgatctttttctcattactaaattacttgcctccactgtttcccaggccagtttgaattttgattgtatactttccaagcatagtaactttgccagcacaagagtattatttcacggggatatcaccactgattacaatgctgcatattatgtttcaaggatactgaaacctgggttctcagagatccatttatattttctcatcttatcccccataaatgggaaaatcactgggaaattattgggtggagaaatgcatttaaatgaccgtgaattagaattggtccttaagaaggaactaaaggcagaatg

SEQ ID NO: 12512 - DNA, 1775 bp, Homo sapiens
atagtgagagcaagttttggtgagcacatacaggctgagcactccaattctatatctccccaccaggttaccaacatcaagaagacactcaaagccaccgcatcctcctcggctcaggagatggagcagcagctggctgaacgggagtgtccccctcacgctgagcagaggcagcccaccaagaagatgtccaaagtgaaaggtctggtctccagccgccactagggccggctggggcagctggcactcaccaggcctgggtcaggtggggaggggacaccaagggcccatttcctcccctctctacctgcagtgagttccagacctgcccgtcccctcaccagcgcctccccaccctgttggtactgttccagaaaaactgttactccccctcacccactccctccttccccagttgttcccttcagactcaggggctccaccaatgccatcccaaaacagggtcagacactgcccagcttccctccaggaggttcttgtctctgtgtaagggcttgtctccctcccagtttttcttttgctccacgtcattttgtcaggctggttataagccggaggcagctttaaccagcccccagggatgattgtgaaggaggcccctccccttgtgaggagggggcactcctctccagcccctggtaccacagtcctcacgatggtgcagtgatttctagccaggcgtcaagatgcgctgctttccctctcctgcctcatcccttgttggcagctccagttcaggccgtggagggacgtgatgctgggctgtgtttactaaacccacgggttttcagcctcttaagcccagctccgatctccaattagttgagagcgctgggttgactaacctctggtatctgagcacagacagagggtgctgtgggtctgctgggtggcagaaatggttccttccggcttggcgttctctcctggccactcttcctgctgcctctgactactcagccttgttttcggtgtgtaggccccagctgcccactggaactgccggctaatgcttgctctcccaagatctttaactcctcctggctgcacctgggtagggatggtggcatcgatgcccctctgtctgctgaaggacctgttgctgcttctgtcttttcacccctccttggctgatgacccagagccctctgatgatggcattctcctggcaagagaaaaagacttaactagacttctgaacttgaacagtttcaggttatattttaatttttttttttttgtacaggttctgattctaatacatttcaacatgcttttgtcccccctcgtgtcaatatttgttatagactaatcgccggggatttttcacctggttggagggtgggggtggggtggggtgtgtgtgtgtgtgtgtgtgtgtgtgtgtgtgtgtgtgtgtgtttgtaggtcctggactgattaaagttcattgaggaaaaagcacattttacaacaaaaaaataaaagtgtagatttaatgtatgtgactggggtttggggttgcatacctggtggatcttgaggggctgggattagggtggttcaggaaaatgtgatgctgtttccccatgtttagccatggtcaaaaaatggatttctcctttttctaaaatgtccagcaactgcctactgttgatcaaatgttgaagtattcttgtttcccttttaagccaatccatgtgcccacataacattatgcccaagtggagagttcactttaatttccaaagtatgtttcatgcagccccctgtca

SEQ ID NO: 12513 - DNA, 1198 bp, Homo sapiens
tcccagagtgggcaggcccaggttctccacaacacattgacttgagggagtgtgacttcgtttgattttatttttttcatttcagctattggaatgaatagagcatgctgcctaaaacttctttttctcttctctctctcttcagctaaagcttgctttcactctggaccacgagaccggattgcctcaaggatgtcatatctatgagtaccgcgagagcaacaagtaagccactcagtgggaaagagtgtcacttcacatgtgtgcagcagtggtgcctgtgggctttctgacactgagcttccattgctaagtggttgtcaggaagggaatacaccttttactactatactagaaaatagctggcacagaaatagtcctcttgtaagatctctttgcccctaagtatagaacttggagcacttgcagaggagcagttgtggtgtgttagaagtagatgctgaagcagaccttctttcaaggctgcagatgtcccccagaccctccccactcttggtctccagtcatgtgcctgcttgtttggttcactgtgtgactttggctttgttgtagttctcagtcactatctgcctatacttaggtttatgggttttgttgtgattatctaccttgtaaattttatattaatggttgggagatttccgggtacttacagagatttaaattggtgcccttgttggaaaggtggcaccttgcatactttcatagcacctcctttccacatcatagactgctccttttttttttttttttttttgagacagggtcttgctctgtcacctgggctagagtgcagtgatagaatcgtggctcactgcagcccaaaactcccgggctcaagtgatcctcccacctgtttcccgagtacctggtactacaggtgcacaccaccatgcccagctaattttctaaatttttagtacagacagggtctccctatgttgccctggttggtcttgaactcctgagctcaagcgattctcccacctcagcctcccaaagtgctgggattacaggtatgagccaccacacccagccacagactgcctccttgactgtgtattttcgtttgtgagacagtgaaagtggtggtgaatgaggcacaggaactgtgccccgatgatgacaatgatggtaatgacagcggctaccattgagcacctcctatgtgttaggc

SEQ ID NO: 12514 - DNA, 1220 bp, Homo sapiens
tcctgtgttagcattgctttactctgggcacatttttcttattctctattctgggatagaagtagtttctgacttctagccacgttcagtccaggctggagagatctacacctgtttctaggattctcgttttcaaggtttctgaatatcccctactcccacttacccccaaaataagctttttacctggataggagagggaaagaggtatttttcatcaattctccccttctctgctcttctccctttctaataccataaggcagttcttcgtgacttttacagaaacatatgtacacgtccttacagagtttaggagagcctgtgggctttttgccttagtctgctagaaagactggcctgctgctctctgctttatccagaggtctgcctctgggacttcagccctgtagctgtagagaccagaagaccaaccctctttgagacccagatgctactttcccttgcgtccccctctctttcctctcccaatgagccaaccttttgcacttccactagaatgccaggcaggctgggcccccaaaggctcctttttcaaaacctctggaagccgcggttgaatgtgccatgaccctctccctctctggatggcaccatcattgaagctggcgtcatcggagtctcttgttctgttggcgtgctacctggaagatccttctgtcctggacaagaggaattggaagagcattttatgttttaagaacaggctgacacgcagcagctacaacaacagctgagatcacttaataaatggtgctaaactagcttgtctcatgctcttgctctttatggtgcatcaaagatgtggcctttcggactgactgtcaccatattaagggatggcacagacttttccatggagggccatccggggaatgcagcctcatttccataagcccattgtgtagtgtcatgtggtattttgttccaggactgctgaggcctgacataataaggtgacatctagcttagaaaataagaccccattttctggtacttaaatttgagttcccatctagtcacaccgatgaccagaacagagtgatttctgatatagaattcagcttgaaagtctgttcaggttggaaagggggatccttggcctttgcttcgctgacttccattcgcctttacttcaaagaaatctcttgcttggaggtaaatccctgcttctgtctgtgtggctgtgtgtatatagc

SEQ ID NO: 12515 - DNA, 1407 bp, Homo sapiens
acttgttaaactgagttcttgctcaggtcatagctccttttaatgaggccaacttgtagtcgagttttcatagatgtgggttccccatattctctgctttgaggagaaatctcataatacagtcagaatcgtggggctaccaggataaaactgggctcggagccatatgaaacagcaatgtcttttgtgaagaaactcctctttggattagtcccactgattccttttgtgcatctagcctggaatggaaaaggaaaacaggccaaattcccatagtgggctacagcactgggaaagactggcccggcttctctgcaggagtggagggtgggtgattctctttattcctttatctcagagaagagacaggtcaaattgtggaggctttcccacatctagatatcattgtatttcaacactgaacttttataggcaaggaccaacccattcccttctcctggcatggctaaatcatagtccagtagcaccaggttaccccagcttaattgctggcctggctttgcatctgtgatatgtaccaccgaactggtaggcaaagcgaagagagcccagattagcaggaggctgagcccctccctaagtatagagagcagtgagcgcaaggctatgaaccttgcagcctttgggtagaggtagggggaagtgtagaattgcacaggatttgctttctggtacgtgagatgggccaagagtggtcttaaaagagctctttgttcctctgtcttttgaatctgttcagaattccttgttgcctatattaacctctaattaattttttctgtttttagaaactccagtcatgacacttcttacatttaacttgttctttctttacctttaaaagaaggaagttttaatattacccagtatgcctggaatgccagatggaaaatagctagactattcacacctagttttaggtggtagatttgcctcttggccgagctgtgggcctatgagaataagagtgattataccaaagattatggcccactattttatttccactgattccatgtgaagaaatttctttttttgttttgttttgttttgtttttctgagatggagtctcactctgtcacccaggctggagtgcagtggcgcgatctctgctcactgcaacctctgcctcctgggttcaagcgattctcttgcctcagcctcccgagtagctgggattacaggtgcccgccaccatgcttggctaattttttgtatttttagtagagacggggtttcaccatgtttgccaggctggtctcgaactcctgaactcaggtgttccgcctgcctcagcctcccgaagtgattacaggcgtgagccatggtgcccggctgtgaggaaatttcttaacccaggttcttcatgttgaggtttaacatat

SEQ ID NO: 12516 - DNA, 1451 bp, Homo sapiens
caccttaagctatcagtttatcttggaaccctttccacagtagtagagagcttccttgttttatttctacgaatgtgccctagcattaatatttaaccggtcctctcttgatcggcatttgaattgtttctaatcttttgctgttgcaaaaaattgactggaagttttgcaagggacttgggaggtgggttgccgttttggcattagattggcaagtgaagaaggccccgggatatgtcatggagaccccgagggctgatgagtcagcatccccctgtatatgtgtgcttctgtatagatgatccttgtattgaacactctattttctcccatttttttctttcagggacaattcaagctttcgaaatacaaaaatcacattgtgagagtacacaagctggcaataatccttttctgtatgtgtgtgtttgtccgaaatggatgggaggcctccagccagtccttccattgctcactgaagggacgtccctgagccgtgcgctctccttttgcactcattcctggaggacggattccgctagacaccctccagcatcgctgactttataaagcggaaaaacggaaaacgtgactttgtaatagacaaacattgttttttaatggggttccatgggggggcgttcagcctttctgtttgctgtgtgctgtccagatgcctcttgggcgtcctgttgttctcttcccgtgttgtacgaagggtaccgtggccacgtgtacatgccagagctgttgatgagagttaccagtattatgaatgtctgtgcatccaggaaaagtgttctgttggagagtcccaaaatagctgtaaatgctctcttctagctctgccattaaattattgggacattttgtttctttctctcccctcctccaagcccaccactttctgaagctgtgttactgatgtgatgactgtccaggattttgtatcatcccctgccttatgccctccggtctcctctcctgtgggactctctccttcttaggcacagctgcacttagaattgtaatccagtggctctcactggtttcactgaggcagcttagagggaatgccttagtaaactgaactggagcagaatctagtttgattaggagctagattataatctaggttccaagtacagaatttggagctaaggactgtgactgaaatcattttcccatatgagcagaccctgtgtgtcaggcctgtttcccatatgagcagagcctgtgtgcaagtctgtttctggcatgtccctcattgaggaagggaagcaaaagctggttattgccaggcctattaacacttaatatgcaaattctatcatcctgaaactggggcatctgaggaaaaggtgaccttgctggatggctttatttgcatggctctgcctgtctgcagtggttgagtcctcatcacctggtatgtgtatgagcaaatgtgt

SEQ ID NO: 12517 - DNA, 1190 bp, Homo sapiens
gctgggattatagatatgcgttcccacgcttggctaatttttttgtatttttggtagagatgggatttcaccatgttggccaggctggtctccaacttctgccctcaagtgatctgcctgccttggcctccaaaagtgctgggattacaggcgtgagccacaatgccccacctccagtatactttgtttttcagtgatcgagaatttcagattttaatgatggttgctaaggacacatacagttgcttataaaactctccttatcatcttctgctttgcatttaatgtagagacttttattcctctactttgtgctctggtatagcagagttagtgctaaatccaaaagtggcaatcacttgagaagctggggagtattgactggggtttttaatattgactctctcaaaatgtataaggactatagaagtcaattatggctgaataagcattaatctgtatttataataatcaacaataaatagaagagtattctttcttggatttatcttcttgtatttcttcttattgcagaaatagcattaatctcataatcatgtgtttggtcctacagataccttcagaccttctggataaagaatttctgcctatcctccaggaggaaccccttccaccattggctctggtaccctttacagaagaagaacaggtttgtgattagctctgagccccagcaaactcttattcttttcctgctaaggcatgaaaataggaagttactatttatgctctaaggattatcctgcatcctcataggtctgctttcttctatttcttggtatgttgatgcttattagttgactagattttgctgtagtatctgtagcttttgagtattatttggaaacgtttgtagatccttaaggacattgggaaccatcctttaaaacttactcaagtagagaggaagagtgattcttggggaggggagaaaatcatctttgcaaataaacagattttcagaagtaattgccaacctgaattcttaccggtgcattttaccactaagggaaaaatgtagatcttcagttcaaaatgcattcaaaactcttctgtcaccaatgtgtgtgtgtgtgtgtctgtgtgtgtgtgagagagagagtgatgtgagaaagtaaaacttgtgggctggaaagtagcgaatttagtgttgttcctgtttatagtgt

SEQ ID NO: 12518 - DNA, 1930 bp, Homo sapiens
tgtctgccgactatggagtctccacctttggacacaacacttactcaccatttactctttatcactctgcaacaaatcacagaaccgatcatctcaggctttttcttctggccctttgtgtccaagattctttaatccatttttgttggtgaacatctcagactatagataagtggactggaccctgtgtcttgggggtggcagttgggattactccccaacaaggctgattttaggcagcatgtgttcactgtgctgtgatttcatctactgtctcccagaaagtgtgttgggatcggccattagcagcttgctttctcttgtcactttttttcttctattttgttttttcttcttctttttccccccatcagggcaaatggtctaactggtgcaatcatgaagagagttaatggttaacagacattggccaataacaaaacaccccatggactgtgactcgagtatccaacaggcagtcagagctctcccggtctgaaagttgcattgccactgctaactttgggattgcatcagagaggccctgagtggggttgagatgaggttggtttggtttgatgttacacactcctcacctgttctttctgagtgtcctttctctgaaaggatttatgtttttcttcgttagatagtgacttctgagcaagctgatctcccctggcatgctccaacctgattggacaaaggaagctctatggcctgggagagagactattcttaatttttctttcttacaaaaactgatttttcccataaatatttttacttcagaggactaggaccattttgttttgggcccttctgctgaaaatttgtctcgtttaagaggcagctagaatctttaccatatgtatgaatttgtataatttcatttttggatagggataaacttttgcttctgataaaagcctggaatttcatctggtcctcagagcattgcgtgtgtgtcttgctgtagcccggaaaaggttttgtgtaaagattctgggatggcaagttgtttgccttttctgaaaagagaacatacagaacctgtccatctttaagaccttcatccatggaatctactatacaggaggatgcagtgggctggaggggatgggcgaaaatgggagcaggaagcctggcctggcttctggtcatggcctcctaaaaccttaaacttcaagtagaaatgtactcaagccctatttataaacaaatacttttcctgcctccaccaaacccctacagaacatcacctggaattgccactcacactgggttggagtcattgggcagctgtgcctgtgcgagaggtgctgtggtctgggcagcccctggaaaagcacctttgctgcctgtcattgttgcctgaagaaggctggagttgctctgagagcagtttgggtttggagtattatatttggcttctatttttattattttggatcaccattctccctatcccttcttgcctccctcccttctaaacatgtgtaataactatacagagactgctacaaaattgtatatagtttttggatcaaatagcatgaggggagaggaaaccattaaaagttggggctcctactctcctttgctttgtaaattcaaaagttgggggtgggtaagagggatagttaaaatgtttacaaaactttaggctccctcggaacttttgccagtgtggaggaaaataaaaaagaacttaaataaaatctgattgtattctatctgagtgcacctcttgtactcacctttatggaggctgagttctgcactaaactgttcctcttggtaccatggaaaagctccaagcacccaagacatggaggcagccatggcttctttctctgccagaccacgtagcactggctggttctgtatttgagaatgtagaggtcaaggcagatgtcggtaagtttga

SEQ ID NO: 12519 - DNA, 1221 bp, Homo sapiens
gcaggtaaagtacttagagcagtgagtgctggctcttctcagctacacgttaaaggaagcctggcctagcccacagcatgcagggacctgggccacttagttcaacatggcctggtgagaatgagccctgacagcccttctgttcttgtcccacagtgaagccctcagtgagctgccactgagtcgggagcccagaggaacggcgtgaagccactggaccctctcccgggacctcctgctggctcctcctgcccagcttcctatgcaaggctttgtgttttcaggaaagggcctagcttctgtgtggcccacagagttcactgcctgtgagacttagcaccaagtgctgaggctggaagaaaaacgcacaccagacgggcaacaaacagtctgggtccccagctcgctcttggtacttgggaccccagtgcctcgttgagggcgccattctgaagaaaggaactgcagcgccgatttgagggtggagatatagataataataatattaataataataatggccacatggatcgaacactcatgatgtgccaagtgctgtgctaagtgctttacgaacattcgtcatatcaggatgacctcgagagctgaggctctagccacctaaaaccacgtgcccaaacccaccagtttaaaacggtgtgtgttcggaggggtgaaagcattaagaagcccagtgccctcctggagtgagacaagggctcggccttaaggagctgaagagtctgggtagcttgtttagggtacaagaagcctgttctgtccagcttcagtgacacaagctgctttagctaaagtcccgcgggttccggcatggctaggctgagagcagggatctacctggcttctcagttctttggttggaaggagcaggaaatcagctcctattctccagtggagagatctggcctcagcttgggctagagatgccaaggcctgtgccaggttccctgtgccctcctcgaggtgggcagccatcaccagccacagttaagccaagccccccaacatgtattccatcgtgctggtagaagagtctttgctgttgctcccgaaagccgtgctctccagcctggctgccagggagggtgggcctcttggttccaggctcttgaaatagtgcagccttttcttcctatctctgtggctttcagctctgcttccttggttattaggagaatagatgggtgatgtctttcctta

SEQ ID NO: 12520 - DNA, 1273 bp, Homo sapiens
tttgcatcccagctggggtagttgagcagaaattgaaccagcctggggaaacattcagtacctggctcagaactgtcaaagcatgaggagggtaggaaacagagcacaaagaacagaacctggagagttggactgactccagtactggcctaataactggcagcgggtaagtgaaaggagccagctttcaaagcagggaagattttgccgtaaaaatgggatggaatttatatggtgggagctttgggttccaggtataaggagggacttagctagttacacagtggactggctgagtgatgaactgccttgactgttgtaaagagagttccgctttggaggaggagttgggatggggcgcatcaacgccccttcccagtcccactccactcctgtgattccatgatgcaccgggcacctgcagaggtcgatgatgattggtaaaaggtctgattgcactgaatgtcacggtccctttgttgccctcaactcccagcagcccattttttccctcccgtcacatttaagtcatgtgtatgggatcatggagcagctgataatttgggattctgtcagtgtgtgtttctgagagtgatcggctcacagctgacgagtatccaacaaaaccagttacacaggagactgacgagtggcagtcatgggtgtgatggtgcatgatctcaagttttcaatctgagacctcctaaggagaaagaaaccataaaaaagaaaaggaaatttcatgggggtaaaaggtttggtcacctgtcatacttttcagcagtgggtcacaagagggaggcaaagtggaaaatgaagttaccaaagtgatgcctgttgcccagcctgttaatagtcactccctccgtgatacttcaagcattttatttttttttagtcccaagcaaatgtaaatatcacatattctcttccccaagtgaccttttagacaagtgattatctacttaacaatctcatattgatagtctatgttttctagtctttcttttccttctctattatagaaatttccaaacatacgcagtatctcttcccccccacacttatgctggagcaatttgaagccaattctaggcattatatttcatccaaaaatattttactgcccataatcttcttaagagagtatagtgaatttttcgattattcccttttcccattctagaatgggatgctgagtctcactctgttatccaggcgggagtacagtagcacaatctcagctcagtgcagtctcaaccttgggctgaag

SEQ ID NO: 12521 - DNA, 1263 bp, Homo sapiens
attgaagctgagaggggagtatatgtggtccgaagttttcgcttctgtgctaaagtggagttaaccccactgaaaatagaggaaggattggtttcaaaaatgttaacacaaaaaaaatctaaccctgaaccatgaggtctcatctttgggaactaaggtttggagtgcagtggcatgatctgggctccttgcagcctcgaccttctgggctcaagcagtcctctcacctcagcctcccctgtaacagctgagactataagtacccaccacacccagctaattcgaatttttttgtagagatgagggtctcactaatttccccaggctggtctcaaactcctgggctcaagcaatcctcccaccttggcttcccaaagtgctaggattaccagtgtgagccactttgccaacccttgcattttctaattagaaagaaaacatcagtgaataccttctgaacctctggtgttttacacatagaaaaatgttgatcatgcactgcatagaggtcaatgatgaatggtaaaaggtctgagtcctcagatcccctcccggcatcccagttatccccagctgcctctcctccatcgcacttcagaagtgctgcgatgggcagaagggcagctgacactccgtgatgtccctcattctgtgttcctccgtgagctcagggaagacactggttggcatccaacagcttagtcacaaagggatttgattgttgggagtgctggtatctgtggctatgatctgccttgttcaagctgagacctctgattgaaaatcccccaggggttttaattgtttacataaggagtcctgatgtttccttttgtaaattatgcctgtggtgaccttgtctagtctgactttaaatatggaactgactttcagcagcatggcgcaacatcgaggctttaaaaattctttaatttgatataattcagacatagaaaaattacaaaaacagtacagcaggtatctgtggtagagctgatttcaaattcaagattgaggatggggagcacgtgaagcttggtgctagtgatgttgaatttttgtttttaatgttatttttagtgggagttttatccttttggtcttgatacctcacctttggccaacactcaaagataggcttcctatgagatacatggcccctggataagactcagtgaatgaaattgttgcttcttgtcctgtttgggatgtgtgtgtgtgtgtgtgtgtgtgtgtgtgtgacaggatcttgctatcactcag

SEQ ID NO: 12522 - DNA, 1170 bp, Homo sapiens
caagcttctggtgtttggtttaccaagatctcatcccaaatgttctgaaacttggtgcttttctgatctctcctttgaagctcatccatcaatgcggtggcgtggtcgccctctggctcgcacgttgtcagtgtggacaaaggatgcaaagctgtgctgtgggcacagtactgacggggctctcagggctgggaggaccccagtgccctcctcagaagaagcacatgggctcctgcagccctgtcctggcaggtgatgtgctgggtatagcatggacctcccagagaagctcaagctatgtggcactgtagctttgccgtgaatgggatttctgaagatttgactgaggtctctcttggcctggaagaataacactgaaaaaacctgacgctgcggtcacttagcagaggctcaggttcttgccttgggaaacactactagctctgaccttccatacctcacttgggggagcacagggccccgctgggcctcctcaccaacggcagtgccaaaatcagcccccacatcaaggtggtgttctctgtgctttctctcgtccttccaaagtcggttctggcctaacgcatgtcccaacaccttgggttcatttgcccggtgaactcactttaagcattggattaacggaaactcccgaactacagacccctccctggtgggttgcatgaatgtgtctcattactgctgaaatgtcctcacatctctttcactgttcttcagagctttctggctctctttcccccacaaaattcgacatatttaaaaatctccgtgtggctttaaaaaatggttttttgtttttttgtttttttgaggtgggagaggatgtgtgaaaatcttttccagggaaatgggttcgctgcagaggtaaggatgtgttcctgtatcgatctgcagacacccagaaggtgggtgcacactgcatgcttgggggtgccaagggattcgagacctccaacatacttgtctgaaggtggtgattctggccatggcccctctgccaagcctgtgtgcgatgcccttggtgctttagtgcaagaagcctaggctcagaagcacagcagcgccatctttccgtttcaggggttgtgatgaaggccaaggaaaaacatttatctttactattttacctacgtataaagttttagttca

SEQ ID NO: 12523 - DNA, 1872 bp, Homo sapiens
cagggcctgtgctcctccctcctccatcctctctcctcccgctcctccctccccccactgtgggctggggacgcctgcccttctgtctccggacgctctaggcgagttcagcttggggtgtgagtgagacagcttgccagctgcatccctgcagacagaggatgtgtgtccacatgagtgtttctgtgtgggaaatgcttcctggctctgggaaactttttctgcccattctgtggttcccagggagcgtggccctggtgggccaggggtggtttgacctcttcagcccgtccggtggcctggaggccggaggctctcctgagtgtctgcccctgcagtggcttcttgtcgcctgctgctgggcgtgatgtcgctggaggtgctggcagggactctgatttggtggtccgcgctgcccctgccctgcctctgtcctggctctgaactagtagatgatggtgccagagggcagggagctcgcctggggagagggctgtgccccgtagggacagtgcccaggtgaaggatgcccctggtcctccagggcactgactttgcccttttttcccgttgatagtcatggctcagaggtgcttgtaaatgtcttgggaagaggtttctgtaacccctgccctggtgtgaggaggaaatggctctggcctggctgcctggccgtggcttctctttggctcccaaagagaaggacagtgttgggagtatctgccgtggcttctctttggctcccaaagagaaggacagtgttgggagtatctgccggcgctgtccaggtcctttagtcagcgtcactccatctgatgtgcagaagctgggctgcacctgcgggggtgggcatagaccgggctgggtctgcagcagcccctggtcctgagcaggcggcagtgaacagcactggcccacctcccactcacagcccctctgtcccctctgcagtgcacccaggtgggcccctctgcgtgcctttgggtgctcccctctcgtggtcgttctggcccgaggcccttagagtatggaggctgagccaggccttgggtttccccagcacagcctcctgtcgctgcatgcgacgtgttgggatttttggatgaaagactctcccacgctctgttggtggacttagctgcctcactggaagtgatgtgggtggaaggtggttgtatgttaccttttccacctctcattgttttccccagaacattgtagatgggggttggcagagggagaaataagccagccacggcagtcgcttggtttcccaggtggaatgggctaacacaggagatgatgggaacctgtcccgcagtccctgcatgaccattggccctgctggcctggcgatgtgggcatcctggggttcttagggtcccagaacaagccccaggcaagctggaacttgggtggggaggggacatgaggaggataaacagctgactgtggcttcaaggacatcagggccaccccaagtcctcagtgtcctactcctggcaaggagttgggtttggatcaaaagtgtttaaaattaatatgttgtcagtgattagaacaacactgtttacataaaaaccatttttctaattctaacaagttagaatgtgaggaaggaatgaacatgagtgtttaggaacctgccctttggtgctgggctggcgtcccgcactggggtgtcctcgctgtctgggggctgctctgctgccccggcccaggtccccttgtggtgttgccagacgggcctcatggtctgctgtgcagagagaggcaggaaggatccctgaagagtcttggagaaaaggttctgtgccctcaggtggggcttaccccctcgtatttataatcttaatttatatagtgaccacc

SEQ ID NO: 12524 - DNA, 1099 bp, Homo sapiens
cgggtgactttcagccacagttagtgaagccttcaagaatctcagctacatcttcatggcagacacttcatggaggctgctttgaggcaaagtttatgcgttctgtttaacagatgacctctcaagagtctccttctcagttgaaaggggagaatttcaccaaaaacaactgtccggcccagagagagatctgaggtttctcctggtctcccacacatcagagctcctctgctctgctcgtcctgcttgtctaaacctaactgctttttctcagatagtgccccagctcttccttttaccatcatcctgcccctgggattttgtctcgtgccttttcccaccttgttccatgatctggcaccgtgccagtcgcctgcagacccctttccatgagtgacatctgccccagtgctccgtgcagaggctcctgccttgctttttcacctgctcagtctaaagggctttcttctggcccagccacacaggagggacctcggccttgtagagaatggtgtgaggttgcattattgtgggaccatcctgaggactcagcccttggtggccccgcagggccctcccagctaccctggaatttgatagcaagtcaaatcatgaacaccccaggtttcattttaaaccacaatataaacatgtttaactggtttcctatgtttttctgcttttcccgcttaaatgatagatttcttgaggaaagagaccaattcttcatgagctgcaactacatatggagttttcatgcctaacgtctgagtgctctctgtgtgccaggccatgctgaaccgtttttacgtcttatcttctttcatccccaccagaaccccttgattagatcgattctgtccaataggcaggctgtctctccttttaatagatatggaaaagtagcttaagtcttagaactcctaaattcactcgtgcagcagcgctagctgggccagggtgtgggatgtggacttccccaccagcttgtgctccctgggggagtgtggggagcagggtcggggggttgccattatatttttgttgtttctttaacataacttacttatttaacgtaatgccactttctataagtatt

SEQ ID NO: 12525 - DNA, 1256 bp, Homo sapiens
tcttgctcttctctctggagaaaatattacaagattaatatcaatgaagaagcagaatatgcaatcagaaatacatagggaaaaagctgggttaatagaagtattttcctggattttgtgatgtgtatcgcatttgtcagcatctttaaatgtgtcattcgttgagacttattttttccttctagatgaatattcgctatcctgcctccttttgggttggtaatttggggttgtctttcttaggcccctgccctggaaactgcgccgggatcccaggcggaggggtgaggaaggcggacctcgcccagcggcgacacccagagcaagtcacgcagaaatctccaggccgcacttatctccggtgcacagcgcgggagatgacacgcatcccaccggatctcgcacagcaccgctgatgaataagcacacagctgtttgtacaactaccaccggccgtggcggccggagaccctccctcccttccgccggacattggggcgtggctggaaactcgggagtggattggccggaaggtgggacgcaaatttgtttgaaaggcccaatcagtgcccggcttctccgctctagccaatagaaaaccgagaggaaggcagggagggcggagtctcctatttgagtttgtggcgcgcgaggccctgcagtccgggttggcgcttgggtactggctgggtccgatgctgggtacgctgcgcgccatggagggcgaggacgtggaagacgaccagctgctgcagaagctcagggccagtcgccgccgcttccagaggcgcatgcagcggctgatagagaaggtgcggcccccgccggtccgccgggaggggaggcctgcgtgtcggagtgaggctgggaggggacgtaggacgggaagggaaggggctctgaggactcggagcgggggttggggaagcgggactggggcttggatgcggagagaaggtggaggcggagctgggggctccggagagggaaaaaggaggcagcgccgaaggcttcggtgcggggacggggaggaaagactggggcctccggaacggggagtggggaagcaggcctggggctcgggtgcagagaggagggtttggtggggctgggggtgctcctgagtgggacgagagaggcggagttgggggctccgctgcagagaccgcgtttggggcgccccaggccagactaacggcctctcacgggctggcgccgcctcctcccgggtctggggcccctcgtggccctggaac

SEQ ID NO: 12526 - DNA, 1172 bp, Homo sapiens
taggtggatttgtcagtgccacttcctacaaagtgaaggctggatttttgggggactcatttccagcagccaccagcaggtggagggagtgagatgcgtaaacaaactgtccctcatgcttggtgtttgggcagatgcattgctaaagcgtgctcactaataaatcccctgctgatatggcacaaatatttatagccgatgattgatgtgaaattaacaaaaactagcagttgacagcgatatgaggtggcaaaggctatttgggaaagtttccgttgtctttgaaaattaagaaaaattatacgtttacttgccttgctaagaactgtttaagaataaatcaacataaactagggcagcttcttaaactatgatggagaagcacaaggtcaaagtgtttcgtctcagaatgaagcagtaatgtattactttgcgtactgtgtacaggggccggcagatgtttctgatgttatgaagctatgctcctggaagtggttgtgaaaatcgcagccctgtgaattgtgtgccctaagagccagctgtgctcctaacagtgatgccgtctttccatggaaatcacccataagcacagccttcagtctaacttcatgtcaagtctaagtggcacagctatccatgaacactgtaaacattcccagctccatctaaggtgattaaacggagtcagaacccggccatggatgtgtattcactgttatttaacagatgctcaaactagacaggtgggactgtccagatgcctgtggggcactacagagttttgaggaaatagagtctcagactggagccccaaggaccttgaggacaggagtctacctggggaggggcatcccagagacttactccagctgcttaactccggtgtgcctggagtcaccttgggaccttgttacctgcagatttggattcagcaaggcaaggtggacctgagagtctgtgtttctggtgagccacaggtagcaccccggctgctggtccctggtctggggaaaggcaggcagagttggagagacccttcccgggttcctggttgcaggtgctgtgtcatcgtatggctgtatttgaggggattgtgtaagaagatgttgttaaatttatttttagaataatagacttttagatagaagagaaacctcggaggtcaatcagct

SEQ ID NO: 12527 - DNA, 1206 bp, Homo sapiens
gctcgctggatgcggcggggccccagcgcgcgggcgacatgtacttgttggacggcagtggcgagcccgcgtcgccacccgcggacgcgatgccgcgcgggacgccccccagaaagactgtctaccgcatctccgtgaccatggtcaggaaggagcagctggccgcgccgggctccggcggcccggacccacgcccggttcggcggccccggcccgcgcgctccccggacgcgcccgggaggcttgaggaggaggccgaggaggcggagggcgccgaggaaccggagggtccccggccgcgcgcttgggatttccgcaccttccgcacccgcagcaccgggcagctggaactggggcggctccggccgtgcgcacgcggcctggaacccgcggacctggccggcagcgccccggccgaggaggagggacgcggctcgcccgcgtccggcagccccgacgtggagggggcccgggccgcgcccctgcggcggagcctgagcttcaggcactggagcgggcctgaggcgccgcaaggccggacactgggcggcggaaggcgccacagcagctccgggagcctggcctgggcgccgtgcgacgaggccgcggccgggaccaccctggagcccgcgaccgccacgcagcccgcctcggagaagcgcaacaccctggacgtgggcgaggtgctcagcaagaacgacgcgctctcggacctggagcgttgggaacgcagtaagagcaagaaccgcacgctggacaacagcgacctgcagcggctggagcgcgcgcgggcggcggccggggccggcgcggcctcggagcaccggctgctgcgcttcttcagcggcatcttcgcgcgcagggacgggggcccgggcggcgggccctcgccacggagcggagcctcgcggccacgcggctacttcagcctgcggcgggccccggccgaagcgcactcgtccagcgccgagagcatcgacggctccccgcgcagaggtgggcagcgtggccgggggtcccgggacgggaaggggcgtggtggggacttgccggttccgcagcggctatgggacccgccctcccgggtcgggagcctgcacgtggcctcgagggatgcgaactcgggtactgcggttttccccagcagggcgcagcggtcctgggttttctggctgcccctgcgcctggctgtgcgtgctggtgccc

SEQ ID NO: 12528 - DNA, 2289 bp, Homo sapiens
ggtggcacaagggatggggacgcgagggggaggggaggcgaggaacaaggagaaggggcaactttccttaactggcagttgagcacatagtacatttcccctctaccaaacggaacacttggattccatctcttctctgaggagctcgacggcataaatcagaagcaagcacagagtttgtcaggtttgaagcccctatgatggtgtgtgtcaaatcagttgtagctaatctgtccagggagaatactggcttcattacacttgtacagccgagttcttcccgcattactgctgtttaatagaacgtgattagtcatcgccgagaagaaagcatattagccgaggaggtagtcacgcggcacgcgccggtgattgccacgatgtgattgcaatactcttagaagcaccatattatcccagacatgttctttcaagcccttggagccctctctaaattcactgtcatcatttagtatctgtttaatttttcagtccaaagagaggaaatcagtcgctgagtattatttgactccggtctccttggtgcaaaaacaaaatgggaaaaataaataagaataactcagaaactcaaaaggaaaccacaaattcagctaataatagcatttcgagtatatttcgtaaactaaggaaatacacaaaaggctgttttttccgactgtaagagatatttgatgtccttttgccgaggtggatgtgttagtctcaggccctcctggaccacgttgcccaagtcacacaggcttctgtgttatgtatttagataagatgtgtgaaaatatatttgaataaaagaagttcataaatatgcattgatttttgtacagacaaatggcacctctcttaatttataaattgaactggatgtgaactaataatgtgcaactagttgagataagagggttacagatcattgtacatggaaaatattcccagcagtaaacacttccattaatgtgatctacggcttttgaaaaggagcatctcagaataagatggtggtacaatttgcttattaaaattgagaaagaaaaaaaaagacacactggagtatattagaaaggaaaaagaaggaatgtggtctctcatgattgaaagcatgatttagatcggatacggcttttgctaaccaaggaccaagggactctggcaagatggggtggttttccgaatgccagaccgaggtgccttacgaaggcagctgccaatggttctgtggcacagactggctcctgagaacccagacgaccttgacctggcagcccggccctccacgctagtacctcgcctgattttccatcgttgcggtatccagccgcttcagacgtccgccgccttcagtggtggtagtcaaatgtagtcaaccaaaccacagcatcccttaggttaaaagcaaacggggcagctttgcctagagctcattgacagtgtgatggggggagaagggttgtcacaatggaagatgaggacactagactcatgtagcacagaaacatgaagccacacgcaccggcagcctccggggtgttcctcgctctctcgtatgttaaaccttatattttataagagtttttcctcttatttcactttttaaaaaaaattaaagtaggtggggaaaaaaataaagctttacacagaatttatatgtgggtaagtgtttcatggaaatttctaatcttaacgaagctaagtggagctcactcgtatccaaaagtataacaggtgcagaagccacaagtctgagaaccttgacgacagttccatcgtcctgccatttgatttttcagtctgcgtttcatcactgtgtagctattgtaaatgtgaatagaaaaaaacaggtcattgcctatttttgaagaacgcgttggtgttcgagtccactagacacactcgctccacacagccttcaccgtagactctgtagtggacacagatatagcataaatgaaattgttaaattatttcattgtagttaattcccactataggaatgctttatcatagtgaagtttcttttgagaagaaacggaactccttgaggcttctctttgggatgtatatgagcgtgtacatattattctatgtgtttataatataatattttcccaaatgacttcttgtttcactttgccttccacaacctgaatgccagattggttttttcccttcctggcccccagcacaagctgccatgactccccctcagaaaacacagcccctcctctaccattctcagtgatgtccatctgctccactccgcagccactttct

SEQ ID NO: 12529 - DNA, 1108 bp, Homo sapiens
ctaattctccagactgcagcccctctcagccccgagcacctgagcgctggggaggcccttattgagctcagcctggagaggggagggtcgcacgggtcccgggggcaggtctcctgcactggctcttcccttctgccagcttggaatttggttctcatcttgccacaggggtgcgtttcctaaagggcagccggagcagctcaaaggtgacaactgagatgcatttctaggcaggggcagggaaggccaacccaccttgcagccagttttctgtttctgtaaatagcagtgtatagagatggaagggcagcgtgggtgtatccacagatgggtttaggttttttttttggatgttttctattacctcattcagcaactttatgtttcacaatgactcaatgatgctttatttatattgtttgtactgtaattaaaaccattgacagacatttcactttgcttgttatttcatatgatcttgttttgattaaatatgccagtttgtattttcctgccttgggatttttttgtgtccgctgtacagtattctaagggaaaaagaaaaagaaagatgtgtaaagtaacagagagaggtggctatggtgtagagacctctttctaataaagaaatgaaaatatgtctacaccgcttccgtggagttgttgttttttgttttttgttttttttttttttggtggcgttggtcatttgtcacaactaattgtgtttctaagcccaggaaaggtaaatcagagagaaaaggggctctgtctgctgcgggcagggattgccccaggcccaggctgccccaggcccgagggactcagcacacgagttcacagacggaatgaagaaagagaccaggagtgtctcttctgacttcttcctttacaaggacagaaactccaagagaatgttctttgcccagccagggttgactgggcccagaacttccagatgcttctgtatctttgcactgtgccacactgccccaggtgtgtcgtaagaactattcccagcaggtggctagcagtagaaccatcccaggactctattattaagaccgttattatcattaatattactgtaatttttgcctacaaacta

SEQ ID NO: 12530 - DNA, 1150 bp, Homo sapiens
tcagcatcagcagctagaacaggcccggccctgagggtccagaagggccagggcctggcacccacctggagaagcccccgcacccgagggaacccatggtggactccactgtgtttgaagcaacaaagtcacagcccagctgtggccatcccaagcaaattgagaatatattcactaaatgggcttaaaagactgcttttgaaggggcttacagccacaccagaagacacgctaaatatttattatactatcctactttgtacataaatatctctatagactggatctcagctgcagtattttgaaagttataggacttaattacccagtaatttctccactcattccagaagaaaacaaaacctctgctgtaatctgcgcggttagcagccacctttccatacttttccaaaggtaaacgtgaaacccaagaacaagcactggggtttaaactgattttggtttgcgttctggctttttgagttgactgaaaagcagacattgttaggcagcctggaaattcgctttgctttgctttgcttttgcctggctttggtttcccctggggttgcctatcctatctgagccatgtgaagcacgtctccgttgtgttaatttatttcaatgtagcttattttcttataagttatgacatttaaacaatttcagtcttgtgaataataaaaaggagagagggggggaaaaagaccaatccctgggcctcataagtgtgtccagaatttgaccgtcccgggcactgccagggtgtggccgggcaactggtctgggaccagtactggagaaacgtcccctgaaacaggtctccttaggcatcctggacttgagccacccagcactttgccaggtttaaaataggagggcaagagggccgataggattacgaatttaagaaaacctaattctcaccttagaaatctatctcccccttttgcacagcctaatcgatacctagtaggccggcaaacttcggcagaggaggaggtgggtgcccggaggaggcaagcgagtgcgggtattggtggctttgcacaaactcctgatgctccaaatcgactacagccagggaggaaacgtctttcctttacaaatatctccggcccgaaaagaagcggtgctcgcctgccggcag

SEQ ID NO: 12531 - DNA, 1188 bp, Homo sapiens
atttcaaacagcgaattataaaggctgcccaaacctgtaatctttgctttggtttgtcctctagcttttaaaagattaacacattaataacaatttcatatgaagataagatatatacttcatagtgaatgaaataaagcatattaaagtgaatttgaggcattcagtgtacactctcaataatgatgtataaatataactaaagttaatgacagctgaggcagttggtgtatagtgaagagtgtgggctctgaagtcataagtgggttccaatccttttcccttacgtaggaatagtgtgaccttggttaagttgcttaaccttttagccacagcctgcctatctacaaagtgggatcaaataggacctatctcataggacagttgtggggattaaacagatagtgtgggtaaagcacttaagcccagggtctggcacacagaagcagacagaagattaccagctgtcctcagtaagacggataagtgtctaatccctaagctgccccagcatggcaacatatttcttcttggtcaaagtgacagcaagaggaggacttgtatattttctagttacaatgcagctccaagagctgcagattcccacacttcacaacccactggtgtttatgttggacagtgggtggcaaccggtcgatgctgttgtggggaattaacaagagggaaggacgtttggtggtggaaatatagggtgttattttatttgggggatggaaaggtagtgagaaactgagaattattagtcactagctaattaaaatgtggaaaagaatacaggattttggtaggtggcaatgaacccacaaataagtcccggccttgtctctctgtaggtaggatgggctttttctgtggaagatgtttgataataatagcacaagaaatcctggtttcaaaatatcaaaatatgcttgaaaccttaaaaaaaattctattttatctatgtgatggttccacaaagggctctggaagtataaatcagtctgatactgattcttctaagataaggagagtacttgggtataggagttaatactagaacatcatcattatgtatatatttttcttttctttcttgttttttctattagctgtactttatgccaaatagaacaccatcattagaaagcagagtgttccacatgcctgacatctatagataaatgt

SEQ ID NO: 12532 - DNA, 1188 bp, Homo sapiens; identical to SEQ ID NO: 12531

SEQ ID NO: 12533 - DNA, 1264 bp, Homo sapiens
gaaaaaagaaaaaaaaaaccttagcctttgaatagttggacaaatatttattttatctccatctccaggccctttttttattttttattttttggttgggcctaaaacccgtttatatttctccctggtgttgtaggttcattttgttggcctgtgatgggctcttcaaggtctttaccccagaagaagccgtgaacttcatcttgtcctgtctcgaggtgagaaatctcacacgggggtggtggttgtcccaattgtgtcttagttttcagagaagtagaagttctgagaccccatttcctcccattgtgggacagcccttgtgccctttttcagtgtgaactctgcctactgactcactggtcagtttgtcctgccagccctgatggagaccagagcagctcttcttcctggcagtcatgtctcaggaaagtgacagggtgcggggtcactccattcactcattccctttctcatctggtaggatgaaaagatccagacccgggaagggaagtccgcagccgacgcccgctacgaagcagcctgcaacaggctggccaacaaggcggtgcagcggggctcggccgacaacgtcactgtgatggtggtgcggatagggcactgaggggtggcgcgcggccaggagcacgcatggtattgacttaaaaggttcattttgtgtgtgtgcacattgtgtgttttgtgtactcctgtgggactcccatggttgtaaataaaggtttctctttttttttcctagtcttttgagttattatactgtgagcacctcttgacccttcagagattgtgtttgcttttgaatatgctgtctttccttgttaaaaccattataggcatcttggactggctcgtagtggcctgcaggctgctggttgtgtgatgttttgtagttcacgggcattttgctgtgctttcactgtcatgatgaccctggttggggaagtggcatgttgcaatgaagagacccaggggatgactggttagtcaaggctaggcccagaccagggctttgggaaccctctagctcttttcagttttccctatggaaatagtgttgcaaaatgttacatagcatgagctcaggcttagccaggaaatagactcatagacaaggttactcatgcatcagacctgccagaaacagtacagaattagccattctcattccattggtgagagctgcagtctggtggaaggagtctgtggaggactcggttcagtggcttccatctggactccctgg

SEQ ID NO: 12534 - DNA, 1722 bp, Homo sapiens
agatgtcatcttcaacttagcttgtcacttcccagaagacagctcttcacagtgttcattttattatttgtctggcattaggtatcagaaaataagcttaaatgagtctaaccattaaatgtaaatagatctctgcctgcattggaatcttttatccttttcttcctcagttgaagtaaaagcagctgatcttactgtttgttcaaattcttcaccagccttgagcatggaaatacatattttcagggcatcttaagggcttttgagataaactctcctgacttgcatttgtccttattcaattatcacaagactaatttgcacatgatccttttgcctgatttgaatctcacttctctgggatggcagcacatcccttgccctgatgctttgacttacaccctagacagagttgttttgtgctcactgactcctcttttgtgtccctgtgcaacctcttagagctcaccctgtccaacagtgctccgatttgagttatagacttgcagctgggggagatgccttaaggggtattgcttatttgtttgcgccattaggatattgctgagtcagacagtcatagttccctctcatttgctctgggactagggtttccagagggttgggcacagttttgtattggctcttttgttctcttttccttagcctcttcggtgatctttggtctgaagggctatgtggctgagcggaagggtgagagggaggagatgcaggatgcccacgtcatcctgaacgacatcaccgaggagtgtaggcccccatcgtccctcatgtgagtctcatgtggtaggaagcccggctggcattaacatctcctgggttctgactggcattttggactggctagtttgtatttactagaaaatctaacacatcacttgattgtacatcagtgattctcagctggggttgattttgctccccgcccaggggacatttgtcagtgtttgggtacatttttgtcacaactgcgggagggagttgttactggcatctggtgggtagagactagggatgctggtaaacatcttagaagcacagggcagccccacaacaaagaattgttcagcctggaatgtcagtagtgtcgcggttgagcagccctgctgagcgggagatgacgcttcatagcatggctctgcagcgtgtgttactccttaccagcaactgagcggcttctggcagagaatatttttaatccatgacctagaagataagagttggaagccactaattaaagtatgaatggtgatcaagcagagctagtacagataatcagggcccaggaagaacaaaagtcaaaatgatgtcaaggaaaagacagacaatgaaaaattagctgcaactatacaaactaaaatgaagccttctggataagctcttgggcctggaaaaaaaccagaaggtaggacattaagttggctgtaaacatacattatagtacatattacataggttacataattcagaattacataataaatacattacgtacctttactgacaccagttggtcattaacatacagtgtgctggagccgtttgggctgatggcgtttgtccagtagatgaggtctgctcatggagatgaggtgatggctgctgcagagcagctgatcatatgtagaggggacgagatacacacccattgagacagggtcttgctgtcttgctcaggctggagtacagtggcacaatcat

SEQ ID NO: 12535 - DNA, 1129 bp, Homo sapiens
ccatgcctggctaatttttgtatttttagtagagacagggttttcccatattggccaggctggtctcgaactcctgaccttgtgatctgtccgcctcagcctcccaaagtgctgagattacaggcgtgagccactgcacccagccgataacacattctttttttttttttccttttttgagactgtctctctctctgttgcccaggctggagtgcagtggcgcgatctcagctcagtgcaagctctgcctcccaggttcatgccattctgctgcctcagcctcccaagtagctgggactacaggctcccgccaccacgcccacctaatttttttgtatttttagtagagatggggtttcaccatgttagccaggatggtttccatctcctgacttcgtgatccgcctgcctcggcctcccaaagtgctgggatgacaggtgtgagcgaccttgcccggcccgataacacattcttaagcgggcaggaaccatttacaaaagttgattatgtactaagccataaaataagcctcaatgatctgtttcttgtacagactacattctcagactacagtgtaatttgcttagaagtcaataacaaacctgtaaggtgtctttattttgaaattttattatttttctttttttctttttctttttctttttttttttttaagacagtctcactctgttggcaggctggagtgcagtgttgcgatctcagctcactgcaacctctacttcccgggttcaagttcctgtctaagcctcccgagtagctgggactataggcacctgccaccacacccagctaattttttgtattttcagtagagacggggtttcaccatgttggccaggatggtctcaatctcttgacctcatgatccgcctgcctctgcctcccaaagtgctgggattacaggcatgagccgctgcgcctggcctttttctttttcttttttttttttttgagatggagccttgctctgttgcctaggctggagcgcagtggcgagatctcagctcactgcagcctccgcctcctgggttccagtgagtctcgtgcctcagcctcccgagtagctgggattacaggcgctaccatgcccggctaattttttgtatt

SEQ ID NO: 12536 - DNA, 2198 bp, Homo sapiens
gggacaaggcttcctgctgtgcctttctggcagggttttgtggggtcacatgggaagcaatgtgttacgcaagcagtctccatgtgtgtgtaaactgctgtcctggtgacttgtccctcttcttagtggaaatgcatttgagatggtgacagggctggatgaacgtgtgaccctgggagatccgggctggactgtggaccccgatgggccagagtccttgtggcccacagcatagcactggggacagagcgctctatgcaggtgaggcgtatgagaacagcatggtaaataattgatgaagtcacatttgttcaacttaaaggattgttctttattctgaagttattttcttccttatttggatgataaaatttccttttatgtaatgaaggtaaaagtagagggcaatatttttgctttttgaaatgctcttggttgcaaaacaaaatgttggttgctgtttgtcagccccagaatttcttcttaagttcgcctgtctctgaaatcccaaagtcacggaaccgcagtctagctgtggtgcatgtttacgtattggtgagaaattcctcttgggttcttgaacagcctgtacgctggcaggcagcactgcagcatttctgctgctcatggccaagaacgagtctggagatcgctgcgtgcggttttaggaagtgccaacacccgtggtgatgggcctctggccacccctggatccatgggacacactcacaggaagctgatgtggccttctcggtgaggactgcaccttaacctgggcactgggagcctgtggcccccctgtatgttggtgatgacactagtgtgggtcttctggctctggggctacagcttctgcctcctcacctggccgtcggtactcggcaagcaggcctggcctcccggggcctggatccctaccggctgggattggcctcctggaagtacctgtttgggccatgtgacctcctttctcacttatgcctcactcccctcctcccgctccaaacccgaacctctcagtgtggaatgaacgctccaaacccgaacctctcagtgtggaatgaacgctccaaacccgaacctctcagtgtggaatgaaacagtttagatgtgtacatgatgcacgtgggtgggattcacatcccaggagaattccacggagaggaatgtgcagattttgaagtgtacagtgatgtgtggaataaatactagaaattctcagcagacagtgggatggagaagtgagtgggggcaggagggggatttctgttgccttgacatgtcgttgctcagtgcctggattgcaggcgagtctctcttttttatgttgctttgatttcaagatctcttagatatactaggtagtgtatgaatgtgcataaatccagtttgagaatggtgtttatgaagaagctgtttcgtgtgtacagttgctgctgtaatttagccagcagtgccctgccctgccctgcagtgtctgctcagctcccactgcttctctttgctgttgggcatgtgaggcatgacttggaggggggcctggtgcctggggacctgctgaagagaatgctcaccaccagctctctgtttccctttctgctttggtaatcaacacgtgtttgcctgcagtggccgggaccgtgactgtttctgcccttgtgcctagttaagagccttcaaaagcataatgaacacttttgatatgatattgtaactttagtaaatgctttacttccctctaattgcccccaaatgccttaattttgtggactgtttatttcaacaggtggaagtgttggtcgtgcgaaatcttggtattcgcatttcaagaagggagttcttttttctttcttctttctatggaacgtttcaagtgattggatagaaagaagggctctgaagcaggagttttcacctgctctgagggaacttggggctccagggacgtaccccaaatgttgcccaggttgaaactccctgacagcctgttctacgtagtggctcgtggtttccagtttgaagagagttgtgcccctaaaagtgtttgaaacctgtggctttcaagcaaggtaccgttgtccccacagtgttccgtggggtagggggtgatggagactgtgggcaagcctgttgtttttggccccctgttgttacatgggacctgttttgacggtgggagggtgagatgtgaagatgtg

SEQ ID NO: 12537 - DNA, 1288 bp, Homo sapiens
caaatggatggcttgtgaatttgctctcaaggtgcttatggaaagggatcctgattgattgaaattcatgttttctcaagctccagattggctagatttcagatcgccaacacattcgccactgggcaactaccctacaagtttgtactttcattttaattattttctaacagaaccgctcccgtctccaagccttcatgcacatatgtacctaatgagtttttatagcaaagaatataaatttgctgttgatttttgtatgaattttttcacaaaaagatcctgaataagcattgttttatgaattttacatttttcctcaccatttagcaattttctgaatggtaataatgtctaaatctttttcctttctgaattcttgcttgtacatttttttttacctttcaaaggtttttaattatttttgtttttatttttgtacgatgagttttctgcagcgtacagaattgttgctgtcagattctattttcagaaagtgagaggagggaccgtaggtcttttcggagtgacaccaacgattgtgtctttcctggtctgtcctaggagctgtataaagaagcccaggggctctttttaactttcaacactagtagtattacgaggggtggtgtgtttttcccctccgtggcaagggcagggagggttgcttaggatgcccggccaccctgggaggcttgccagatgccgggggcagtcagcattaatgaaactcatgtttaaacttctctgaccacatcgtcaggatagaattctaacttgagttttccaaagaccttttgagcatgtcagcaatgcatggggcacacgtggggctctttacccacttgggtttttccactgcagccacgtggccagccctggattttggagcctgtggctgcaaggaacccagggacccttgttgcctggtgaacctgcagggagggtatgattgcctgaccaggacagccagtctttactctttttctcttcaacagtaactgacagtcacgttttactggtaacttattttccagcacatgaagccaccagtttcattccaaagtgtatattgggttcagacttgggggcagaagttcagacacaccgtgctcaggagggacccagagccgagtttcggagtttggtaaagtttacagggtagcttctgaaattaactcaaacttttgaccaaatgagtgcagattcttggattcacttggtcactgggctgctgatggtcagctctgagacagtggtttgagagcaggcagaacggtcttgggac

SEQ ID NO: 12538 - DNA, 1104 bp, Homo sapiens
agggaggggctgtcgctgcatacattcccgaggatctcagggtctaagaggcctcaggacccatgtttaatcccgggacttgccccttgtttgccatgggagggggctgctagacaagccctaggagctcactgaggagccaggctcggggtcctggagcaggatttgctgttagatacagcccctcaggggcacgggctgcaggcagacgcccaccaggggtacctcgtgctccccagtggcttggtgcctctcctgggcccctgacaggctgatgccacaacaatttgaggtgtccccaccagggtctgtgacccagctcagccctcacaggagtcaaggcacctctaagggccagacactgaccctgcagcagggccacagggtgtcacaagggggagcagtggcccctcgttgtcccacaaatgcccaagtgccactgaagaccccggagtgcgcccagggcctgtcgagcaccttggccgcgtgcccttggcctctctgaccgtctccctcccccccacaggctcgctcgcctccgtgttcgtccggctcccttgcggtggtgttggggtaagtgttcctttaatgtgtaaataatgtcctgtttcttctcgagtcccagtggtcacagaaatcgcagccttgcttccctcaaagtgaataattgctgccaggtgttttccatacgcaggggctgcccatgtgcggcttcaaaggccgtgtgagccgagagcgttttgatcgccgactcgggcacctttctctggggaaggttgtctggcgcaggtggctggggctctggggtgcagtggctctcgctttaagaaacaggatcctgtatgcagccagcatctcatccccttcgaagtctgtggcagtaatctgctcacatcaggccacgagtatggtgcgggtaggatgcgtgcttctgtattctgtacctagtttccacccgaagctacaggtggggctcccagtgcagtgaccgtgatactcatgggccacgtggagtctgtagggctactcgctgggctgtgctggcttctgtgagctgatgatatggacctggcctgggcatatgaatcactggtctgtgccagc

SEQ ID NO: 12539 - DNA, 1242 bp, Homo sapiens
atctgaattagcccagggatctcaatctgaagaatttccaaacctcagagagacgcagccggatgccagctagccatccaggacagatgccagaccctggcagctgtggccccgggcggtccaaggaaggctgcttcatcctggggctcagagactccgggagcgcggctggggtttcccttgaacgtgagggagctcagcagctcacctctattttaagaccagaccctggcagctggaaagcaaagtaataatttgatgccaagtcattcgtgcgacagtgaagggtaatgcattgaaggctggaattatcttttaaagtgttttttcaaagctataattaagtgtaagccctctaaaatatttcttaaatattttaaaatatcacgttgggtgatgttgcttcttcttttgcagtaaccaaataacatgcttgtttttgtatcaaattaagtttccttttgggcaatggtttcagttggagtttctgtctgtggagctgaagcagcagcttctgcagaacgtgtgagtgtcctctcgcctgtccccacagtgcatccgcggacgcaaggccaccctggaggagctacagacggtgcactcggaagcccacaccctcctgtatggcacgaaccccctcaaccggcagaaactggacagtaagaaacttctaggtatttcaggaccttcctttcctcccatattgggtttgaagtcccctgaggttgtgtttccagctctcaaccccttgtgtctggggcacctgtgggtgtcgcctgccaggttataaggtaaagggcctgaaagggaacctttcaccctctgttcacaagccactggttgttgatgaacgtgccaggtagcaggtgtgtttgtgtaaaaactgggctgagaaccgttggtttagaagcatcttgaatcagagtttaggtttgagaggctgattaggaacacagccagcatgctgcccgccctgccctgcagggagcctgaagttgttttgagctccgctttaaggcccatcagagcaagaccaggaggaggcctagggagtgtccactgcttaggggtgaaaggctgctggtgtcttggctctggctgaaagcacctgcacaggtggtggaggggaattttagcctcatggagagaactttctaatgggcatcctctgcccggggagctggtgagaggctttccacagggatcttcagcagaggcaggtgaactcccagccagctccat

SEQ ID NO: 12540 - DNA, 1195 bp, Homo sapiens
tgggcagtgagcattgtggacgtggttgtcttccgctgagtgggtggtgggctgtttctcttagcagttgtggctgtgaggtcagcattggcctctccccttcacactcaagctctcctctgcagactctgttgacacctgcagcttcttttctgtttctcggtgcctgacacagaagaggtgcttagtaaaccccaaatgttagtcagcctccttccctgggccaggtcaccttgaccctgggctggggtcctactgggcattattttcttaggcactcaggcaccccagtgcctgttgggagataaaggtgcctgctggcctgtggcagggtgataaggtgccctgagtccctgattgtctgccccagagggtggggtttgcagcatcccttctcctgtcagatgagctcagaggacccagctctctgtgcttcatgtgttacctccgccttgcagatcatccccaagccaagcgagccagcccggcagccggagagccacccggaggagacggaggaggagctccgtgagcaccaggctctgctggacgagccctacctggaccggctgccggggcagaaggaggcgcacgcacaggccggcgtgcaggtgaagcaggagcccattgagagcgatgaggaagaggcagagcccccacgggaggtggagccgggccagcgccagcccagtgagcaggagctgctcttcagacaggtgaccgcaggcggggagggcaccagaaggctggcacgcacagccaccctcggtccccaggtggcatcttctgtggtgatcacgggggctgcagggcatccttgcgcggtcactgtccagtgtctcacctgtcttgtcctggccagtgagggaggttgatgtggcttccattttgtcccagccgttcctagggatacgagatgtttgccccctgtgggtggttacgtaactgctttccagccatgcgcaggccccagagaatggatttccttcctgtctgtaggctgtaaatgaacacagaatccatgtgttagtgagatacagcatgctttttaaagaagtgaaggaactagaggtattaattgatcaaaaaggcaggcagggcctgatcagaagtcaagaccttttgtgacccagaggtgctaatgagcagccctgcagatccagacagacgggtgcgattgtggcacccagagcca

SEQ ID NO: 12541 - DNA, 2020 bp, Homo sapiens
ctgctcgtatttgtagaaatgattccgtcgaactgttctatcagtccttggtcagaacaaggataaagaaggaagttggtggggcgtggtggctcaagcctgtaatcccagcactttgggaggctgaggtgggtggatcacttgaggtcaggagtttgagaccagcctgggccaacatggcaaaaccccgtttctactaaaaatacaaaaattagctgtgcctggtggcatgcacctgtgttcccagctactcgggaggctgaggcaggagaattgctcgaacccagggttgcaggggtggtggaggttgcagtgagcccagatcgtgccaccacactccagcctgggcgatagagcaagattctgtctccaaaaaaaaagaggaagtcatcatttccctagttggatgttgttttccagatcggaacttccatgttgtaactccagtctcttttctccttctgaccttgcaggttcatctgcagaagccagcggacgcctctgttcaacttgtgggttacctggctcatgagaccttgccggcgaggctcggcgcttgaacgtctgtgacccagccctcaccgtcccggtacttgtatgtgttggtgggagtttggagctcgttggagctatcgtttccgtggaaattttgagccatttcgaatcacttaaaggagtggacattgctagcaatgagctcccaaagccatccaggtaaggccgggtcatttcttctctgggcacacagcggggctttctttgcccaaagtagaagttcttgtgactgcagcttgctttctggatttgagacttttgtttttcttgatagtggtcactgttggtttttgacagcacaaagtgcaaaatggatggtttattcttcctcttggtgaaagaagaatgataaaacctgggaggatgtggagtcaagtctgcgaccccggtttgcaggctgacttgagaggcacacaggtttcctcgatgctttttgacaagggtgatgttgaaaggtcaggttgtgatgtggagagctggtttcttgcccagtgtctttgttgtttcatgaggggttgtgtgaggggtgggagtgctcctccaactgggcgtctgggctgtctgggaagaagctcatgttcccactgaggtcgtggccacagttgctcctggtgtttgagggcctctgtgaggggctgcactaagcattttacaagcatttagtacagccccagatcatctcaggcctggagggaagaagtaatttgcctgaggtcacagagctggtaggtgggggacccacatgattgggaagcaagcttgtcctgctctgagcttcagaagcatgtcatgggcccatccatttacgacttcacactttctgtccttggaaagtcaccgagagcgtgcaccataatgaaacctcgaggcctgccgccgacctgcctgagtgtggggctcctgcagagccagtcctgtgctgcccagcttcctgccacttccagcgcaccgtggccttcaagggcacttagccatcgacttctgtcttgcgtccacatgagagagaagacggtggccactggacagacgcttggacaggcacctgaggctctgttagccttggctctgggtcctgctccttagagcagaggcagagaggctcagggtctgtctgggtcactctctttgagattgccggaacgcttacacacatctttccctgggtggaatcgtctttgtctgaaaattccagagggcaagattccaggtttttttagatatgaaagttttattgagttaaattgtttatgtattgactgatgtaaagaaatggtttatgatcattccaagacaaaattaagcgctatggctcaaagtgtctaaatagacattgaatggagctggctctctccctcctacactgggctgctgttgggtgagagtgtatcttttttctgtgtctaaacatagtgtgatgtgtgtgagcattttcatagagtataattctataggcagggccctgtgt

SEQ ID NO: 12542 - DNA, 2020 bp, Homo sapiens; identical to SEQ ID NO: 12541

SEQ ID NO: 12543 - DNA, 1170 bp, Homo sapiens
tgagtatcattcacgctcccttactggaggcttcacctttctgcagcctagcccggctttctcatgctcacagcggcagccggctggtttccctctgctctcaaggacccagcacgtgcctcccagcttcatctctccccggccccggcagcgagggcagcatcttgggtgcccgtgcactcgtgggtgcagacacggcactggcgtgtcctgagtgctgagttgtggctgtgcggtggtgtccgtgggactcagaacagccctgcatgcattttcttaggattgtcttttaaatgaaagctagaaagcactctagccaacactctccccttggactacatgtacgagccctggttggctgaaactgaaagtctgttacgggaaaagtcttttatttcattggatcattgacgattatctctgtattttggactactatataattcattctgaagtgatttcttcagcccttacccttgtaggtgtaactacgtggttttgcttatttccctagattttgaagatctttttgatgatgatgacatccagtgagatgccctctggctgcaggcggggccaagcccttggtacagagccgcagtgtgagcctgcgcaggacagtttcaggtggttttaaagaacacgtggaaatcccttgaatttaggacctggttaaccagaaagataagactgttcttaacgacctagatgattctgttcatctctgaacgggatcaggttttgtcctcactccaattaaaagaaagcaatgtcacatgtggagtgatctctttcttgcacttatgagtgaatgttgcagtccctaaacgtctctgtgtgtttgtgtgtgcatgcatgtgcgtgcatctgtcagcacgctgagagaaccacatttgtctggtagcagataccttgtgttaaggtgctgtatgtgctggagcaggaggcagcgcggcccgtgcacagctgggcctgctgacagcacttggaggaccttgccacggggccgcccctctgctgtgtgggcaggttcccactgtgtgtgtctgtcagcacagtcgtccttatgctgtcctctggcctccacgtcagggcagctgcccctaggcttaagaactaggacgacaggatgcgactgcaggagacgccttctacgtggaaatgcacatt

SEQ ID NO: 12544 - DNA, 1160 bp, Homo sapiens
ctggggctggacgctgagccaggctgtggagtgaaagtgcagaggagacagaagagaacaacatgcgtgggggccgggcagggtggggccccagagcctcgcaggccagggggatgccttggtcccttgcggggcacgtgtcagacccagctaagctgggacatagggagggcgtcagcctcagacccacatgccctgggtgggaactgcccccacctccaggctcctgggcaagtcatgccttggtttcctcagcggcatgcgggtgaggatattcttgcctccctgtgaccctcgagatcattaaaatgagggccgtctgggctggcaggccctgcgagtcaggcagcgaccaccacgagctggggcagagcagaggcctcccctgacttccctccagagccccctaccctggggcttcgttaggggctggccggggccaggcacccccagggcctcggggcctggcttagggtcccttgctccccaggtccccctgggcccggagtgctcgagagctgtcatgaagctggtctactgtgctcactgcctgggagtccccggcgccaggccctgccctgactattgccgaaatgtgctcaagggctgccttgccaaccaggccgacctggacgccgagtggaggaacctcctgggtgagcccccacccgcgagagcggcctggaactgtcttggggagtgcacgactgggggtcctggggggcgggtggtccctagcttagagcttggacccagggacctgatcagggatgccctgacccgggccagatctgggtggtgctgcagggttgaggggccagggtgccttttgaatgtcctgagtgatgtgtgacttggggcagctgccagggagggagccctgtggggtcatagtttcttgtccttccccacttagcaagcacctcggtgtgcatacatgccaacacgtgtgactcatcgaggaccggcacttgtttaagctaacacatacatgcaccgtcacatgacaggctgacacatgcgaactggcgtgctcacttgctgacacacagtgggccagtgcccaccagtacagcgtgtgctcctgggcgcatgtgatgacatgagctgggctgacccgcatcaatgccaacacgtgtgtggtaatatgtacatgctta

SEQ ID NO: 12545 - DNA, 1232 bp, Homo sapiens
ccacaagcccctcccctgggctctcccaggcagggagaatggggagagggacctccttgtgtctggcagagacctgtggacctggcctccccactcccagctctcttgcactgcaggccctggggccagcccgcacacaccatgcctcctgtctcaacactgacagctgtgcctagccccggatgccagcacctgccaggtgccgccccggggcaagggccccagcagccctatggtgaccgccacactgtgccttaatgtctgccgggggcccaggctgtgctgtccctgcagcacgcctccttgcagggatctgagccaccctccccgcacagccctgcaccccgcccctggggttggcagcctcagttggcccctggcagaggaacaaggacacagacattccctcagtgtggggggcaggggacacagggagaggatggttgtccctggggagggccctctggccccaggcaaccttagcccctcagaacagggagtcccaggacccagggagagtgtggggacaggacagcctgtctcttgtagcttcctggggtgggaggcacaggggcaaagcaataccccagggaaagtgggaggtggtgctggtgctctctccaggcccaccatgctgggagaggcggccagagcctggggcctccagcctgggactgctgtgatggggtatcacggtgatggtcccattaaacttccactctgcaaacctgatctcctgcgctctttctcgcgactcttgtcctctgcatcttcctggctgtgtagggtgggctggcctgccgggacttggggcctggagctggtcaggagctgggtgtggccccctcctctgatacataagcccgagagcaggctccccgaatcctgcccagccccttggctggaccccctgggcctgagtagcctctggatgtcacaggaaagccatgtgtcaccttcactctgggccttcacctgtggcttaagccaaatcccggcctcagtggtgatcctttcccaagatgggtacaaggtgacaggcatgttttgttttggagaactgagatttccattttcccaggcgataggtgtcgctgcccttcacagtccccaaggatgtggcgccaccatctcagtgccacgcacacctggccaacatgccgtggcccagaagcagcacgtctcttctcccaacccgctggccaggcccagtcacagccccactccacaca

SEQ ID NO: 12546 - DNA, 1212 bp, Homo sapiens
cgcgcgcgacgtcacacaccattttcagatgccgttgcaattaaatcttgccacactgtcctcctgggtgattgttgacagttattgtagccacagagagaacataagacacgttgcgttcattcgctagaaatccctgtttccttctctcagaaggcagtcacagtccctacctgagtcgtgtgaaacacagggcctgagagtgctttacaggcattcacgtgctgtccgagtggcattcgggggctggcctagctggccctagtcctggtgtgcagggttcaggcagtcttgacctgcaacaaccgaggttttttagtcttttaacccagccattttcaattttttaaaaattaggtaagttaaaaaagctgggtaaaagctgactcagccctgtgtgcttgtgttccttagagctctccttcaaagagcgccgggcagggctgactgttttcacgtgtgcccgtcagttctcgccacatcccttgcctgtgggtgaaagctcaggtgtggggagggtgtcctgtgtcccacacggtgctgtgctgctgccagaatacgagtcccattgagcctctccaaagacggcctccaaggatctgaactcttggccactggtatagtggcctcctgttctcaccccattgttattttggcttttttaatataaaatgtacattgacagacacccgaagtctggatttaatgctaccagggcatcgtcacctcccagggtctcagatttctcctcctgcagaatgagggccacatcatgtggtcaccaaggtcccttctgcctccgggactctagactctagaaccgtctacttgaggaaccaggactctagaaccgtactgtccaatgtgggcgaggctgcagtgagccatgattgtacccactccagcctgggtgacagagggagaccctgtctcaagttttaaaaggctccaaattaatacccagccatctgttctttaacagacatttttacaaacatacaaaaaatgtggaagtgatgaggaaaggtatgctaaatccagcacaatcctaatcaaaatgccatttgattttttttttttttaaggagtcattctctgtcacccaggctggagtgcaatggcgcaatctcagctcactgcagccaccacctcccaggttcaagcgattctcctgcctcaccctccctagtagctgggattacaggcacccgc

SEQ ID NO: 12547 - DNA, 2521 bp, Homo sapiens
catggacgaattcaaggtgagccggctggaagcacagtgggtgagaatcctctctcaccgggggcacctggctggccagaagaaagagcagggcatggccttcccctcaagatgatgaggccacaaccccagggctggcagtggaactgtcctcatggacaccacgggtcagtgcaggcgacggcctgtgtgaggctgcactgccacggtggccattaggagggcatctccttgacagctgcctggcgagctcgtcctctgtgggtgggaatttcatgcaagagcgcacagtacgtgctgcggccctctgtctgctgggaacaaggtgctcctgagatacacctaacttggtgtggtgatgaggctgactgacttcagaacaactctgaaaccagattttaaaacgtttgctaactcagaaaatgcttcactagaaattgacacataattttaacccttttcctcgcttggagtcccctcatctgacgttgtacaccccttccaggtggacattcgcttcccacagagcggagccccagaccccaactgcgtcactgtgacggggctcccagagaatgtggaggaagccatcgaccacatcctcaatctggaggaggaatacgtgagtctctgtgggccttggagccctgaggcgccctggcacgtccaccggcctgaggcccagccaggagcttcaggggacaaggtggcacttgtgtttccagaggcaggcgaggtgcaggggtgagcaggcgggcgggatgctgggggtgctgggcagactgaccctgtcttcctgtcttctgcctgcagctagctgacgtggtggacagtgaggcgctgcaggtatacatgaaacccccagcacacgaagaggccaaggcaccttccagaggctttgtggtgcgggacgcaccctggaccgccagcagcagtgagaaggtcagatgcgggcttctgccctcctgggtcccagggagggtgggcgggcaggcgggcttggtgtcctgagggtggcaactgcgtcggaagctgcttgcgagttggggagcatcccctcctgaagccgtgtcctctctctgcacaggctcctgacatgagcagctctgaggaatttcccagctttggggctcaggtggctcccaagaccctcccttggggccccaaacgataatgatcaaaaagaacagaaccctctccagcctgctgacccaaacccaaccacacaatggtttgtctcaatctgacccagcggctggaccctccgtaaattgttgacgctcttcccccttcccgaggtcccgcagggagcctagcgcctggctgtgtgtgcggccgctcctccaggcctggccgtgcccgctcaggacctgctccactgtttaacactaaaccaaggtcatgagcattcgtgctaagataacagactccagctcctggtccacccggcatgtcagtcagcactctggccttcatcacgagagctccgcagccgtggctaggattccacttcctgtgtcatgacctcaggaaataaacgtccttgactttataaaagccaaacgtttgccctcttcctttcccacctccctcctgccagtttcccttggtccagacagtcctgtttgtggagtgcaatcagcctcctccagctgccagagcgcctcagcacaggtgtcagggtgcaaggaagacctggcaatggacagcaggaggcaggttcctggagctggggggtgacctgagaggcagagggtgacgggttctcaggcagtcctgattttacctgccgtggggtctgaaagcaccaagggtccctgcccctacctccactgccagaccctcagcctgaggtctggtgagtggagcctggaggcaaggtggtaggcaccatctgggtcccctgtggccgtcacagtgtctgctgtgattgagatgcgcacaggttgggggaggtagggccttacgcttgtcctcagtgggggcagtttgccttagatgacagctgggctcttcttcacaccacctgcagcccctccctgcccctgccctagctgctgtgtgttcagttgccttctttctacctcagccggcgtggagtggtctctgtgcagttagtgccaccccacacacccgtctcttgattgagatgtttctggtggttatgggtttcccgtggagctgggggtgggcgccgtgtacctaagctggaggctggcgctctccctcagcacaggtgggtcagtggccagcaggcccatctggagtgggagtgggcacttccaccccgcccacaggccatccggctgtgcaggccagcccctaggagcaggtcccgggtgactggcagttttcacggtctagggccgagacgatggcatggggcctagagcatgaggtagagcagaatgcagaccacgccgctggatgccgagagaccctgctctccgagggaggcatctgtgtcatgctgtgagggctgaggacggggccctagtctctggttttctggtcttaacat

SEQ ID NO: 12548 - DNA, 1202 bp, Homo sapiens
aaatcttttcctattcttttctattgagttaaaggtcctggtggcattgtcgggtggggcacattgctgttgtcatagggctgtttgccttgtgtttcgtggagccccattgctgagcttacaacgtcactctgctctcagctcccacggcctaaccatgaccatcctccctgcaggcattggttcctgtcaccattgaagtagaggtgccctttgaccttcaccgttacgttattgggcagaaaggaagtgggatccgcaagatgatggatgagtttgaggtagacccctttcccgggaggccatgtcacaggagtggcctgtcgcatcctctcccgagtgccagtgtcctttctcaacttcctgttgactctgcctcctcctgctcggactgggcactgacttcccttcacggcgggtggccttccctctcaccacttctgggtcccagggccaatggactctttcctgttctctggggtcctgaacgtcaagtcagccccctcttcacgtaggtgaacatacatgtcccggcacctgagctgcagtctgacatcatcgccatcacgggcctcgctgcaaatttggaccgggccaaggctggactgctggagcgtgtgaaggagctacaggccgagcaggaggaccgggtgagcaggaggtggccggggcactgcccagagccatggtgctcagctttgggcacatgtcagaatctagggaagttcttcaggatcccagcatcccagcgacatctggctggaggtgagatgcaggcagtgccaggacgcagtcagcatccaggggtcttgctgtggaactagccaagagcatggcacctttctctttttcataaaaaagtgacaaagttggacttccgtgtaaatttgcagtttctctcaaaaccaaatcagagtggtacctcagacctacaagaaaggtcaaggttgcgagaggcccccaagcatgtgctatgcagtgaggacgagcatcggggacccccactaacctctagcacagggtggtcaaagggcgaatgacttcctggtaagcagggatgaaacccccccaacctctggcaaggctgacgtttgaaggattgtatgagcggagcgctgcagacgcccagcctctggcagggctgacatttggaggattgtgtgagcagagtgctgcagacaggagcaggggttctggaactt

SEQ ID NO: 12549 - DNA, 1099 bp, Homo sapiens
tgactgtaatttgcaacgtaagttagttgttggacaaatgatctatctcacttaccctcatgacaaacctctgaaggtttgtttgcaaataccagtgctctgtcgtgttcatgctacccttaggggtagaagggatactgtattttactctctagcacaggtggtgaatcgggctgtgttttttgtctttaaggtggaaaatagctattcaatttctgttccgatcttcaaacagtttcacaagaatatcattgggaaaggaggcgcaaacattaaaaaggtgataacttgtccgctgcatcttgcttcttcttgccttgtcctctgtagccctgcaccattttggttttagactaggagggactcttccttacttctagccctgtgctcaactgtgtctcaactctgggagagctctagtcagcttctcatggtgatctctctccctgtagattcgtgaagaaagcaacaccaaaatcgaccttccagcagagaatagcaattcagagaccattatcatcacaggcaagcgagccaactgcgaagctgcccggagcaggattctgtctattcagaaagacctggtaatgggagatgttttctaatggagatcctccagtaaaatctctaacagcctctaagattgagcctggggttgagtcacgcagggtcattgggccagcgcaggctgatgtggaagattgcacctttcaatccaggctactgatgagttggtcagcagttttctgcctttgtctctcacgatacttacttacctggaccctgcagcagtaacatttgacgtgggcacttgtcttattagacattttcttcttgttacctgaaaatcttatctgaaggtatttacggtattttctttcctttaaaaaaaattgacatgcagtaaattgtacatatttacagtgtacaatgtaatagttttgacgtgtgtatacatccatggaatcattcccaccatcaccccaaaaatgtcccatgccattttgtattacagtctccctccatcccacttggcagctcctgaaaaccacactccccccacccccacttctatccccaggcaacccccagtctgctt

SEQ ID NO: 12550 - DNA, 1229 bp, Homo sapiens
ttgttttcttttattctcttcttgctataggcctcagcaactgttgccattcccaaagaacaccatcgctttgttattggcaaaaatggagagaaactgcaagacttggagctaaaaactgcaaccaaaatccagatcccacgcccagatgaccccagcaatcagatcaagatcactggcaccaaagagggcatcgagaaagctcgccatgaagtcttactcatctctgccgagcaggtgaggcctgtgtgagtgcctcgtgcccctgcctacctgcttgtgcagacctcactccctcatgggttgccgtgtccagtgtggacttcaaggcataatgtggtgggggtggagggcttgactccaactctaaaaagccctgtctgtccccagtttgttttcaaaggcctgttctcatcagatcatcccttcctttccaggacaaacgtgctgtggagaggctagaagtagaaaaggcattccaccccttcatcgctgggccgtataatagactggttggcgagatcatgcaggagacaggcacgcgcatcaacatccccccacccagcgtgaaccggacagagattgtcttcactggagagaaggaacagttggctcaggctgtggctcgcatcaagaagatttatgaggagaaggtacacgatttagaggaggcaaatccccatgggcaggaatagaaatgaggatttgggtctggagattcagttaaggcctggttctgccccttatctttttgtccttgatgaagatgcttattgtctctacacttgagtgacccgggtgagatcggtgcccgcccccccttgctgttgagcatctgcctggcagttgtccttgccgtcctgggcctctgactgtgctgacaggctgccagctgggctgccccgggtcagatgcacatcccggacttgttcacgtcttagattaagctgttagctcagcttagtgaactttgaggtctgaaacgtgttccttaattgagggaaaggattgggtgttttgcagtgttcaaggacgaagttatcagccggcgggtgactagactgaggggaaaaatccagtccttgaacagtgaagtttctggggattggctagtcctgatcacttgttgttcacttcttgggatcagcatctatagtctgggccgctttggcttgctttctgcagcagtggccatgcccacctgcccgcttcccacacctttccctttg

SEQ ID NO: 12551 - DNA, 2137 bp, Homo sapiens
ttctgtatactttctagttttgcagcatttccagtttccaggagcctcatgaatggctttttggtttagttaactttgtggtcatgtaagccctgccttttgctcagtttatgacctttgttaaggagaaaagtagaactgttaataattaacgcagcagacattgcctcactcccacttaagtgtgttttgttttcttttttctagaaaacactttcctggataaaaaagaaaacattccagatgcatgatccagctgtgtgttttcaatccttgggagggtgccatccacattttaacagtacctgtgcctgagaatttaatttttaaaagactttgatgtgtttttgtatgaagtacttttaacgtatgtatttcattgctgtgtcacactctgtgttttgtgaggtgaatgtcttccttttctttctccctaaccactaatgttagaattgatttccaagaatcggcatgtatacttaatactgaatttctttgatttaactgacttaacaactgactaaccattgatgagcactcctgatttttatctagaacattcagatttaccataatgttccttagtggtagaggtgtgtgcctagtgatgtagaaagatacactgacttggtgcaaggccatctgcttaccacatcacaccacttggagatctttgcttccttgcttttatgtttgtacacaacacctaaaaccagttttgctgctataattctatactgttgattcgtctgcgattttatctgttaaccaaataaaacataatagaatttcctaatgagatatatctttatacttaaacagcttttttagaggtgagttttaaagaagtctcttaattctgatgctaggttgtttttaaaaccactatgcaaagaactcaccacaagccaccttttgtagtgttctccactaatactggttatcctgtgctacagagaaaatcaaagcagtcataagctccagttttcgtattgcaaataagactcttacctacaaaatgagattcagtgaactaatttggtttttactcaaccaaattaaaaatttttttaaggaaaattagcagttggtctattcagaatcaaacctttttatattttatactgcactttagtgtattttctgtcactgtaggtatagaagatctgcctcccctgtggaaattggggtctgttggtgggcgtgcccctgaagcctggcttgggttgaaaagtgttcccgccctaaggccttggtgccctgaacctctgatgcctaccgggttctcctgatttgagtttcctttaaatactccctttttgagtaattttctgatgggaggaaagtagcagtcatcatctttttgtgtgcaggctgtctcatttatttttagccattgtcgtttcattcattttgtgtaatataaaccgtgtgtcatgtcaaagtgaaagacatttcaaatctgtagcataggctagtgggcaggtccgcacagtcgaagccacacctggtctgttttctgtgcactgtagccttagtgtcacctttcttcttgtgtctccttatggtacactccagcggttgccttttttatcatttctactgaagttgggaaattcaaccccagaaattgacagatgaaaggagacaatggttgtgtagggagatggagaaaatgcttaatctgaggatgagacagggttttttcatttttgtgggggctagaaaaaacataaaatgaggcagttaaataataatagttaatgaaggtgtgctacagaaaataatctggtgttcttgctaactttgcccttcactgttgcttaattgtgaacagccaaaagctatatgttatggcttattgtgtgaaggtaactaagaagtggtgttccatgacttcagagtacatccatgcggagtccattatttgagtttgacatttaataactttgctggaaaatctgtaaaaaagaaaaacaagtttgctagtgactaagccccgcatatgtgagtgaaagtacttcaggcacgctgcctcctggtaacagctatgcagggagggaggacccacactgctacacttctgatcccctttggttttactacccaaatctaaatagatacttttgataataga

SEQ ID NO: 12552 - DNA, 1119 bp, Homo sapiens
ctatcttttcttaattaagcagatggaaccagaagactttgtatacaacttttagaaaaacccttcctgggctgggtgcagtggtgcacacctgtaatcccagtaccttgggaggctgagatgggcagatcacttgggctcaggagttcaagaccagcctggccaacatggcaaaaccctttttctacaaaaaatacaaaaatcagctgggcttggtgttgtgagcctgtagtccctactgagcagtaggaggggagcggctgaggtgggaggattgtttgagcctgggaggttgaagttgcagtgagccaagatcacgccattgcactccagcctgggcacagagcaagatcctgtctcaaaaaaaaaccttactgatttttaattttggaattccctatcgtgtgatctgcttcctaaatgtactttctcttgtccaatacttcattcttgaattaattaacctttgtgttttgtttctagggaccttaccaggacacattagaatttttgttgggtagtagagatgaatgtaagaacttctggaagatttgtgtggagtatcacaccttttttagacttttggaccaacctaagccaaaagcaaaagccgtcttcttcagccggggctcctccttcagatacaggtaggggccatgccgtggcttgcatgggcccctcactggtttgtaaagctgagaaaataggtaattcctagtcaagaaagaagtgttataaaatatttcagagaattacacacaaagtggaggtattgtgaaagaataactagaggaagcatatgaaataaaataacggaaaaaatacgcttaataaaaactttgcttacaaattcagttacgcttactacaaagtataactttaaaatatgtatgtgggccgagcccggtggctcacacctgtaatcccagcactttggaaggccaaggcgggtggatcatttgaggtcaggaattcgatatcagcctggccaacatggtgaaaccccatctctactaaaaatacaaaaattagctgggcgtgttagcgggcacctgtaatcccagctactcgggaggctgaggcatgagaatcgcttaaacccatgaggcagagatcacg

SEQ ID NO: 12553 - DNA, 1096 bp, Homo sapiens
tctgtctttccacttgtaacagttaatgaggcactgacgttgctcttttccaccttaacaagacagtttacagtggttaaatagcaaaactccaggagcaattcagcctgaggccatagtgccctgcagcagcattgggctctgcttttgtttctgctttgtgctttgtggctcttcttcaagccagtgttgggtagtgcacagcctgagaggtgtggcctgataaaccctgaaattgaaagaagtatgcagatttgactcagcactcctggaagtgtctggatacagctcactgagagtgtggaggtgaaagtgcctgcaaaatattaacagttctctctcaatctattgatctcctcagttacatccagaaccttaaagccgcacagttgtcatcctccgcccgcagtctcaggcagggcgcatcaggggctgcactggtagctcccaggaggacttacccatgggtcaccgtcatagccaggtgtgtctactcagaggggacgcaatcctgcagcagtccccgtcaatgagaggccaccagcagacagtgcctgttggacccatgaagtccaccactaattatatactctgctttaggtagaatatttttattagctgtcaaactgtttttgtatttaagtttccaaaagtccaggtactttatgtaggccaatgtataaatatttcaagtctaacagtagcacagttatatgttaatacaactgactacacgaaaaatatgtaatagcatatgctatgtaatttttcaaatcactaggtattgatatgtgccttttttatattaccaagagattctctaaatatggaattagattaggattctctgctccacttaacacacatttttaaattagtactgatgattgagggatggacaatagcacaccaaaaaaaaaagagtttagtatgaaaaatttaaacctgttggttaagtcattcccattaatgtcattttgctgagggtgacttggtccttttgaattgctttggtgtacgggtatgttctgatttttcatgcaagctcctctgccattccaccgctctgaggagtaattgtagcacttcacatgtg

SEQ ID NO: 12554 - DNA, 1308 bp, Homo sapiens
taaaaacacaaaaattagctaggcttggtgacatgtgcctgtagtcccagctactcgggaggctgaagcaggagaatcgcttgaacccgggaggtggaggttgcagtgagccgagatcacgccattgcactccatcctgggtgagagagcgagactctgtttaaaaaaaaaaaaaaaaaaaaaaagattctgaaaaaggtttggatgccatctgtatctttagtgtgaaagtgaaaacttgtttctcatatttatggtagagctgacctgtaattttttttccaatagattggaggtggacacaaaggaagaggcagccagacagctacttcagcgtcctcaacgcattcatcgacaggaaggacagttactactccattcaccagataggtgggaggctgcagaatgtgccaggccccacccgggctgtctggagagggtggagtggtcggtttcccctcagagcttttctggtgtcgtgggatgtggagcaggaggctgtaaacctgtaaacactgacctctgaccatctgtgcgctgctgtcacatcacccccgtgtcatcccacatcacccccgtcccacccaggcccagaccctgggccttgcccttcctgctgtccatgcggcttgcagtgcctggtgctcggcacagtctggggaaattggcctcgccccatcagtgaatctgaatgctcagattgaagtggagtgagtaaagaagagttggcctttcttgcaagcaaggccggcttttgagcactgtgttttcacttatagaaggaagtggtcccttcatttcccctccttttctaagttcatagtgaaggacagtccctgagaccttgtttgccccctcatgcctcccccgatcttgttggggcatccttccgtctggaggctgggtcgggtgctgtccaggccttcctgtgacgtgtctcctggcaccacgtgccaccagaggtcagggctgggggcgggtgtgtgttgctaatgtgtatctgttccctgcagcgcaaatgggagttggcgaaggcaagtccataggccagtggtacgggcccaacactgtcgcccaggtcctgaagtatgtactgcgcttccactgctgagcatggggcagcagggatgttccctgggggttaaattctccttgagtcttcatggctacaggaaataaggggtctctaattatttacttcatggccctcagaaggtttctcagcgatgactgtgttgaggtcttgtgaataggaatttatgttttctaacaaaatgaacaccgtagtccacatcctggctggcacat

SEQ ID NO: 12555 - DNA, 1266 bp, Homo sapiens
tcactcctgcaagtgggcactcagcggggttggggtcacgaggctgaggtcggcttaaagcaggagtgggcagttggcacatcatgtttctcctgcatcagggctgtggcaggaatgccgggtgactaccgtagacacttgtcaaggttgaggttcagagaaaggtgtggggtatcccggaggtcaccacagtgtgccaggaggttcaggttggccttccagagcccggcctgtgtgaaatccccacgagcacagaggacagaacgaaacatggtgttgttttgaaacagggtgttactgtgtcacccaggctggagtagagtggtgccacattttttgtagagacggggtgtccctgtgtagcccaggctggtcttgaactcctgggtacaagcagtcctccctcgtgggcctcccaaagtgctgggattacaggcgtgggctcccgtgaccagcctggaacgtgctgatgagcctctttttctcctgaaaccccggtgggaacagatggtggatgcttccaaaagcatcgaagctgtccatgaggacatccgcgtgctctctgaggacgccatccgcactgccacagagaagccgctgggggagctatggaagtgacccaaggctgcccactggagacgcctctccctgcagtcccccgagaggtgggagactcgcggaaggccccgtccccagcagagtccagaccccacaacttcaggagctctttcccggcagcagagatctgcaggctgcctcttctgccccggagctggggtgcactggggacccccgtggtggggaccttggcagtgtggacatgagcagagcgatggagcagtctcctgccctctcccctgtcctgatggcactctgttgtattttcttactgaagttcagtgataactctgagcagtttcattgtgatcactgtaaatggtaatcagttggaattctcctaaatgtcttccagacactagtaaaaaacgacctgaaaattgtttgtggaacgcttcacttttcttagactgaggacggagctggctttgaatgggaacctccatcccaggagagaagagccttcattgggcccagtagggccttcctggaccctggttcctgcctagttgagggagtcccactgtgggtctgaacagttgcagccatgccctgggctcgctgggtccagccaggctatatccgagtgtcatcacagcttacgtcctgaactcacctaagttaactctgctattttcattgcaaccc

SEQ ID NO: 12556 - DNA, 1241 bp, Homo sapiens
agggagggagagagggtgctggcacagccctggcaagaagggccagtggatgagactaggctggcacataacaggctctaggagtgcctgtcttcttcctgctcttccacgggagaggagaccctggcgtgtgtgtggcagaaaagacactgccaaggacctcgtgcctgtgtccggacccagctgctctgtgctgcaggcgttctaggccgggggtctccaggggttctgtacatagactgtttgctcctggccagcaggcctgtagctgtgctgggagggcctccatggggcctgggctgtgggtggcggggactggcagccgttctatctacctacttttctgtccacttgtctgtttacaaaggaaaaacaaaggtgacactggagaaaccgacacgtttgaggttctaaaaattaaacgagccacaatataaacagtctcacatcttggtacctcaccaaatgtcccctcattttttcctgtttttacgactttcgaaacaaaaacctagactacactaagctttaactgttgggttctttcttggcagaatttttccctagattggtgtaaacagccagacgtgggccttcccaaacccgacctggtcctgttcctccagttacagctggcggatgctgccaagcggggagcgtttggccatgagcgctatgagaacggggctttccaggagcgggcgctccggtgtttccaccagctcatgaaagacacgactttgaactggaaggtgagaatcccagaattgcacactaggaagcgtggagaagtggctcaggatgacaccgtggtggctggcacagttgtgtcagcaaagctgctgccgtttccgtctggtcctcccagatgtggagccccgggagtagtcgttcaggggttctcggtgccagcaaattcttttttttttgagacagaatcttgctctgggtgccaacccaggctggagtgcaatggcacgatctcagctcactgcaacctccgcttcttgggttcaagtgattctcctgcctcagcctcccgagtagctgggattacaggcacgtgccatcatgcctggctaattttttttgtagagatggggtttctccacgttggtcaggctggtctccaactcctgacctcaggtgatctgcccacctcggcctcccaaagtgctgggattataggcatgagccatcgcgcccggccagtgccagcaaattctaacccgatgagtttt

SEQ ID NO: 12557 - DNA, 1610 bp, Homo sapiens
aatctgtcccttcattcgtgtcgcaatatttcccttccttttaaaactaccttgttcggttgatacttagtaactccgtggccagttgaagcgctggatgtttcctagaacaagaaccaccaaagcctgttcgcacagaagggcgaccttgcagggactcgccgccgcgacctcagtgtggcttttacaggactccccccgagcatcagcagggaccccggcggacgtgggcgggcgcgcgtgagctcgggctgcccggccgggcgtgcgggcggggacatggtaacctggtccacggagggcggccgccaccctcgcgtagctttcctgtggttttccaggactgtccggtacagcccgggctccgcgtgccccgcccgctggagcacctgccaccgaggcgcgcgtggggccactgccgtggcggcggctgccctcctcacactcggctccgcgccgcctccggccaccgtgcgctcccgcgtggggcgcctcggatgggcccgggagggctgggggctcttccctggaggaagcggcctccgcttcgctggcgccgcctttttagcttggacttcagtcctccctcggggactcacctccggagtaaacggctcttcattagcttggagtggccgcaggtcccgtgaccagcacccgcgagaccctgtgcgacagctgggctgatgctccgtttctctgggaattggtgattttttactgtgaagatgaaattaccctaatagcatgaagatcgtgggtctgtgtgtccgtgaagtgagtcccgtctgccaggagctgacgaaccacgaatgcttctgcctgtgctgtgcattcccaggcccgcagctcccggtcgaggggactccgatgtgaatttgttgtgaatttgttgtgccacaatagcagttctggaatgaagctaggaaactcgagtgtgctttttgtttaatgagcgttcaccaagctgagccggagccatcctttcggtggtagttggggaaggctatgcagatttgctctgttgtgacgcgttggtgacggtgcccagcctgcggttccccacagcatcgcaggcgctcggaaatcctctcccgtgcctttagaggaaggagaggattgctgaggaatgcagggacgcctgtttctgtcctcacaccacagaaagaaacctgagggaaaactgagacgtgaggttcctgatttaagaagcctgggtttcttcatggtggggggccatttggaatgacagcctcacttccttctgatggctacatctgtatcttttcctcctgtgtttaatgtttcactagggagaggaaataaagcagaaggaacgtgtgaagctctgtgtctcagacggggccctcccgtcgagaagctggtagtcagtgagtgagaacaagagaacaagaacaccctgaacagtcctggttgggatggtgtccacattcatgttctgcggttcttgaacacacggatgcctctgggccacctgtccttttccgagggtgtgggtgggagtggatcctccgggcgcaggtgccaggcaggtgcaggcgggcggtcggccactgctgctgctcgtccctgccagtgtctgggcctga

SEQ ID NO: 12558 - DNA, 1221 bp, Homo sapiens
aggtgctgctgctggggacatggatgccaagcggaggcctgcgtggcctcctgagcagcagctgaccgcccgtctcatgctggacgggacccctgggcgggtggacatgagaccactgttggccagggacgccgtgcggaggcctacgtggctgcctgagcagcagctgaccgcccgtctcactgttggccagggctttgtggcgtgggtgttttccagtctgcctggagcagcgagaagcagctgtgcagactggtggcggtgggagggtttgctgggactgatggggacaccggccagcttgtctggtgtccagcagccctgccggacttggcctcctgtcctgtcgttgggagccctggctggggctgctttgagcaatgacgctggcccagagcagcttcccacatgaccccagagccgagggtctgccctgtcctaggttaggtcttcatggtttagagtaaaaccgtgagggatgttaattatgggcattgaagacttaaggttttcttaaatttttagtgagcagtgattggccttcaatacttgtgctgagaggaattttaagccaggggaagtgtaagaaaatgttcccattcaggagagattgtgttggagtttctttcttcctctgtatgtattttgtggtgtccacctttaaccacgtttcatccaaaacgatgatgcagctttaacatgaatgttacatttttattttcaaggaattattatctatgttccctttgtaaaggaaagataatgttgtaaatctttttattagataatgtaaagatgtatatcagtatttttggatcatgttatagattatggatatattgtttaataaataaagtattttttggaacaaacaattgaaagtgcatctgtattagcccgttttcacgctgctgataaagacatacccgagattgggtaatttgtaaagaaaaagaggttttttttaaaaaaaattttcttttctctttttttgagacggagtcttgctctgtcacccaggctggagtgcaatggcactgcatgatttcggctcactgtaacatctgcctcccgggttcaggtgattctcctgcctcagcctcctgagtagctgggactacaggcacgtgccaccacgccctgctaatttttgtatttttagtagagatggggttttgccatgttggccaagctggtcttgaactcctgacctcaggtgat

SEQ ID NO: 12559 - DNA, 1149 bp, Homo sapiens
ggcactaaacacccgcctgcctgccagggtgaacacacagccagcttatccctcttaagtgccaaaacttttttttaaaccattttttatcgtttttgaaggagatctttttaaaacctacaagagacatctctctatgccttcttaaaccgagtttactccatttcagcctgttctgaattggtgactctgtcaccaataacgactgcggagaactgtagcgtgcagatgtgttgcccctcccttttaaaattttattttcgtttttctattgggtatttgttttgtttcttgtactttttctctctctccttgcccccctcccgccctccccgccccataccttttcttcccctggattttcaccctttgggctgccttgctcatctttatgccccagcactaggtacggggcccaacacgtggtaggcactccatcagtgtttgctgaattgaaaacattgttgactgtggcttctatcagagtgtctaccttttgcagctcttcccctccctcatttaatttgctgcttttaatctacgtggtctgagaatttgtgaaaccagtgttgttagaagtgtatataatctgaatcaataagctctgaatggtggccaagggcctctcttatggcacaaagatgcatggacttcatgacagctcttttggtggctcagaagccattttttatagaatcatggaatctagaatattcctgctggaaagaacctgagagttggtttggaccaattccctggttttccagcagatgaaacaggcccaaagaggttaaatgactgggtgaaaatcacatagctgtctggtgccagagccagcctatagtagagtcccctgaccccaagcccggtgctcattccactacctctcacacttcacaacaatttcctcaacacttgagggcccagaaagtctgatctctccagaatgatcagcccagaggaatgctgagaaatcacctggaggagggagcagaaagagaaggtttttaaggaggggcttctgaatacttgggagatacggaacggaccaaggaccacactccagggtgcattcgttgctccctggggcaccacttctggattacagtgtgccaggtcctttggaggccctaccccttccccattcat

SEQ ID NO: 12560 - DNA, 2951 bp, Homo sapiens
cccggtggtagcggtggcggcagccggctcaagcccgggccgcagctgcctggccgcgggggccgccgagcagcgggagggcctttggggggcggggcggcggcgcccgaggacgacgatgaagacgacgacgaggagctgctggaagtgcgcctggtcgagaccccggggcgggagctgtggaggatggtcccggcgggacgggccgctcggggacaagcggagcgcgcccaagggccgtcgggcgagggggcggccgccgccgccgccgcctccccgacaccgtcggaggacgaggagccggaggaagaggaggaggaggcggcagcggctgaggaaggtgaagaggagacggtggcgtcgggggaggagtcgctgggctttctgtccaggctgccccctggcccggccggcctggactgcagcgccctggatcgcgacccggacctgcagcctccctcgggcacgtcgcacttcgagttcccggactactgcacccccgaggttaccgagatgatcgcgggggactggcgcccgtctagcatcgcagacctggttttcacctactgagcccaccgtcagcggggcgcgcacgcccccaaaccagctgtttacatacaggaatcaggtattggggcccctcggaggccgaggctggcaccccatctcccgcgcagcctgccccctcctggacgtgcccatcccccctcagatccagacatgcccctcccccgcagacacaccccaaggcagcccaacccccaccccttccccgacacccaagcccctccccacgtcgccccctcctgcacagccaccagcagccagccccctccgatacacctcccgtcctctcctacagacctgcacccctccccccttttgcacacgcccctcctcgtggccggaggacccgccccctcctttgctccggaatctctcctccctcgcccggcccgccttctctgggttaggggggcgatgcggccgggtggcaacgcacgcgcctcctgcgcccctcccttccctggggggaggggcgcaccccttttatccccggagcgctagggcccgcccctccgctggggcccacccccttcgtgcgcatgcttaatgcttctggggaggagggggctggtcccagcggagccgcactcttcgcccgctccgggcaaaagcgggggcgagtgtagagcgatcctgggaaatcctttgatccgggagccctaggtttcctctccagccaacggggcgtcgctgccttaatgggaggagcactcggaagggttggtttgggcctgaaactctcccaagtggcatagccccttttccggtatggggtctcctacacccacgcgcaccacctctccggtcgcgtggctgcctctacagcctacctatacgtccctttttccccccaactgggaattgagaggtaaggtctttctctggaaatccagcagtagaggaagggaccacccaagaaaactaaaaaccaaggcaccttaccagtctgtctggggacaggatccctgctgcaccttccccaccccctcctgggaagtgccccctcacctcagggcacccgcaacctgggctcctccctgagcgcaccggcccttcctgtcacccaggtccaccctcagtactcaagctgcagtatacagcgggaaaaactgaggcactttggtgctaggggtttgggactgaggcgtggagagcagatgtgatggcaggaagactctcgcttttaaacatctggtttgggagagaccatcgacttggccagtgagactgagaatggattccgagtagtgatgggccgtttgcacctcggtttttccacgtgagaaatggggagaacgctgctgttaggaggaagttgtgtccagttcagggtgccctcgggagccctgtccctgttgctgtggcccctctcacgccgccatctctctgccccgccccgcccctccggcctccccacaccccccttgccctcactacctgtatctcaccggcgtgtgttcaccctcccgggtggctcacacactctcattcacacacacaaatctcaggaacaaacggtcccagagtcctccggacccctgcccagggtctctgcaggtctctgccccacgcgttcccgtcgctgacaaagccaccagctgcctcctttaagcttggtgctccggctctgggcctttcttgcgctctattttttttttttttttttttaagaaaaacaacaacaacaaaaaaagacaatgaaaaaaaaaacgtcatgtgagtgaagagatgtcactgtctgtggtcttggagaactagtctcgtagctgaggggtggggtccctctgtctggggcactggcacccacagcaggactccgccagtctgatgccaggactgaataaagtgtatttgccccgaccttgccctgtggttctgcatgtctgtgctcttcctcaaccctccctaaacagtttgccagattcaagtccgtgtgatttgggcccgagctgggtgtcccagggcaagccaccttgcctgtctaggcctctatgtcaggactccctggccttcatgaagaatagcaaactcatccctgtagggaccaggcaggtaacatagacgagtgactctgggtggacagtggtgtcatgacccacttcaaggggcctacctcctgccagttgtgaccctgtgggaatgcagtccacagtggccaggtggccagatttttcaagaaaagctggatggatgtttctgagtcatcttaatttcaaaatgagactcatattttaaaatttctgtgggccaaatgaaacaagtatgcaggcaggtctggtccgagggggctggcttggccatgcctttctgtgcctttaatgaggactaagaagcaagattgggccacactgtctggactcaaagcccagctccaccactgagca

SEQ ID NO: 12561 - DNA, 1205 bp, Homo sapiens
gactggggctggacgaagccagggaagaggagggagacagagaagtggttctgtatggctaggaccaccctactacacgctcagctgccaacagtggattgagtttgggggtagctccaagccttctcctgcctctgaactgagccaaaccttcagtgccttccagaagggagaaaggcagaagcctgtgtggagtgtgctgtgtacacatctgctttgttccacacacatgcagttcctgcttgggtgcttatcaggtgccaagccctgttctcggtgctgggagtacagcagtgagcaaaggagacaatattccctgctcacagagatgacaaactggcatccttgagctgacaacacttttccatgaccataggtcactgtctacactgggtacactttgtaccagtgtcggcctccactgatgctggtgctcaggcacctctgtccaaggacaatccctttcacaaacaaaccagctgcctttgtatcttgtaccttttcagagaaagggaggtatccctgtgccaaaggctccaggcctctcccctgcaactcaggacccaagcccagctcactctgggaactgtgttcccagcatctctgtcctcttgattaagagattctccttccaggcctaagcctgggatttgggccagagataagaatccaaactatgaggctagttcttgtctaactcaagactgttctggaatgagggtccaggcctgtcaaccatggggcttctgacctgagcaccaaggttgagggacaggattaggcagggtctgtcctgtggccacctggaaagtcccaggtgggactcttctggggacacttggggtccacaatcccaggtccatactctaggttttggataccatgagtatgtatgtttacctgtgcctaataaaggagaattatgaaataattttatttttctctgcaatttcttccatcctttccaacgatctcttaccagtttttcctgccttcaaaactggcccccatggtgaaaggccgtagagttgtgtcttaacctgggctgagtggtttgtgagaacagattacctggagcccagtgggtcttcctgcactccttctgtttcttctggcagcagcagtgtctctattagggtactttctgagtcaaaatggcttcaacaagatggaaatatgtttcacacaaaacaagaagtcagcag

SEQ ID NO: 12562 - DNA, 1385 bp, Homo sapiens
ggcagaggaaactgccctctcgcatgctgacatgtctagaatatgcagagtggtcagatcctctccctggcctgttcccggatctaggcgtgggtagactgagtgctgtgggagcccagaaaaggcctcagtgactctccatcaggtagctgaggctgaccaggccattcttgcaggaggacctgcagaggcaaaggcccggggtgggagagcgctcggctgtgggggcagtctctgcactgcgctgacattctcttctcttcctcccatcctctagggcccaggagacaccagcgggggctgccgctgcagggtaaatgggattccttgccacccaagctgtcagaactgccactgagctaaagatggtggggccacatgctgacccagccccacatccacattctgttagaatgtagctcagggagcttcgtggacggccttgcttgctgtagcgttgtaggggccctgcctgcactgcggttgtccacggtcacatctgccccagtgcctttgtccttcccttggggcttgccggccagacttctctcccctgcggctcccacctctgcctgaccccagccttaaacatagcccctggccagaggccttgctgggtggagcctctgtgtgactccatactcctcccaccacaacactcatctgtcaaacaccaagcactctcagcctccccgccttcagctgtcagctttctggggctaacttctctgcctttgtggttggaggcctgaggcctcttggaactcttgctaacctgttcagagccaggaaggagactgcacagttttgaaagcacagcccgtcaggtccggctctgcgtctccctctctgcagcctgtgtaagctattataattaaaatggttttccgggaagggatgagtgtgatgtccttgagaggaaatgaatgtcctggcctgggactctacacacaggcaggatcctgaggtctctgggaactgcatcagaaagttgacttgtcagtccatctgtggtagaatgaggctgtgactgagcactgggacctttctaccagatgtggaccccatgcccagcctcaggggcaaggatgctcttgggtcaccgtcagccaggacaggtggagtgtgcagtgtgtcaagtctgcagagaaggatgggcttaggggcgggaggggaagtcttgccactcctgctcccttttgacctctcagcaggcatctagggttggcaggtagatagttcaagaaggaacgaagctgctgcagttgaggggtggggttgtccatcctattttctcgtctcaagcaagatggcacagtatcgattcagcagtatttactagaacccactctgtgctggtcggaggttactaagacagggtcctg

SEQ ID NO: 12563 - DNA, 1943 bp, Homo sapiens
atacacccctcgttcgacccatggtaccgggcagagcagagaggccttaaaaaaaaagcaccacaagccaaagcgtctctggggattaaggatcctttgccataaaactcattttgtgtctcagcagtgcagggattggggatggaaaaagtcgccagtttttgtgtgtttgtgtgtgtgtgtaaagtggactttccactgtaatccaaccacctaagtttatcaggtgcttcactgaggaagcctagttttttaagcacaatagcaaaaccatcagctctgtattttctcctgttatttcattacagtagctgcttgtgggaactaggaaaaattcttccaacatattttaaggcctaaaatcttagttccccattctcctaccttatagattcacaggcctttctcgcctaggcatcatagataaacgtaattgtttggggagttgaatttaatgaacttatctaactttgtaacccatcttggctttagtaactttatcaaggtggtggctttagtgaatataatggtaaactttagaggacgctaaagcctccttttatagcgcttctcaacggtagggagagctgaagggaaaacattctgactgtgtggcagggtgattttcttccttatgaccacttacagtggatatttattgtacttgacccttttatgccctagaatgctgtgagggttaccatgttgaatttgtgcagaagctaaaagcaccagatgtgccagagatgcaatttgtgattatgtttgcactggattgtgatttgaacaggacacttataactaatgagttctttcttttgaggtggggagagggttgtaaatcaagacttcataccctatccttgtagctcggaaattgaggtgtagcttaggctgatgcggagagctgcagacagctggacctccttacacccatcagaccttggaataaaccgaaggtgaatgcagaggactctgaggtgccacccaagagccttttaaaataaatagaagtttttaaaaatgctacttaagagtcactgcagaagcatggagagagagaaaaaaaaaaaagacccaattgggtggggggtgggggggaggcaagggtttacagagtaacaacttacgtgttgttgtaaattacctcatctgtataccttgtattgggacactatttctcagcactacctgtgtctgcattgcttagatggcaggaaatggaatggccaacatgaaaggttatgttggcaattactctgaaagattttttaaagtatttttaaactttgtttgaagtggtccctcccctcttcctctgcttttttttaagtttgaagccagaaggccctccccaccttgctttattggttgtaattgtattgtaattggtatgactaaaccataactgtgctgggaagaagttgtgccatgaaggtctttaattttttttaataaaaacatttaaataaatgaaatgtccctgcagcctgagcaatatgcttctccaaccgacaccgtgtgtgatagatggctccgttttcacgttttgaattctgtttcttgtacttgaaatgcctgtccagcttacataagatagattaaattgttagagtgggactgtcagaggaatatatcttgtaaagtagatcctcagggtatggctaattactatagtcctaaagtagcagagaaaattagagattggttgacagatttgggaattttaatttcttcttagtttttaactttcatctttgcttcaccttttgacaagtatggttataattagaattgaccatttaagcatctcttgaaaaacctgattttgtcccaccagcaaattctctcccaagactggaattgggtttgcatagtagagagcctgtcttcccagggccttttcctagttaaagaaacacttaactaaaaaggctgtgtgg

SEQ ID NO: 12564 - DNA, 1083 bp, Homo sapiens
atgcctgagcagaggtgggggagtccaccctctccttgatgcagcttgcgcctggcggggaggggtgaaacacttcagaagcaccgtgtctgaaccgttgcttgtggatttatagtagttcagtcataaaaaaaaaattataataggctgattttcttttttctttttttttttaactcgaacttttcataactcaggggattccctgaaaaattacctgcaggtggaatatttcatggacaaatttttttttctcccctcccaaatttagttcctcatcacaaaagaacaaagataaaccagcctcaatcccggctgctgcatttaggtggagacttcttcccattcccaccattgttcctccaccgtcccacactttagggggttggtatctcgtgctcttctccagagattacaaaaatgtagcttctcaggggaggcaggaagaaaggaaggaaggaaagaaggaagggaggacccaatctataggagcagtggactgcttgctggtcgcttacatcactttactccataagcgcttcagtggggttatcctagtggctcttgtggaagtgtgtcttagttacatcaagatgttgaaaatctacccaaaatgcagacagatactaaaaacttctgttcagtaagaatcatgtcttactgatctaaccctaaatccaactcatttatacttttatttttagttcagtttaaaatgttgataccttccctcccaggctccttaccttggtcttttccctgttcatctcccaacatgctgtgctccatagctggtaggagagggaaggcaaaatctttcttagttttctttgtcttggccattttgaattcatttagttactgggcataacttactgctttttacaaaagaaacaaacattgtctgtacaggtttcatgctagagctaatgggagatgtggccacactgacttccattttaagctttctaccttcttttcctccgaccgtccccttccctcacatgccatccagtgagaagacctgctcctcagtcttgtaaatgtatcttgagaggtaggagcagagccactatctccatt

SEQ ID NO: 12565 - DNA, 5159 bp, Homo sapiens
tgtgctacacaaagatgttttggccatccttgttgttggccctaattagaggaagaaatggaaagggcccatgtttcatcctaattgataaaaagtttgatatactttagtattactaacgatttaaattgctactttgtaaggttttaagacattaacatgtttaacatgttttaaaacattaacatcaagactgatgattgaaatgctaattctgcagaagtgtctggtctttggaatagaaatctttttttctttcaattcaacatttgtaagtacctgcagaatacctggcacagtgctaggagaaggattcagagacgaatgtgacacattttcttccttcaaggtgtgctcataagtaagccatttatcatttatgtattacactacgtgttgaaatactctgaaaaaattttttttttttttttttgctgatgtacttttcccctttcagccagtaaaaaagaagaaaattaagcgtgaaataaagattttggagaatttgagaggaggtcccaacatcatcacactggcagacattgtaaaagaccctgtggtgagtatagtaggtgttagcaaggcccgccagagctgagatggtgtttgacctggagcacaactggcctctttttgttccctcccccaaccctcatcattaagtcctgctttgaaagtgcttaatcagatataccatttaactagcttgggtctttctttcaaagagacctccacccacagactatttcttattcttctaggctaagagactgatagcactggaaactgaaatgtgttaatccattttgcaaactcaggtccgatgccgatgggcgatgggcgcattgtcgggctgcctagagcctggtgagacttcagctccatgtcttctgtttgaaatccatcccaaaaatgacctaagtgcggtgatgatcagagcggggagggcttgtagcaatagagggtttcttactactgaggcgaggactgccaaatttcaccacgcagcatccgcaaacattgtccccattaaagctgtcagggctattgctaatgtgtgtttttgtttttgttcttttcccctagtcacgaacccccgccttggtttttgaacacgtaaacaacacagacttcaaggtataatatataaccaactgtttcgggctagtgggtttttagaccacatagcctttggggatgatgctgttagaagagcttgcttcgcatttgtttttaaaaagcttttcatccttacagtgcaaattttaagatagaagaactcctatataagcagtgcccactttctgcatcttgatattttgcccatttgtttaatgttctttttaatgaccaacacattgacttctcactacttagttgacagtttctgctgatgtccaacctaatgaaggcagtaacacacgttcacttaggatctggccatatggcaattcgctttaaacaatagtgttcaggaagaaatatattgtatgtataaaagtagggactgcttatttcttaggattcctcataaactgtgggctatagatcttaaaaggcagggatcgaggaaggataatgtcaaattctgccataacacaaacctctataagagatatctcagaattccagtctatccagtggcctacttatttcacacagttccaattttacagaagaatatagctactcttttggagtaaaagtaaaaatcttcgatttgcctttccaccagtccagtatccagaatgttatatattaataaattagtgaattctgttgcagagatagggagaaaggaagaggaactgctttagagtcagaatgataatttcaagaaaaactttgtcagaagacgttgctaaccattaaagagacgtacctgtggctgggcatggtggctttcgcctgtagtcctagctactggggaagctgaggtaggaggatcgcttgagcccaggagtttgaggttgcagtgagttatgattgcagcacggcactccagcctgggcagcagagtgaggaccctgtctcaaaaaaaaaaaaaaaaaaaaaagatatgtccatgtaaaaaacattctgcaactctttggaaactggaaaggatacataacagttgttcagagtttactttccaattggaacaagaatagttttgttaaattgactcaacaggtttggtatcatgccatctgcatacccactggtgatctgcagggccaactatgtaaggcaaagatgagttagttccctactaaggaggcagtatatttgccaaaatgcctcttttgagaaggtctgaagatacatgaaaagcaaactaaattataggtgggtgtcagtgcatattaacgtatctagatcagtatgtttctgacagtggattatagcttccgcaatatatgtttaagtaattcttcatttttaagagttgaagacccaaagtatctctttaaagttaatgtaatgttggagaaatagagggcagtgaatggacagatcttggaacaacggtaaatgagccaagtcttggtttgaattactgtgagtgagggtgaaaaatgcctttctgtcagcattatttcatggctcaaacatttgtctttaacagcaattgtaccagacgttaacagactatgatattcgattttacatgtatgagattctgaaggtaagtgaaccttgaatactaaatattttttaaattggtcttctttttgttaaatagtcaattgatggtagaaaagccagcagattaactttgtaaagtatgttgaaagaagggacctctatataagtttttaataagttaatagtatcatacctgtaatcccagcactttggaaggctgaggcaggaggattgcttgaggccaggagatcaaaagaccagcctgggtgacatagtgagatccccatctctacaaaaaaaaattgtttaattacctgggcatggtggtgtgcacctgtaagtcccagctacttgggaggccaaggcaggaggattgcttgaggccaggagatcaagaccagcctgagcaacatagtgagaccctgtctctacaaaaaatttaaaaattagctgggtatggtggcttatgcttgtaattccagctacttgggaggctgtgacaggaggatctcaggaatttgaggcagcagtgagctatgattgttgcacaggctggagtgcagtagcacagagtaagaccctgtctctaaatacataaataaataaaaattaataataatagtatcagaacccttgtgctaagggttatggaatggggtctagtgggagtataatttagaacaatttgaaaaagggtatttgtaagatagctgggactgaccccttaacaaatatttgtaatttctgtggcccctatgtaagttaatattaaattttcaaaactcgtgaaaacacctgacgtgctagcttctggtatactttatctcacttaagagtcagcaaataaaacagtaaactttaactcagttctcaaagggtaattgtcctaaggattgtgtaaatttctgcttatagatgctaattgaaaatttacttacatttctaaagtggggtcaccaaatatcttgttcccagtagccacaagatcagcttcctagaagagagaattgctaaaagttggctaagctttcttactaaacaagagttgacataaagcctgctgttggagccttagaaatcccctgaggagattgtgccagcagagatacttgatctttccattggctcatgcagtttgtggcaagcaaggctttagaaagttacagatatgattgcccagccctgggaactgtaggaacccaagttgcccttcaggaaggacaagaatttggccaacaacgtcggctgactgaaaggctgggattaacaaaccccaaagattatactactcagttccctttagtttgaggttggaaacatttcagattggatttgatgacctaaatcaggcattggcaaacttctttaaagggccaaatagtaaatattttaggctttgtgggccatgtagtgtttgtcacactattcaagtctgctgttgttgcacaagagcaaccataaacaatatgcaaacaaataggcatggctatgttgcaataaaacattatttacaaaagcagacatcaggccaaatttggcctgtggtctgccaacctctgttacagactcttaatggctaaagaattactgttcttagaataagaggtttgtagtaaagatctgttttctttctttgaggggtctgtggaaataatctaggatctggacaagacagaaaaatttgaagtggtgcaatttgggtatactttgggtcttttaggacagaaaacatgttgaaacaactgtgtcagaaaaagatctctaagctcagagagctgagtttgcttgactgtgagatcatgaacaagtctctgaagcattgctgtggaagtgactgtgtcctcagcttgaatcccaggggtattgtgaggctaaaaggaaaatttacatggagggaaaagtaaaggactcttacgtattattcaggctaactcctttctgacccgttcatcccacaggccctggattattgtcacagcatgggaattatgcacagagatgtcaagccccataatgtcatgattgatcatgagcacagaaaggtaaagtgataggctgacaagtgttatttatctacatgatgtagctaattgcccatcttcaacactttatcccttgtgttgtcacaggccctagtacctattcggcagttgagaaatatttggtgaatgaatgtacgaatttacaagtcaacatgtttgaaccattatttatattcctaagaatattcccaagaaggaaacatgagtaaagtgggcaaaatgttcatcttctaagcccggaaacgtggcttctcgccttatttattgagtaactggtttcctgagaaactactttctctccatttgccttctttttcttacgtgtacagtgtgggtaataatagccctgcaggcgactaggtattcgtgagaattaaatgtgcacagttaagtggacgagatatacagaaaatgctgtttctgtttattggatgtcataagggccctgttgtctgcaaatgcttttacatgagagctgtaatggcc

SEQ ID NO: 12566 - DNA, 1242 bp, Homo sapiens
catggtgcttcccgaagacccttggtgctgagttcctaagggacaaacaaactggggtcttgtcaggacttttttttttttttttttgcgatggagtctcgctctgtcgcccaggctggagtacagtggcacgatctcaactcactgcagcctccgcctcccgggttcaagcagttctcctgccccagcctcccaagtagctgggattacaggtgccagccaccacacctggctaattttttgtatttttagtagagacggggttttgccatgttggccaggctggtctcgaactcctggcctcaggtgatccgcctgcctcggcctcccaaaagtgctgggattacaggcataagccaccatacccggccgtcaagacctcttctaagtacacttagcagcttacacagctgcattcacattcgactgcaccttgagatggcaagtaaaatcattttgtccccatttcatagatgaagaaactgaggttcagggaggtgaacagtcccagcattcttctgggaccctaggtctccagctgacctccagacttggggtgggagggggcggctctccctgtccctgagcacttacagagtaaaagagaggaaggccagttttctaattcaaccttaatattgcaccccctcccctatctgcccttctcagccactcctgccagagtttgtctgagaagcccaagccccaggctctgctgggactgtggcctcagccctcaaaatagccctgcctgtgagtgaacatgctgtccctgggctgcaagagcctcgagggaggctgggctcgcatctggatggatctgccccaacctggacctgggggtggagggggcaggggacagagctcccagatggtcagctgtttctctaagtgggctgagaaagctgcctgttcctccatcatctagccaggctcagggtgatgagcatttacagtgggatttcagacactatcatgtcctggaaacaggacagattgttggacaacatagatttctagcccagctcttttacaactggctgggtgcctctgggccagtcattcagtggctggaggcctcaaaagagggggtgctttaacatctgtgacctctctggcttacggtgaggatgaaacccatgtgtccagtctgaaaatatcaatgagaagagctggtagagacagcccctgtaaggactgatggtttcagggactgccgccattagcccatcttccaatggc

SEQ ID NO: 12567 - DNA, 2742 bp, Homo sapiens
gctcagcacaagtggacaaagtctgctttacaaactctcaagccttgtaccatgtccattgactctgtgcctcttctccccaggaggacccagacagcgtgccccccatcgatgtcctctggatcaaaggggcccagggaggtgactacttctactcctttgggggctgccaccgctacgcggcctaccagcaactgcagcgagagaccatccccgccaagcttgtccagtccactctctcagacctaagggtgtacctgggagcatccacaccagacttgcagtagcagcctccttggcacctgctgccaccttcaagagcccagaagacacacctggcctccagcaggctgggccatgcagaagggatagcaggggtgcattctctttgcacctggcgagagggtctgactctgggcacccctctcaccagctacaaggccttggactcactgtacagtgtgggagccccagttcccacctctgtgacaataggatcatggccttacccttgaagcattaccgagaaggagaacagagatgggcttgaagagccacgtgctgccggctccaaattcccaaggacaaggatccctctgcatttttgtctatgtaacctcttatatggactacattcagctgcaaggaaaggaaaaccttgattgcagtggtttaaacaaacagaagattgtttttccacatagcatggattctggagatgggtggctaatggtattggttcaacaactccacgaaggtaggggtcacgtcttggatccttttgccttaatctcagtgctcgttacttcatggtcccaagatggctgctgtatccccaagaatcatgtctgcgttcaaggaaggaggggtggaggaagaggaagggccaaactagctggacccgtcaccttctatcagaaagtaaaacctcgtcagaagtctgtttcctgctctctccctctgcatatcttcacttagatgcccttggcccgagccagctaccattgcacctctagctgcaaacaaagctaagacagcagggaacagaattgtcatggctgaatagaccaatcgtgttccatctactgagactggcacactgcctcctgcaataaaactgggatcccattaccaagagagaaatgcagaattgtgtaccagttagcttttgctgtgtaacaaaccatccccaaacttggcagctagaaacaaaccctgtattttcccacaatcctatgggttggcaatttgggctgggctcaacagggcagttctgctgctcacacctgggatccctcatggagctaaggtcagctgttacctcagctgggcctggatggtctaggatagccttactcacttgcctggcaggtgacaggctgttggctggaattgcttggttctcctccatgtggcctctccagcaggctagctcaggcttattcacatgatggcttcaggattccaaagagagtgagagtagaagctgaaagacttcttgagttcttggcctggaactgggactaggacagtgtcacttctgctaagttcttttggtcagagcaaatcacaaggctttacccagattcaagggatgagaaacagactacatgtcttgatgaggggaaccacaaagagcttgtggccatttttcacctatcacaaataattttggatgggtatttatttggataaaggtatttccctcttccccctttctctctgtctcatggggcctcactctgccaagttggaaggcactaagacattgtcctggccctcagggtctaggggaagaggtgttggggcaggaagtgagtctctccatgggctggacccactgtagtaggagtgcctccttgtctgcactgctggtatggggttaggccaggtaggacattccagaggggcttctgaaaaccaagagtccctggggaaagggaacagagtaaggcaggccttgttctcactgccctctaagggaacttggtcactcggcacttttaagcctcagtttctccagttcaataataaggacaagagcttttcccatgcattctctttccccgggaaagttgactgaggtgaccagtaatagaattgaaaagggagagtgtcttcagtgcaatgtggcatcctggattgggtcttggaacaaaaacaggacattagtgggaaaattggaaatctgaaaaaagtctgaattttagttaatataccaatttcagtctcttggttttgacagatgtaccatggtgatgtaagatgttgaccttggggtaggctgggtgaagggtatacaggaactctttgtactatctctgcaacttctctgtaaatctagtatcattccaaaataaaagtttatttaatttaaaaaaaaaaagggggggtgtgcaattcctttagaccaatggttcagggtctcaagcttgtttgctaaataccagattgctgggccccacccccactttcttttttttttgagacagggtcatgccctgtcacccaggctggagtgcagtggcacgatcatgactcactgcagccttgacctcccggggcttaagtgatcctcccacgtcaacctcctgagtagctgggactacaggtgcgcccttctcatttttttgtagagacagggttttgctgtgttctctgggctggtcctaaactcctgggcacaagcgattctcccgcctcagcttcccaaagtgctgggattacagacatggccactgc

SEQ ID NO: 12568 - DNA, 1150 bp, Homo sapiens
cacacctggcatattttttgtattttcagtagagacgaggtctcaccatgttgcccaggctggtctcgaactcctgagttcaggcaatctgcccaccttggcctctcaaagcgctaagatcataagagttagccactgcgcccggcccctgggacttctttttagaggtttcgtttgcttgccaccaccatgcttcccatccctgttaacttactgtgaataggtaatacagtcacgtgtttcaaaaaatcagaaaatataaggtgtacagagaaaggttttcatccctttcctctccctcatctgcccagtttctcttaacacacacacacacacacacacacacacacacacgagcacttttatcagtcgctgtttacccttccagagattatacaaatggcaaatacagccttctcagacctctttttttacagaaaaagtagtaaactgttgtgcaccttgcacttttcattcaacaacgaaaacaggctccttgtttttttgccatgactgtgcagtattctcttttgtggagatgccacatttatttaaccaaccctctgtagaaagacatttgaagatgctggagacaaaattaaagatctaatccagaaaacctttccacaaaagtagaagagaaaacagttttattattaaataagcgttaaaccagactgcagtgggcatcacaggcaatccacaaaagagattacaaagagaaatacatttcgtcctcctatataaccaagcaggtataacctattgcatacatgtcctcaaataataactagggccggggtggtggctcatgcttgtaatcccaactctttgggaggccaaggtgggcagatcacttaaagtcagaagttcgagaccagcttggccaacatggcaaaaccccatctctactaaaaatacaaaaattagccaggtgtggtagtgcacgcctgtaatcccagctcgggaagctgaggcaggagaattgtttgaacctgagaggcagaggttgcagcgagctgagatcgtaccactgtactccagactggacaacagagcgagactctgtctcaaaaaaaaaaaaatagttctcgagtcagatgactgcacaacacaatttgcaacttatttcatcccgaattcacctggt

SEQ ID NO: 12569 - DNA, 1677 bp, Homo sapiens
gactgctcagctgttggggaagggatttggcgtggcagatggcatcgtggctgtcgccactgcacacaaagaacactgagttgctggaaactcacagattttctgtccccaacagatctgccatggagggatctggtgcctccagacatgtgcacatgaatccatatggagcttttcctgatgttccactccactttgtatagacatctgccctgactgaatgtgttctgtcactcagctttgcttccgacacctctgtttcctcttcccctttctcctcgtatgtgtgtttacctaaactatatgccataaacctcaagttattcattttattttgttttcattttggggtgaagattcagtttcagtcttttggatataggtttccaattaagtacatggtcaagtattaacagcacaagtggtaggttaacattagaataggaattggtgttggggggggggtttgcaagaatattttattttaattttttggatgaaatttttatctattatatattaaacattcttgctgctgcgctgcaaagccatagcagatttgaggcgctgttgaggactgaattactctccaagttgagagatgtctttgggttaaattaaaagccctacctaaaactgaggtggggatggggagagcctttgcctccaccattcccacccaccctccccttaaaccctctgcctttgaaagtagatcatgttcactgcaatgctggacactacaggtatctgtccctgggccagcagggacctctgaagccttctttgtggccttttttttttttcatcctgtggtttttctaatggactttcaggaattttgtaatctcataactttccaagctccaccacttcctaaatcttaagaactttaattgacagtttcaattgaaggtgctgtttgtagacttaacacccagtgaaagcccagccatcatgacaaatccttgaatgttctcttaagaaaatgatgctggtcatcgcagcttcagcatctcctgttttttgatgcttggctccctctgctgatctcagtttcctggcttttcctccctcagccccttctcacccctttgctgtcctgtgtagtgatttggtgagaaatcgttgctgcacccttcccccagcaccatttatgagtctcaagttttattattgcaataaaagtgctttatgccggcttttctcagctctgtgtcatggtggttattttcaggtgcctcccctgccatttggtgcagggggatggggttgggcagggtgaaggagggtggcagtggggatgcagtttcaagattgtgtcttggcagaagaatgcagcagtgaacatccttcctcactggctattaacgggttgggggtcagaggagggggaatgtggggtaggtttgcatcaaaggagctgcctgaaagggcaagctgggatagtcagggaacatcccctcccctgttaccaaatgtttattaaatatgtgttctgggtagagcactatgctcggggttcttgggttacagaaaagtgggagatacaacacatttttgagaagtgagtcacagtccacttggagatgtgctacaagcaactgcaagcaaattaatgagatacgaagagaagactctgattttaaattggtattcctcagtaacatttaatgt

SEQ ID NO: 12570 - DNA, 1071 bp, Homo sapiens
tcccatccagagcccacgttcagccaccatggagtgcagtatacactccatccctaactgccaggcccatatacatacacttgacctccccctacctccttctcacagtgtctgcttaattaattagtatattgcagaagagattgtaaaaacacccacttaaaacctgtatcatctacggtagtttgcacagggcccccagcacctctgggaagtaagcgaggcaggtgatctaactcttacctatattgttgatgcagccaccacagttgagagacagtccctctgaccttggaccagggatcacactggtctggttccaggctggggaaggatgttcccagccctagttttctgttttgggcagtccagatggaaaggcccatccacccagataggttttcacaggtttagaagaaaaaggatactcagccactggttccggggcttctgaattcagttctcaactggggcattttggatctccccaaaaactggttggtaagagaacctcctggcattaaatgggccaggacaaggatgcatgtcagttcattggatatgccttgatagatacccaaaactcatcaaaatgaaaaataggcaaagtaattgtcatgatgccctttctaaaagtgcagttttaactagtctttgctgtgggatgtgggttgtttgatcttgttaacaatcatgcccagcaaccctgtaggtagagtcttgcacagatccggctgcttcctcagtagaaggccagggaagaagcaggcatgtggtcaagagctaggcatggctttaatggcgttccaaagtgtcttccagaggggcagcggcccttttcatacccatccataggacaaagcatgcccttccctgccaggagcttaaagatgacttagagctcattcaggggaagcagctggtacagaaataagggttccctgctgctccctgtctcctaactcccagcatttcagagagaactgccaactcctgattcccaggcccaaataaaaggccttccttctttaaatgggcgttgggctcctgtgttgagggtgtgtggctggg

SEQ ID NO: 12571 - DNA, 1211 bp, Homo sapiens
ttgtgagcggaggcctagcctgttcaaggtctgaatttttacccctagaatgtaagaagcatgggagcagggactttgttttgctccctgccatatccacagccctagaaaaacgtcgggccattgatagctctcagtaaatgcttgacaagtaagtgaatgaacgaatgcacaattaatgaaatgagggctgcgtcaatgaataactgggaatctgactcctgcagggagccttcagcccacaggtgtatgtaagacccgccccgcctctcatccttcgggctcccacccccgccgttaggctgcggttcgcgccgcggtcgccagagggcgcggagcggcggggcttcccgcacggagggctttgcgtgaggcaccgcgtggggcggggctgcgggcgggctcccagctgctgggccctcatcggctgggcctcgtcgaccggcaagcggaacgcggcagcggggctgggcctgtgcggcggccgccggagcgctttggaaggcgcacggggcgaagatggcggcggagcgacaggaggcgctgagggagttcgtggcggtgacgggcgccgaggaggaccgggcccgcttctttctcgagtcggccggctgggacttgcaggtagcgccgcgcggcgggctgtgtcgggtgggccggggactgctgggagcgggcgcctggtgccttaagcccgcggcggccgaagcgcacagtcatccccgctctaccgcggcccgacccaggcctcatggtcccgggaccgcttgtcacgcgtcgcctgctcggcttgggagtgggggaacgcgggccagccccagccagttctgccgtgccagtttcaccctgcctcgcccgcttgcggcgtcagcgagacttcgggcgctgcggcagccggcgaggagagggagcgcctgggggcgtggctgccgcgccgagtatctgctggaggccgggctggtccgagtgagcagctcttgggtgaagccccactcgggactaggtggccgctcatttccacttccgaagtccagcccgggagttgaccgccgcccagccttcctaattgctgggagaatacctctggggtggtggcgcaaggttggagcttcttcaccttgcgtagttaacttatctgtaaaatgggagtctcgtggaaattgctgtgtagttcattggcacgtactgagtattcactaaatacttgctaa

SEQ ID NO: 12572 - DNA, 1966 bp, Homo sapiens
gaaatgtgaaacgtgcaatcttgaaactgaggtgttagaaaacttgatctgtggtgttttgttttgttttttttcttaaaacaacagcaacgtgatcttggctgtctgtcatgtgttgaagtccatggttgggtcttgtgaagtctgaggtttaacagtttgttgtcctggagggattttcttacagcgaagacttgagttcctccaagtcccagaaccccaagaatgggcaagaaggatcaggtcagccactccctggagacacagccttctggctgggactgacttggccatgttctcagctgagccacgcggctggtagtgcagccttctgtgaccccgctgtggtaagtccagcctgcccagggctgctgagggctgcctcttgacagtgcagtcttatcgagacccaatgcctcagtctgctcatccgtaaagtggggatagtgaagatgacacccctccccaccacctctcataagcactttaggaacacacagagggtagggatagtggccctggccgtctatcctacccctttagtgaccgcccccatcccggctttctgagctgatccttgaagaagaaatcttccatttctgctctcaaaccctactgggatcaaactggaataaattgaagacagccagggggatggtgcagctgtgaagctcgggctgattccccctctgtcccagaaggttggccagagggtgtgacccagttaccctttaacccccacccttccagtcgggtgtgagggcctgaccgggcccagggcaagcagatgtcgcaagccctatttattcagtcttcactataactcttagagttgagacgctaatgttcatgactcctggccttgggatgcccaagggatttctggctcaggctgtaaaagtagctgagccatcctgcccattcctggaggtcctacaggtgaaactgcaggagctcagcatagacccagctctctgggggatggtcacctggtgatttcaatgatggcatccaggaattagctgagccaacagaccatgtggacagctttggccagagctcccgtgtggcatctgggagccacagtgacccagccacctggctcaggctagttccaaattccaaaagattggcttgtaaaccttcgtctccctctcttttacccagagacagcacatacgtgtgcacacgcatgcacacacacattcagtattttaaaagaatgttttcttggtgccattttcattttattttattttttaattcttggagggggaaataagggaataaggccaaggaagatgtatagctttagctttagcctggcaacctggagaatccacataccttgtgtattgaaccccaggaaaaggaagaggtcgaaccaaccctgcggaaggagcatggtttcaggagtttattttaagactgctgggaaggaaacaggccccattttgtatatagttgcaacttaaactttttggcttgcaaaatatttttgtaataaagatttctgggtaataatgagtccttccggtgttcagtattcttgtctttgtgagtgcgtcccggggccgcctcggggcctgcctgccctcctgccaaagcctggaagaggattgaatggaccccagggtttggaaacaacctacagcatttgagcccctcacgtaggttttagagacgtacaatttttgtttgccctggctcagaaggagccggtgtaaggttgagataaaattccatatagacaactgagtttggatctcggctctgctgctttgtagctgtgggagttcaaacagcacctctttgagacttgggccccgcgtcggcacaatggggcaggaatagtccctgccagggtgactgtgtggattcaaggaggttggaagcactgagcccacgcttggcactgggtaggccatcactgaggcttgtgtctttccttcctgccctgaccctg

SEQ ID NO: 12573 - DNA, 1612 bp, Homo sapiens
ttctacaagtcaggaaaaaagagagggaaggtcatttgctcagcatggagtaacaatgatattagaagcaacagacccgtgacagccttcttgcatgctttcccttgtcccatctgcccagcagctttgggaggtgtgggtggtatggcactccctgtttggagacagtataatgaaacaaaaaggcttcgcagtcaaccagacggcagtaaacccgagtttccacctgggcctcattccaaacccaggtacctgacaccagtccctggtgcctgtgtcataccttagaaaggcactcagtgccagttgtgcaggtccccttggagcagttgtttgtcaccaatgtcactcttgaatacactgcatcctttagttaaaaagaagtgtgactgtgtccatctcactcaagctccttcctgtcttctttgatttaggagaaaggatcctgggttatgctgaggagccctgctatctctggtttgtcatggagttctgtgaaggtggagacctgaatcagtatgtcctgtcccggaggccagacccagccaccaacaaaagtttcatgctacagctgacgagcgccattgccttcctgcacaaaaaccatattgtgcacagggacctgaagccagacaacatcctcatcacagagcggtctggcacccccatcctcaaagtggccgactttggactaagcaaggtctgtgctgggctggcaccccgaggcaaagagggcaatcaagacaacaaaaatgtgaatgtgaataagtactggctgtcctcagcctgcggttcggacttctacatggctcctgaagtctgggagggacactacacagccaaggcggacatctttgccctgggcattatcatctgggcaatgatagaaagaatcacttttattgactctgagaccaagaaggagctcctggggacctacattaaacaggggactgagatcgtccctgttggtgaggcgctgctagaaaacccaaagatggagttgcacatcccccaaaaacgcaggacttccatgtctgaggggatcaagcagctcttgaaagatatgttagctgctaacccacaggaccggcctgatgcctttgaacttgaaaccagaatggaccaggtcacatgtgctgcttaaaattcagggctaagcattttgggtgattttaaactaggtgagtgctctctgttgttgttttttgttttttgttttgagacagggtctcactctgttggtcaggctggggtgcagcgggtgcagtggcaggatctcagctcactgcaacctccacctcccgagttcaagtgattctcgtgcctcagccacctgggtagctgggattacaggcacctgccatcatgcccggctaatttttgtatttttagtagagacggagtttcaccatgttggctaggctggtctcaaacttctgacctcaagcgatctgctggtctcagcctcccaaagtgctgggattacagttgtgagccaccatgcccagcctctcttttttttctgtatgcccacttcttggaccgggttcttcattctggaccctggcatgggccctgtgaacttgcaggggaatacaaagttgaagaa

SEQ ID NO: 12574 - DNA, 1058 bp, Homo sapiens
ctgggtcttcagcaggcatctgtcactgccgtgaggtcagcgcttctcacctaactgcctcctggattgtcatcttcccagatgtgtcccatagtgtccaggtgtcacagagacggcctgaggccctaagatctggttgtgactttgccatgataacagggtgtcctgaactggctgccgttgtcgtgttctcacagtgaagggcgtgccctgtgtgccggggtccatggtgtcatatgcagtgacacacactgtcaagcgccatttccctcacccctggagacttactgttaggtgcctgccctcagtatagacgtatccaatgggaaaacagcggacctgcccagagcagggaggtgtcgtggaactgggtagaccccctgcagcgttaggggcccatttgtgggctcgccaccttcaggcttccccagccatgacacttcagccccgccacccatgcctgtctgctgcagccatccttgcactctccagcgacactctcgcacctccctaggggaagcttccctccccctgggctgctgctctgagcccatctgttctccccctgcaagaaggggcaatgctcttgtgttgtccctctgtctggacgcgcctggccactccgaaggcttttcaccccattatggccaaatagtatagggccactggggagggggaagggaatcattttgtgttcatttttgttttctgtttcacctaaaccagcataggattgataggggagacggttggcgggcatttccgtttctatgtgaccaaggcagcaggggcttttacctgctaagcggcaatcctttggccctgagaatttgggagagaacagtgcatcaggccaggctcagcaatatgtttgctcacattctttcagccttctgtcacccccctcaacaccaaactttcttccttgtgagcagaaggttggctgctgttagcaggatcccacagtgataaccaggcccttcccttcctaagccaaaacccattgtgactgcctgtctctcctgtctctgacttctcaggcagcctcctgagtgcac

SEQ ID NO: 12575 - DNA, 2447 bp, Homo sapiens
gcataaatgcaggccagcgttttagccccaagtgcctgcccttgcttcttacccctcccctgctttctcaaacacttgcccacctcaggcactcagcgggctccgccgtggtgagagaactggccgtggctcagccccgggtagcacctgtagtttcagtgccactctccactgtccccttgtggaccagcttccactcactgtcacgtcccccctcctgcgtcttcactgggtctcaggctgccagcagctctctggtgcatcgtctcaacaccaccaagtttgtaggacctgcccaagttctagtagtattcaaaacttcaaacggcagtcatttgttctcctcggctctgtggcaaggatagccctttggagggggactcttgacctcggctgttagggatctgaacttggttttcccgtcagaagaatcagcaggacagatcgtagtgccttattccattgtcctcccctggccaggcctcctggctcagctggaagtgcatggcttctttctccctatctgtgtcctctgtcacttgctctttcactctctctctcattcccagagagccacgggggagggatcaccctcacccccaacaccctcttcctgagggctgtagccaggtccgcatctccccaccaccaccagggcactcactcgcagctatagcccaggacagaaaaactgtgctttggacaggtgcacactctctgcctcttacctctagccaggaggatgcctcagtctgttcattcgagactggccccgtctgaaccttctctgggcactggggactaaggttgcaggccttagcctcgtctcgtcccagaggcattggatcaggagaatgggaatttttttcctcccacctggacatagtttgcccctgtggctgcctttctgagggagtatactaaatgtttacttaagaaacaccctgtttacagccagaggagaaacacccaacactgagtggagatttgactctggacagggcctggcctccttagtggcactgccggggggccccagagcgaatgagggcagagatgcccggggcaggggcaaacgccctccgctccctctgctcccaaccctgtggtgctaggaccactccccgccttccctacggcctcctcgccctgcacattccccacctccacattcccctcctccaagatctcagctccttaacatatcagttgtctcctagcctagaaaaccagtgtttggagcaataagatgattatttttgcttgaatctttttctaagagaaggaaaagagctggcattgtgggaattttctttttatgctgttagctgtttaccttcttagaagacatcctaataggatggatgtctgggttttagccttggggtatcttttggaaacttagaaaagcaggagtcaggctgccaccccctaaggagggaccctaacgttctgcccttgcctggttccatatggctccttccagccctgcccaccaagtgcagctcccactttccatcctgcccatacgcccctcttcccccgacatctgggggcgctggtggcacttactctaggttggtctcagactatccctccccttggctggttttccctcctaggcctgtctggcagcccccagacagacgtagctcctgggagtctcggccctggcaaccttggaagagccaagctgacattgtttagctcttcaggccactgggttttggaggcagaagtccagagatactggctctgccaagctgtcgtactgggctgtggcacagccttcgagacaacacgggtgtatctctgatcctgccctacctaggcttcaaggggcttctgtctggagaaatgccctcaaagggtaaccagtaggtgtggcattgaattggccagtgttagcatctacagccatcaccgagatgagtccactgccgttgcctgcccgagggccccctaaggttatagacggtatcagcagggaggccgtcccgctggttttctaggagagcccacaggaggaagggagcctcttcaggggcactggaatcttttgtgccaggggcttcttttcatcagagccggggagtacattgcagtgacttcttaaacatttgtgtgggacagacgagcgtgagggaggttttaagccaggcacaaagttagtttccaatactagttaataaatctatttttcttcatttcctttttttgcacagaagctggtaatctaggacctacgtgtgaacaactttatatgaatattttttgtacttggtttacttgggttggtatgatacattatatttaagttccttgaacactgtggatcccctaatgtgtatgaatgactgaggctttgtaaattaagggacgtttgtgtgaataaagttatttgatggggtcaaagaagccatatgtgatttgaaaaagagtgtttt

SEQ ID NO: 12576 - DNA, 1215 bp, Homo sapiens
ggcagcggcctcaggacacaatgaaataatgcattctgaggatccctaacagaagttatgagattgtcttatgctctttggtttgacagtgcctagtaattaagagggggctctgggctttgctgtactattatggatttctctttaacttcagttggagaaattctgagatcagtccccacatggatgagaaaataggcccccagggagtttggactccaagcccagtgttctttccctataagataacccatgggcaaacttggtgacccctgtttctctagtctggattattcctctatgggtttttatagacataggaacccagtcagcctcagagtagtccctagttagcacatatgccatgtatacccctctcctcactcgattactgcagggcgtgggaggctggggcagggttggggattcaagttgcagatcaggcactgactaaacttcttactcttacttcaggccttctttgacccttggccacagagtatggaagtagctccgcagaggcgtgggctcgattcctcagggccacgttaccacagacctgtttgtttcttatgctgttgttcgtggagtctcatgggattgtctggtttcccttacagggccccctcccccgggaatgcgcccaccaaggccctagactcatcttggccctcctcagctccctgcctgtttcccgtaaggctgtacatagtccttttatctccttgtggcctatgaaactggtttataataaactcttaagagaacattataattgcacctatggatctttatttttagaaaaatctttgatatattgggtgcttaatagagtcaagaagggttgccttggaaaaaattaaccctgatcttaccttcttccctataaaatgttttactacccatttgcatctgtacatcctcatacactaagatacttacaaaattgaacattttcacttatcagattcaaagatcagttttgttgaaatcagtacccataatatcctcttgggaaggcacttgtctagatagcttctccatgaagcaaatgctaaaaatgaaaattctgctgggagaggaacaattttggcataactttctgccagggtcacacacgtaacatataacctaacgtaacttttgaattgtggtatcttcatgagttcttccacccaaagcctgtgttcactgagcagcactctagtacttagt

SEQ ID NO: 12577 - DNA, 3035 bp, Homo sapiens
atttctgtgtatgtgaaatttctcttaaccttttccttctatggcttctcctatttctgatgtaagatgaggggcagaattataggcctgtgaggttgaattgatattagaaggacactgcacgtaagtgaggtgggtgggagtcatttgattggaattgtttaggcagcctcctgatgttggcaagaccttaagctgaagggagggaatagggtcctaagaaagaagacttggctgagggaagggccttcacggttgctgtggaatagcatttgggcccgggctgggctttgttgaccttgtcctatctcttggtcagtgtgtcctcttggcatggtaggaaacaggtagatagccacctaagaggttatgtgttcagcctgtagagactatccaggagggctatcttgggaaagtttgtgtactgtttgttaggagatgcagtataagcaaatcttggaggccactaggcaggtgaactttacccacctctaacactttttttgttccttctaaacctctctttaggccaaagaactccaaacaagcagaaagggaagagaagcgagtcctcggtctggtgctgctgcgaggggagaatctggtctcaatgacagtagagggacctcctcccaaagatgtaagtcagagcaggaagccttgtggaggaggggaggccctactgtgagccaggctctgtgttagattctgtttcattgcagttctcacaggcatcctctggattttgccccctttttcagataataaatgaaatcttaaagaggttaccctgcaagaggccgggcgcggtggctcacatctgtaatcccagctctcagggaggcaagaggcgggaggatagcttgagcccaggagttcgagacctgcctgggcaatatagcgagaccccattctccagaaaaaggaagaaaaaaaaaaagacaaaaaaaaaaaaaagaggttaccctgcaagaaagaagtggaaaaggggaactagaatttgggtatctcagactttaaagctctacctgtttctcagttgatgtacatagtgagtcagtggaggaagcacctgaagccatctgggtcagttcttaatgtgacgacaaagcctaggtagaccttaaaaagttgtaactccgaaacaataggaaatgtgtgtattttgttttgtacagttacagttcatagttactgagaatctaccttgcgccaaccacttcagtattttatttgatcctttaggtctctttagagataaattctcatcttataaatagaataaaccagggcttagtaacttgcccaaggtgccacagccactaagtggtgaaactgacatttgatctcagacagtcttgattctgtaaacaccaagctacacatagaaatagagcaggctttagagacctagtcaaatttgttttccctttccctttttcatttgaagggttttttttttttttttttttagatttttagatggagtctcgctctgtcgccaggctggagtgcagtggcacgatcttggcttattgcaacctctgcctcccgggttcaagtgattctcctgcctcagcctcccgagtagcggggattacagatgtgagccaccacgccctgccaagacgttattttaatcaaaagagaataatccttttaactttttaaaaatccacatatattatctggatttttttgtacttaacacatagtgggcatatattatgttgttctgtgttttcacttaatgttaacatttttctagttgctcaacacttttaaagtcaagttaatgactgagattttctcaaatgagtacagagtagtttatcctaatcattttcttttttggagatttttacgtttttgccttttccagttaaaaatgtctgcaagggatgttagcatatcttggttcaaagtccatgtacatattcaaatctcttagtacctacttccagtagaattggctggtctaacataacccatcataaacctttgtgatcacaaccagttgtaccataaccatgtcatttgcagataaggcaactcagcccgggattgtgggattatttgtccattgtcacctagcggattagaatcagctgggaatggatctcatgtccctttaatgccttgcctgctgaaccctgagtggaaccctggccctttgctcttggtttaactttcacaggagtgcatataggtggttgagttgtggcatgtttctctagacttactcttaagttctaccctgcttcagggataactcatagtcttggatggaggaagaatggtgttggcacacatggagaggtagtatttataagctatttcgatagtatttataagctatttcgaggggctctcttggcaatgatattccaaagtatacttctgatcttcagatcactgggcatcagagcatatttgtttatttttcagactggtattgctcgagttccacttgctggagctgccgggggcccagggatcggcagggctgctggcagaggaatcccagctggggttcccatgccccaggctcctgcaggacttgctgggccagtccgtggggttggcgggccatcccaacaggtgaggagttggggaaagggtaccacctcctggtggctaaaataaaggataaaggggagggtccatagttttaaaagggtccagagtgaccaacctgtgattgtcagactatcagtgtttcactgtggtttatacatggccctagaagcaagtgaaaaggataagttgccattgtaaattatgttgatgctattaaagagatgtacgaattagccaactgtatttaaggaaaatatttccatgacagcatttgaaatcatgagtcatatttgaaaatgcagttgccttctctcacttggattggacatgcttacattcaggtctagaagatgggagttgggcattcaagcttgatctttcccgacatgtggttttggatgggaagtctggtgctgagagttgtagcattaagggatttggtgtctgttatttcc

SEQ ID NO: 12578 - DNA, 1203 bp, Homo sapiens
tataatatgagaaagaccgatttcaagggaagagagaatagcagattactgggtagaggtcagggctaaaacagggtggcatgggagaattcctaggaaaaggctgtgggtgggagactgagctaagaatctgttgagaaagttggacacatggacaagaacgccatgggaagttttggggagggccagaggtgcttgggtccaaaagagcagagtctcatccctgtccatttctccttgcagacggtgggcaagagcagcaagatgctgcagcatattgattacaggatgaggtgcatcctgcaggacggccggatcttcattggcaccttcaaggcttttgacaagcacatgaatttgatcctctgtgactgtgatgagttcagaaagatcaagtgaggagtggactgtggggggcggagactggaggatgggaatggattgagtgggtgggccaagcaatagaggtggtgatgtagctagttggttcttctctgtttattctccagttttagagggcagacttaaatggggacattgaacgctaagaaatctttttgagtccagcaaaccttgctctctagtctagcaaagtacaagttgtgaagggctgctaggctttttgtttctctcactttgcgtgcccctgggtactggggtaaagggctctcatgttctccccacaggtgtgtgaggggggagagcttgagtttctggcctcattgcctatttgtaaagctgtagcctaaagggctctcccaatgcagcctggtctgaaactgctttaagaagcctctgaccctcttcagggtaagtgctcagctccccatgtgggtttggggccagtgatttttgttggcatttatacaaacaattggagatattgtctactttgctacaattccgtaagttattggctaactcccttgccttgagtctcacagatcttaagcttttggcccattaaaagatatgatttagcttcccatcatgttttacattcaaggctacttgaggcacaaaaagatgatgtgacttccgtggccagcagctcttttgtcatatgcagtgtccatattattctgtcactcactttgaattccctttgattctccttggggctgatttcttctgtgacccaaggtcaagaagtatagtttaaaaatgtggtagggatgccttggtgccaggtacgtattagag

SEQ ID NO: 12579 - DNA, 2453 bp, Homo sapiens
agatccttggggctgaaaaggccctgttcaggtaccagtgagggcacctgcccacaatcaggtgccacttctggtgcccactgcttgttgggggatcacggtgatggctgaccagggctccctgacctatacaggcctctgctatgggggtgatggccagtcctggtgtctgagtgattcccagggcccagcaaagggaccaagtttccaggtcagcgacattggatgccttccctctgcctctgggagctatgggttggcatgcattggggtagagatccaatctggcctgaggctcactcaggacttcggggtgagaggaggggaggagctgagctgccttggctaatggggttgaaatttctgatcttaaactctccactgaatattctctcagagccctgaagacaaggggtaacactccaaaatatggactcattttccactccaccttcattggccgagcagctgccaagaacaaaggccgcatctcccgatacctggcaaacaaatgcagtattgcctcacgaatcgattgcttctctggtatgggtgggggggcgttggcaggtgtgagaaggggctgggtggctgggtggggaggcttgcaaccatagcttccacaatgatggcaatatttttcgtcaacagcagttcacctagtgagtgttgagactctgggtctgagtgaagctgagggtagagggaacacagggttggggtagtttctctctttgggctgacaggctttgtcacccacacacatccagaggtgcccacgagtgtattcggggagaagcttcgagaacaagttgaagagcgactgtccttctatgagactggagagataccacgaaagaatctggatgtcatgaaggaagcaatggttcaggtcagttgggctttgctgggtgtggagtggcatagctagctgttggaggtgatgaactgtctgagcctgaccttgtagaatggaggcaaaaaaactgatttaatgagcctgatccaataaagccagaaaggagtcctcagagcaccagaagtcttcaggcccttttagcacttttctttgaccaggcagaggaagcggctgctgagattactaggaagctggagaaacaggagaagaaacgcttaaagaaggaaaagaaacggctggctgcacttgccctcgcgtcttcagaaaacagcagtagtactccagaggagtgtgaggtcagtaggcagcacggccctggcagagatcctaggttgtaggattttcaacagcagaacaaaggatatgctgcatcaagctgtggtcttgagtccaggcttttggactgaaacaaggacctgaaacatctaaaactacctcttgattctataggaaggagataggtgctgaacttgctcaagagcccagagagctggttgtagctcacacccgttccctgggcatgtgtgttctgtcctcggctgcctcccaggagtcctcaacctggggtagtgtaaattcctgctctgcttattatcagacgtgtgtccggaggtggtcgtgtttcacagtggggatgggggcagggaggtccccaatgtgctaagctacaatcattctccctgagattttcatttagcacccagtttcttaaacagtgtttcagggccctgtctggaacttggcatgatggttctgttgcgaccagcatggtgggtgttttttaggtttttttttttaatgggctgaggtaatttctcatgacatgttttccttctaatttgggacagcctttggggtggatttctaaagttatacccacacaattaaactatcccagaaacactgggcaatgttaacgacacgcgttcccctgccttggctacttaattgctgaagatgtaatgagcactgttctcacagcctgttcccctgtccttccctttaggagatgagtgaaaaacccaaaaagaagaaaaagcaaaagccccaggaggttcctcaggagaatggaatggaagacccatctatctctttctccaaacccaagaaaaagaaatctttttccaaggaggagttgatgagtagcgatcttgaagagaccgctggcagcaccagtattcccaagaggaagaagtctacacccaaggaggaaacagttaatgaccctgaggaggcaggccacagaagtggctccaagaaaaagaggaaattctccaaagaggagccggtcagcagtgggcctgaagaggcggttggcaagagcagctccaagaagaagaaaaagttccataaagcatcccaggaagattagaatgcaaatggacattctctgggaggtggggcataccatagcccaaggtgacatttcccaccctgtgccgtgttccccaataaaaacaaattcacaagagttggttcatgttctttattgaacaccttacatgggtatggacagggcctatgggtggggcaa

SEQ ID NO: 12580 - DNA, 2453 bp, Homo sapiens; identical to SEQ ID NO: 12579

SEQ ID NO: 12581 - DNA, 2453 bp, Homo sapiens; identical to SEQ ID NO: 12579

SEQ ID NO: 12582 - DNA, 2453 bp, Homo sapiens; identical to SEQ ID NO: 12579

SEQ ID NO: 12583 - DNA, 1175 bp, Homo sapiens
ggacaaggaatagacgccagcttaggcttcccaggggggtgtggcttgttgtcaagagggtggcacacggcaggcaccattgggagccagctgctttgggacatgcccacatcctccccagataatgccaccacagggtgggtgctgcttcacggtacagcttcctcctggcgtgccccttctggcccggggcctctggtccacatcacttcttgccttctcgtggttctgacttccgcatctcatggacctctttttacagcaggctacaatgtggagtcctggccagctctaggattggcttcccccgagtcatgtggccaaactggtctaatgaactgtgtccaatccagagagcaaggctgcctagggctgcccattggcaggggctgtgggccggggtctgtgtttgatgcacagtgcaagtctctagctgagcccactagggtggggagacagtaagcttggaggcctgagctccttccctgggtcctgggccaggcttctggggtttgagcagccacaacagagaacttgctgcccccaggtatttcctgccaattcagacccagaaactccagtgctgaacctcctgccggagccccaggtggcccgcttcattcgcctgctgccccagacctggctccagggaggcgcgccttgcctccgggcagagatcctggcctgcccagtctcaggtgggcagtcaggccagggttggttgggcagggcttggatgcagggtgcatccttcactgtggacacaccctttaccataaactcaacctccaccagaccccaatgacctattccttgaggcccctgcgtcgggatcctctgaccctctagactttcagcatcacaattacaaggccatgaggaaggtcagatataacccctatgacctgggaaggagggcccacccatctcaggtccccttcccaccttcccaccggggcacaacctgctgtgactgcgcttgtatgcccctgctgcctcctgatgtctcagccttctctcctgtggacccctaagctccatcccactttcccttattatggcgcccccccagtcctaccccttcctcccggctctgctgccgctcccctcctgtaccatgatgggatgccccctctgtgtgggccatcgctgactttttaagtctttccatggca

SEQ ID NO: 12584 - DNA, 1180 bp, Homo sapiens
ggagccccgcagatgtagtttctcatgctttctcatgggaagccctccctggatccctgtccctttcctgctttccctgctggctgatatccacccctttccaaactgctctctcgcaagtctttctgtctggaccttcattctctagagccacagaggaggccagagtggctgcccccaatccacaggctctgaggtggctgccacattcttccttgggctccctggctagtatcctaccttctcttgctgcccaaagactcagatccaggtatctgatacctatattataggactgtgaggttcaggctgggaagaaaggggtatcatcccacctgcccagccaggaaggagaaaagggggcctgatgaagaagggtggtcattgtatatttgaaggacactgagttgtggggaggggctctcaggcccaaggatggaggcagaaagccaggccaagcagggtcaagggcatgccacaggctctcaggagcgggcccagccccatgagcagcagcagcagtgcgtcctggaggctaagttgtcctgagactgtacccatttgcaggagtagagcctcctgctgtccaggaccttcaccggccccctgactctggcccctggtgagaagtttgcgctgtggcagagtgtgacctgcgggcctgtggagagagagggtggtgactgggcttagggaagttgtccactggcccgcccgcctacaatgcccacctgccaggctgctgcccacttacctatggagcaggtcaaaggtgaggaagctgaccagaagcagcagcagggctgggccagtggtggaaaagactgcctggattgtcagtcctagtgcccccagccataggacactgtccaggagctgggcccagctagggccccaggtggatacaggtggacgcactggactacctgacccctccccagcacccaggccccttggaggaactgggatcggatcctcacgtgcttcgggtctgggtaagcagagccgggtcatggagagaggtggaggtgacgggaagacctagtgctgaaaaggattataagggtgagagtaggggaaggggtagggcccgggcagacagaagggtgagctcagagtggggaattaggctcctgcagagtctccccctcccccatacccacccagcaaaccctcctca

SEQ ID NO: 12585 - DNA, 1046 bp, Homo sapiens
acgccccctggcctggccccaggagtaagcagcttcctacagatggctgtctccttcacctaccgacacctggcactcttcacagacacaggctacatctggatggggacagcatcactcaaggtatgatcctggggcaacacaggggtactgtgccttgtccagggtacaagatcttttggtgatgcgggagggcttttcgactagaatggtgactgctgggacagggccatgacattgcccacaccatttcaggagaagctatgtgagttcaactgcaacatccgggcacctccaaagcagatggtctggtaaggatgggggtgttattgctgggggtgtgggtgagacatagcttgcttcctgggacaatcagttccttgattcgtcatgtctactggccaagcctagtggagtttggatcttaccttctctgccattgcacacttgaaggaaaccattgtcctctgtgggccacagctgccttgagctgagagctcagggataagagggaagtggagaggtcagtgtacagtcagtgatgcaagtgtatacaggctgtcccgagacaaaggattatgagcagccatgtgggagacatggccatgggacagtgtctagccagtgtgtatatgctgctcacaggtgcagccgtcctcgtagcaaggagagggccgtggtggtggcctgggaaaggcggctgatggtggtgggcgatgcacccgagagcatccagtatccttggagggctgcctgtgtgtggagagaggggaggggagggttcacctgccccgtcccatctgtaggtgctcttaggagccttaaccaagctcaggtttgtgctggatgaggactcctacctggtgcctgagctcgatggggtccgcatcttctcccgcagcacccacgagttcctgcatgaggttccaggtgaggccttcacaagggcaccacataacccaaggtggggactcctcggcaccccagctgccctgggccagtgccacagagcaggaatagggtgttgaggcagggctgagggtttc

SEQ ID NO: 12586 - DNA, 1206 bp, Homo sapiens
gggaccactgagggacggatttcacctaccaggacgtgagattttcatagctggcactcggggctatggctgaagtgtctgagaaaagaggaacgtggaaaagcaacctgatatcactccactgggaggccagaggggctctcaaataggacctgggttccaggcatgcttccccagggagagcaggagctgctttctcagtggggtgagaggccagcaggctgggtgggctggctggcatgtgcccaaggctcctgttcagctgggcttttctctcccgataggaagaggtgaaaaacttcatcacccgagagaacctggaggcacgggtggaagcagcattggactcccggaagaactacaactgggccatcaccagagaggggctggtggtcaggccacaacgcagggactcctaggggcccagtaaggacagtgcccgccagggaccatgtatgtatcatggcggaagagttggccctgacctggaataaagcagttggtgttgcttatgaggaaggttcagccttatccagcacagccttcacgttttgccctctgctgtcaccacttggtcagaaacttccaaacgcagtgccctgttctgccggtgtgtacagcctcagcgcaccaggagaccctagagtggtttccatctcacagagaatcagacagggccacagccccctcaggcagccaggtcatctgagtatcattaagagtagtgatgggaagattacagtctgagggccaaacgtgcctgcttcctgtttttgtaaataaagttttgttggaacacagccacacccactcattgacttctttttactacagtggcaaaggtgagtagttgcaacagagaccatatgaatcccaaagactaaaatctttaactttttacaggaaaagtgtagtgatctctcatctggagctttaggactctagcctgtgtcacccaggacctgagccacaagctaaccattggccaggcgcctgcctctgctctatactgtgctttgctggccagagtctggtgtatccaagacccagaaggcaaagaggagaccccatttttttctgggttccacaaagaggttgtattttgccttacaggtaatgaagccatgaagaattaaatattctaggctaggattagcaggtgtgtgacttaaaagcagggaggccattaggagtgggtctctccac

SEQ ID NO: 12587 - DNA, 1184 bp, Homo sapiens
catccgggaggacatcgcacgcaggttccccttgtaccccttggacttcactgatggtacgtggcctctgctttccaggccttgggcccacacgtgtgcctgtcctgcatccccagcaaaccctctctcccatcccccattcctaggcattattgggaaaaacaaggctgtgggcaaatacatcaccaccaccctgttcctctacttcgcctgcctcctgcccaccatcgctttcgggtctctcaatgacgagaacacagacggggccatcggtgaggggctggcggtgggcggtgggtgggggtatgctgggctgggccctgggctgcggcgcccacctgacctccgcacccccacagacgtgcagaagaccatagccgggcagagcatcgggggcctgctctacgcgctcttctctgggcagccattggtgattctgctgaccaccgcgcccctggcgctctacatccagggtgcagtgggggctgaggcgggagatggtgcctgagacccctggttcctgccgggccctgacccgccctgccccctgcctgcagtgattcgtgtcatctgtgatgactatgacctggacttcaactccttctacgcatggacgggcctgtggaatagtttcttccttgcgctttatgcctttttcaacctcagcctggtcatgagtctcttcaagaggtgactggcccttccgtgagctgctgggaccctcaaggcttgggatctggttcagccccctgtaaccccagggtggtgggggtgcccccaccatattgctgccccaaggggctggggtgggctcaggcaaggcctggggccctggccttcttcctggcagggggaggcaggggactgtgcaggggctcagggaggcctcccccacctgccccctgaccacacccactctgatgaggctcatggcctcctggcaggtcgacggaggagatcatcgccctcttcatttccatcacgtttgtgctggatgccgtcaagggcacggttaaaagtgagtgcggctgggggccacctgctgaacagggcgctcagccgagatgggaggttctgcactgcccctggctgggggcacataggactggctcaagctgagtgtgtgcccgtgatcaagggtgcggtgctctgggagccttgggctggcagagggcagagccctc

SEQ ID NO: 12588 - DNA, 1141 bp, Homo sapiens
atttcaatgtttttgccctctgttgcagttgcaggatgtgagtttgaatctatggaatgtctacagcaagatggatcctatgtctctggagagtttgctttcagatgtaaggagccaaacagtaacttttaaatattagtattacgtccagctcagttacctgctagtgatctttaatttgaagaaatgcaaaggatattttagtttgcttcggtcaaaaaatagagcagtttcttccttgattattgtcttgaattccttgggggtataaaggaacctggcaaagtgacactgctccctcttccactctgaggtgacttcactggaggcaaaaccagggcctcctgcctggcctttaggtttaggtttttatctaaaggcattctttctgttggactggactttagaaaaacaatgcagaaggctttctctggcatgaaaagatagaaagatgagattatggcttaaaggaatcaaggattagagcccggggggcaaactttttctgtgaaagtctagttagtgatattttagcctttgtgtgccttatggtctcagtggcaactacttaacaatgccatagtagcatgaaaacagctctagacagtgtttaaacaaatgggtatgtctgtgctcccaggaaactatttacaaaaatacacggcctgtctatatcaggatcggggggaaatttgcaacgagcggcaacaaacagaactaaagctttaggactctgtactctggttaggcaggtcagtggtgtctctcagtggccatagatagatatgcatggtcacagacttagaattagccatttcaccaaagagcttcagtacaattagtgaggaacaatatttaacaaccaagatctgggcattaggtatgtttcttgcttctgtggggacattggttttaggccctttgagtgggcatgctgagaaaataaagtaaaagaataataaggaaaagatacagtttcaaaaattgtctttccttgaaagaacggaaggtttgaatctacgtattcaaaagggcagactgggcacagtggctcacgcctgttatcccagcaggtgtgaggaggctgaggcaggtggatcacctgaggtcaggagtacaagaccagcctggccaacatggt

SEQ ID NO: 12589 - DNA, 1088 bp, Homo sapiens
ctcctctgaacttgtggttcattctcaggctggggtggactcagatgccaggaaagggacagcctcccattgtcaggcagaagctgcccaaagcctggagaaggacttgtttgccctctttcccccaggaggggctcgacccacccaccctccctctcagaccaaggtggtggctgtgaggagggcagcaaatgctgacaaggatgaaaagcacatggaaaaaaatggatgaggagggaaaactctgccaaatggaaaatgaccaaatttaagagggtgggacagtcccctgctcctctcccagagggcactgcttggaaattgtgttttccccatttatggtgctctgtattctggcattatgcagcagcctcccagaagctctcttctgcttcaaaacctgggatctctggcattaccctattgggatggaccgctggacagcaatgctcgagtttgtgaatttggagagatactcaaaagagctaaaactgcagcattttacctttaaatgcagtgcctagagagagagtattgtctcttccccaacactaaccccactcccatgaagaattgcctggaaagatgttttcaaggaatttgaaccataaaacactatctgatgcacagaacacctctactttgagactcacctctcataaagcttctttttcacattactgttaaagaccagacgttctagaaaagacccctcctctcatgagctcccccatccctgctacagaacacagcacccatggcgcctgcagtggactggccccttaattcccacaggcccccccagcaaggccaaagggaggcccctgggtattgtcctcctacaaggaagatcctctttgtttgttcaaaggaccagttttcctaggccaaagaagtctcttccccatgttagtcctatgccttgaaatatcatgcaccatgacccacagccatctggttatgtcttatttttttcctaaaagataatgtttatttttaaaaaggaaggaaggagcaagtgaagtttcattctgctccagcggtggggaagccgctgaatccacctgcttctcctttgcaaccgacag

SEQ ID NO: 12590 - DNA, 2640 bp, Homo sapiens
gcccgtcgcctgccgcccgccgcccggcgacgcgcccgccggcgtccccggaggtgcccccggcccggccgggtcgtcgccccgccgccgcgcccgcgagccgctttgtctcgggcggggcgcgcgggagaggccgccaggtgccccccgccacgggcccgggccccccgccccggggcggcggcggcggcgccgggccccggggcggggggcgcgccgggatgggccccaagaggcgacagctgacgttccgggagaagtcacggatcatccaggaggtggaggagaatccggacctgcgcaagggcgagatcgcgcggcgcttcaacatcccgccgtccacgctgagcacgatcctgaagaacaagcgcgccatcctggcgtcggagcgcaagtacggggtggcctccacctgccgcaagaccaacaagctgtctccctacgacaagctcgagggcttgctcatcgcctggttccagcagatccgcgccgccggcctgccggtcaagggcatcatcctcaaggagaaggcgctgcgcatagccgaggagctgggcatggacgacttcaccgcctccaacggctggctggaccgcttccgccggcgccacggcgtggtgtcctgcagcggcgtggcccgcgcccgcgcgcgaaacgctgccccccgcaccccggcggcgcctgccagtccggccgcggtgccctcggagggcagtggcgggagcactactggttggcgcgctcgggaggagcagccgccgtcggtggccgagggctacgcctcgcaggacgtgttcagcgccaccgagaccagtctatggtacgacttcctgcccgaccaggccgcggggctgtgcggaggcgacggacggccgcgtcaagccacccagcgcctgagcgtcctgctatgcgccaatgccgacggcagcgagaagctgcccccgctggtggccggcaagtcggccaagccccgcgcaggccaagccggcctgccctgcgactacaccgccaactccaagggtggtgtcaccacccaggccctggccaagtacttgaaggccttggacacccgaatggctgcagagtctcgccgggtcctgctgttggccggccgcttggctgcccagtccttggacacctcgggcctgcggcatgtgcagctggccttcttccctcccggcaccgtgcatccgctggagaggggagtggtccagcaggtgaagggccactaccgccaggccatgctgctcaaggccatggccgcgctagagggccaggatccctcaggcctgcagctgggtctcacggaggccctgcactttgtggctgccgcctggcaggcagtggagccttcggacatagccgcctgctttcgtgaggctggctttgggggtggccctaatgccaccatcaccacttccctcaagagtgagggagaggaagaggaggaggaggaggaagaagaggaggaggaagagggtgaaggagaggaagaggaggaggaaggggaggaggaggaggaggaagggggggaaggagaggaattgggggaggaagaggaggtggaggaggagggtgatgttgatagtgatgaagaagaggaggaagatgaggagagctcctcggagggcttggaggctgaggactgggcccagggagtagtggaggccggtggcagcttcggggcttatggtgcccaggaggaagcccagtgccctactctgcatttcctggaaggtggggaggactctgattcagacagtgaggaagaggacgatgaggaagaggatgatgaagatgaagacgacgatgatgatgaggaggatggtgatgaggtgcctgtacccagctttggggaggccatggcttactttgccatggtcaagaggtacctgacctccttccccattgatgaccgcgtgcagagccacatcctccacttggaacacgatctggttcatgtgaccaggaagaaccacgccaggcaggcgggagttcgaggtcttggacatcaaagctgagtcactggacctagctgtgcccccaacctagattggcagcaccaccccagggcagaggactctctgggcacccgctgtgcatggagccagagtgcagagccccagatcctttagtaatgcttcccctggtcctgcaacaggcccggtcacctcggccgggcccggggctgaggtcagcctcactgcctgcttattgcctctttctcagaatcctctttcctccccatttggccctgggctcaggggaccaggtggggcgggtggggagctgtccggtgctaccacaccgtgccctcagtggactaaccacagcagcagccagggatgggccctggaggttcccggccggagagtgcctctcccctctgccatccacgtcaggtctttggtggggggaccccaaagccattctgggaagggctccagaagaaggtccagcctaggccccctgcaaggctggcagcccccacccccaccccccaggccgccttgagaagcacagtttaactcactgcgggctcctgagcctgcttctgcctgctttccacctccccagtccctttctctggccctgtccatgtgactttggcccttggttttctttccagattggaggttt

SEQ ID NO: 12591 - DNA, 1221 bp, Homo sapiens
cccgactaattttcgtatttttagtagagacggggtttctccatgttggccaggctgttcttgaactcctgacctcaagtgctccacctgcgttggcttcccaaagtgctgggatacaggagtgagccactgcgcctggctgatcccagcacttttcaaatgatgccgctcaaagccgtgacttggcctactttgaacagcaaacttgttgctgctgttgtcaacctgaaggcctctcaaatgccagcttcaagcagggtgtgaattggccagtgtcagatctcaggagtcctgtgttgagagtgtggctttcagctgcggggagctgcacttggtggggaaagccaggcaggtcaccctcacagccagataatgtggaggtcagaacccaaggaagggagtgagacctccactcccagtgggggacctggccacccatccttggggacctgagaaagcgtacttcaccttggggtgaaggctgggtggggccagagggaccagtgccctcctcagtgcttaggggcagagccacctgcagcaatggtatctgcatattagcccctctccaccttctttctcccgctgaatcatttccctcaaagcccaagagctgtcactgcttctttctccctgggaagaatgcgtggactctgcctggtgatagactgaagccagaacagtgccacaccctcgccttaattccttgctaggtgttctcagatttatgagacttcttagtcaaatatgagggaggttggatgtggtggcttgtgcctgtaatcccagcattttgggaagccgaggtgggaggatcccttgaagccaggagtttgagacaagcctgggcaacaaagcaagaccctatctctaaaaaaaaaaaaaaaaaaaaaaaaaaaaaaaaaaaaaaaaaatctaggagatgctctttaccctgcctggcctcaaactattaatagcttcctttgagcaacattatttattatgaactttcaaacacaaaaaagtagagagagtagaataacaaatccccatgagcccatcacccaacttcagtaattatcaattcatggccatcttgttcacccctgcctgcttccctgcttcccctcattctgcagaggttcttttcttttgagacagagtgttgctctgttgcccaggctggagtgcagtggtgcaacttcggctcactgcaacctccgcctcccaggttcaagt

SEQ ID NO: 12592 - DNA, 1216 bp, Homo sapiens
attttgaaagataaattgaccattggaggttatatgttacataggtttgggaatttcctgtttctagtttgctgctaaaccagaactctgaagtctcaatgtttttttttaagccgataggaaagagagattttcattctgaatctttgtttttcacagttgaggcttacgagtagtcatcttgttatttttaaaacacttcatagtgcggtttgcgcttgtctgacagaatggttgggttggctcaatactttgatatttttctttttcgtctttgccgtagtattttttttttaagttatgcatctaaatcaagacagaatcacatttctttgccccaaaacccttttgcctagaattatgttctttggaaaccctagcgtttgaaataagttgctactgtggtaagggtaaatttaattttcagaaaaaagctgttctgacttatttttcttccccatttagtttttccatggtttggactggatatcggtggaactctggtcaagctggtatattttgaacccaaagacatcactgctgaagaagaagaggaagaagtggaaagtcttaaaagcattcggaagtacctgacctccaatgtggcttatgggtctacaggcattcgggacgtgcacctcgagctgaaggacctgactctgtgtggacgcaaaggcaatctgcactttatacgctttcccactcatgacatgcctgcttttattcaaatgggcagagataaaaacttctcgagtctccacactgtcttttgtgccactggaggtggagcgtacaaatttgagcaggattttctcacagtatgcattttttagcttatatacaatttatggtaatttgattgttaaaaataatgccagtagcaagtggtgaaataatttccatctctaatggaacttgaattttcttgagtcaaatgaagattaaaggtacgctagtgataggagttggccatctagaggtggttgtctagttcagatgtatggacgacaatcagaaccactaaaagggtagcattttattgctcctttagtatgaaaaattagggcatctgctatacgttgaggaagaaactacctaaaaggaacatcattagatcatgaacaatgagattgaaatataattaaaatcatttcatgtcataaaattgttttcagtcttgtctaccacataatttctcttgtctccctcagttgtt

SEQ ID NO: 12593 - DNA, 1068 bp, Homo sapiens
ctgtatccagctgtttgcagagctcagggaggccagggggcttcagactccactgtactctgcattccaggattctctgttctctggctgtggtggcctgacacactcttcaccactgaccccacccccgcttgcacactatgccacaggaagggcaggggcttccatcacaatcactcagtactagttaccagctctgatagaattactcaccttgagtttccaagtcttgctgaaggtgcttgcgtaagtggcacatggatgttccctctgttcaaaggcatatgcacaacactatttttcaaaatttgcttttatttacacgtttgagtcaattacatgcatgttttatttttgaggagtgattagcaaaatgcattaaaattttaaaatagcaattaaatatacaaaaatatagcttacaaaaaactgcgaatgtttaaaaatattctgctgcagaatttttagtgtacaaagacgtctatgaaacctgaggttcagcatttcataaacctttttttgagggagttacacaatacctagtgaggaaacccgagggccaaactacaagacgaaaaagtgccccgttcctggcaatgatgtcagaagaccaagaggcgatagttaccagcaacactctaggaagaccagctgtcaccagaagggagttcctaacacttgccacacctgctcccccgaccgggggcctgggagggaagggcagatggagaggaacggtgtgcagtgggcgtgagatgcagatccaccaggcttgggactggcaaagggagctgagaagagagttcccccaaagcacaaacaagtctgctgacactggtggggcccttacagtcacagaagtaaggactggatggtaagccaaaggtgctgatgcttggtcaaaaagtggagtacatctttgcatcttgtaacaatttgggctctacagctgaattggcaaagtaaggtttactacacaagcccctctttttcttctgatatccccactcaaatggaagcacactccccagcacatggggatcccttattaatctttactaaagaacc

SEQ ID NO: 12594 - DNA, 1824 bp, Homo sapiens
tctcagcacatgtgaatgtggactggttttaaaatgcattcattctgctaggattgggctggaagctggaacagtgagagtactttttctgctcctagtcatctccctttctcagcgtgacatcctcctgcagcaagcctagtatcactagcagtagttcctgcgactcttagcaacacaacccgaatatttgctccctgcatctgggtcctccaccaggatgggcctgcgcatctgcattgctgtacagacaaacaggccttttaatttacatcctcctttaattctcattaaaatcgcagggtttttgtttgaaagacagtcctttttttatttattttgaaaaaggaatgagttagggacccctttataactctcttggctcagactcgaaccccatggtaaagtcaccctttccgcatctatcttcaggagttgctgggacttgttactgtgtagctgcgtggggattctggtctgctcttggaccactggctggtatcctttgtgtgtttcttaagcagctcaaagatagaatgttgctggtctgctatgggttagtggagcataactcagccccaactggactccacgggtggctgaaccattagtagttgctaggggtacaactgaattcaactgccttcagaaacagggaacaaaaccagcctgacttgattcctggttgggtcagtatcagacactaggaagttgacatctgctgcttttctttgccacgtgtgatttggttaggcctgtccctggcagataaggtccttgaagcctatgcttgcctagccagggaaggcaggacagaaatggccaaataggggcaggtggcccctgggaaggtctgagctgagggatacaggggacctcccaccattgccggataccctgttcttgacaagaagatccttttccccagtgccaagccccttggatccatcagagaaatagcctcgggccttgtcctttttcacaaccccacttcaaaatcatgtcatctccctggcctgatcccgctctaagctactttgaacaactaggaattatttttctcagaggctttttgggcattatgaaatacatcctgatacatccagggcagtatacccagagctccaggcagagagtgatggaatcacctcttgtcactcactagccttaggcccttctgcaggttagcctctcagtctcttccttagcttccttagctaccacccagggattgtagtaacgtccctggcacctcttgtgggggttagctggtgcccagagcctggtaggcagcaggcctggtgtcatgggggctgctgataccacataacatcatctgggttacatgggctcctctgccatcatgattgataggaacagaacctcagccaaaaagcttcctgagctgtaggggctttccctgaggcccaggttcacctggcccctttcttccttggtcatctctgcctttgcccacagtgaactctgacttggttgttcagtgctgaatatttctttcttaatgttttgaataggtaatccattcatgtggttcacaaatcataaagtagttaaaagcctttcttgagttcctgatgcctagcaagctccgctcctcactccatgaatacctactattggtttgttccttgggtatccttccagagatcatttatgcatgtacacacatgtgtatgtgtgtctatataatttttctccttttctactcatgtgataccagacaagtgtattcaaggaacgctcctactaatgtgggaagagccatcccagaaatcagaatacaaaatgtgaacccagaattgg

SEQ ID NO: 12595 - DNA, 1454 bp, Homo sapiens
ttcctacttgaggacaattctttagataaagtggcagctctggtctatttatgaccgagatttatagcagctgaaggtatgggcagaacaccaataacatctactgtagattaccagattaccaaatatctgaggaaagctgctaacatggaagatagaaaataaataacaataaaaacaagtcaaaacaagcaagcaaactaataattaaaataaacagaaaaaggcaagttggaggaaaccaagatttatttttaagaataagaggtgataggcagttcggcggtccagtgggtctgtctcttgcttcaacagtgtttggacggaacagatccggggacggtcttccagcctccgaccgccctccaatttcctctccacttgcaacctccgggaccatcttctcggctatctcctgcttctgggacctgccagcaccgtttttgtcgttagctccttcttggcgaccaaccatgagctcccagattcgtcaaaattattccaccgacgtggaggcagccgtcaacagcctggtcaatttgtacctgcaggcctcctacacctacctctctctgggcttctatttcgaccgcgatgatgcggctctggaaggcgtgagccacttcttccgcgaattgaccgaggagaagcgcgagggctacgagcgtctcctgaagatgcaaaaccagcgtggcggccgcgctctcttccaggacatcaagaagccagctgaagatgagtggggtaaaaccccagatgccatgaaagctgccatggccctggagaaaaagctgaaccaggcccttttggatcttcatgccctggattctgcccacatggacccccatctctgtgacttcctggagactcacttcctagatgaggaagtgaagctcatcaagaagatgggtgaccacctgacgaacctccacaggctgggaggcccagaggctgggctgggcgagtatctcttcgaaaggctcactctcaagcacgtctaagagccttatgagcccagcgacttctgaagggccccttgcaaagtaatagggcttctgcctaagcctctccctccagccaataggcagctttcttaactaccctaacaagccttggaccaaatggaaataaggctttctgatgcaaaaaaaaaaaaaaaaaaaaaaaaaaaaagaataagaggtgatattacacccatgaaacaagaataagatgctattttgagacaagaaacaaaaaataagctttaaaataaacacacacacatacacacacatacacacaacagcagaaatgaaaaattcaatggatggcttgagaaaaatgtctagaatatctcacagaaaatagatctgaaagacaaaacaatgaaaaacaggaaagaaaagatgaggaatgtagggggaatagtccaaaaggtttaacatctgaataacaagcatttcagaaaagga

SEQ ID NO: 12596 - DNA, 1841 bp, Homo sapiens
cctggaatgggggttctccagtaatttctatcattctcccctgttgaaagcttatgtattgagaacatctgggtaagagtcacaggcagcttggaaaagagggcagtgattagggatttctagttttattatttttttttagcatttgttgagattggtttaaaatccaggacatggttaatcttggtgaatgctccctaggcacttgaaaagcacatgtattctgctgttatagggttgtttgttctgttagatcctgttggttgaaggtgttgttcaattcttctatatcctcattattttcttttttatttttttagagacagggtctatctctgttgtccaggctggagtgcagtggtgcagtcatagctcactacagcctcaaactcctgggttcaagtaatcctcctgcctcagcctcctgagtagttaggactacaggcttgtgccactatgcctggctaatttttaaaattgttattttttctttttctgtgcctaacgtagccatggctcgtggtcccaagaagcatctaaagcaggtagcagctccaaagcattggatgctggataaattgactggtgtgtttgctcctcatccatccaccagtccccacaagttgagagagtgtctccccctcatcattttcataaggaacagacttaagtatgccctgacaggagaggaagtaaagaagatttgcatgcagcggttcattaagatcgatggcaaggtccgcactgatataacctaccctgctggattcatggatgtcatcagcattgacaagatgggagagaatttctgtctgatctgtgacaccaagggtcactttgctgtacatcgtattacacctgaggaggccaagtacaagttgtgaaaagtgagaaaaaatatttgtgcgcacaaaaggaatccctcatctggtgactcatgatgctcgtaccatctgctaccctgatcccctcatcaaggtgaatgacaccattcagattgatttggagactggcaagattactgacttcatcaggttcgacactggtaacctgtgtatggtgactggaggtgccaacctgggaagaattggtgtgatcaccaacagagagaggcaccctggatctcttgacgtggttcacatgaaagatgccaatggcaacagctttgccacttgactttccaacatttttgttgtttgcaagggcaacataccatggatttctcttccccaaggaaaaggtatctgcctcaccattgctgaagagagagacaagagattggcaaccaatcaaagcagtgggtaaaatggtccctggatggcatgttagatctttgtatgtaattaaaaataatgtggcatgattgatagccaaaaataaaataattattattattttgtaaagacagggtctcattaagtttcccaggctggtctcaaacttcaggcctcaggtaattctcctgccttggcctcccaaagtgctgggattacaggcatgagctatcacgcctggctccttgtggattttctatctagtagttctatcaattactgagaaaagagtgttgaagtctccaactataatagtagatttgtcaatttcttcctttggctttatcagtttttgcttcatgtatttgaaagatctgtttttggtgcatacacacttaggtttgctatctcttgttggtagattgatcttgatcttttatcatcatgtaaaattcctctccgtgtctggtaatttctttgctctgaagtctaccttgatattcatatagccactcttcctttttaaaatttaatacttatgtgatatatctttttctatgcttttac

SEQ ID NO: 12597 - DNA, 1110 bp, Homo sapiens
tcatcatagaggatgatgtaattaaaaaatggtcagtgtgcaaagaaaagaactgcttgcatttctttatttctgtctcataattgtcaaaaaccagaattaggtcaagttcatagtttctgtaattggcttttgaatcaaagaatagggagacaatctaaaaaatatcttaggttggagatgacagaaatatgattgatttgaagtggaaaaagaaattctgttaatgttaattaaagtaaaattattccctgaattgtttgatattgtcacctagcagatatgtattacttttctgcaatgttattattggcttgcactttgtgagtattctatgtaaaaatatatatgtatataaaatatatattgcataggacagacttaggagttttgtttagagcagttaacatctgaagtgtctaatgcattaacttttgtaaggtactgaatacttaatatgtgggaaacccttttgcgtggtccttaggcttacaatgtgcactgaatcgtttcatgtaagaatccaaagtggacaccattaacaggtctttgaaatatgcatgtactttatattttctatatttgtaactttgcatgttcttgttttgttatataaaaaaattgtaaatgtttaatatctgactgaaattaaacgagcgaagatgagcaccacctcccgtgtctgcagttgtatttcctggtgcttgccctgtgttggggactgttttgggggttaatctgagccaagtggcgctttctgtcctcccttctcaagtgatggccgatggttcacgcacttccccctgttcctgcccttgtcctcacttcccagtcacccactagttcatctctgcggcttttgcattttctccacaagcatctaagtgggcttagcactggtaaactgcaaaggcactattgcagcaggaggaacagtctgggagcttttttcagtcctggatttagaaatagattttcttgattaaaatgaaaattaacaagctctaaagaactgttgacccttgaactacacagggattagaggcactgacctgccgcacagtcgaaaatctgcagagaagttttttttgttttgttttgttttttttg

SEQ ID NO: 12598 - DNA, 4913 bp, Homo sapiens
tacagatgcttcagctacttacccatcagcccaacctttgtgggctacacatggaaaggcctcaggaagagcgacaacagccggagttcagatgaagactcccaggccacgggatagcctttgctgtgccctgtggcctggccgcagtgaggcatgtatctgtagttccttgctgagtaacaagaagtaaaatacatgtttgtatatctacatttacattctgcgccccagagctaagacagactgcgaatcacttttctgctgtgagggtgatggtgcctgatgcggtgtctcgcctatctccttatttaagcccttaactccttgccctttgagagtgtccattgctggccatggtcactaaatttgaagttccagtcctccctttggagtggacatttaaaatctgcagccattccttgcttcagttcccttccaccacccagggctggctttcctataagccacctccagggtccaggggctttctctctctctccgaagcccctggacctgtttccttgtcatttgaccctcgtctgtgcccgcggagacctcctctgaccaaggggcactagtatgccttgcgctatcatgactgactggcccagtatgattctgttgtcgctgatctcccggaggaggaggctgttgacctgaaaacagtggcgtggctcccctgtgcccagatctggccatgggtgaggcctgcacagatgttgaatgaacatctgtttggggcattggagggaaaaggaaaggaccctgaagccaatatctgattctcggctgcaccttctcttggccaccctggccctgaccgggccagcacgtgcacactggcctcttttcatttcactagtggccgagacaccctctctggcatttatcactgttggccggtgtgatgagtatagagtgccacccaaggcaccagtcacacaagctgatgggcgtcttggctctgccgtcatgtggatgttattgtcgcgcgcgtctataattacaaggttttattcctatttaatgttattgactatagcagattttggaaatcagtgttttccatgtgaccctctttccttgcatccctattccttgtcccccacccactcttccccccatcaagaaaagaaccagcatttgtaaagctgtggacaccatcagggaagcttgttgtaacggcttttgaaggccagtaaccattgttgtggttgtgttttgtattgcttgataccatgaaagtgtaaatactgtaatgcctaatctatttatcaaaactgactactggaccggagcccagaaaccatgggtcaagttacacgtgaatttgttttgtgaagaagggaagctggggcaggtaacacgcagagccgccacgtggaacggtctgtccgccggtctgtcccgcttgccgggcttctgttgcaagtcttggcttaaggagacttcctgtgggttgccatgtcgcacgtccgttagatcttgattttacaggtgagggtggttgccaaaggtgataagaaaagcagccaacaggctccctctcacttaagagagttctaattaataacactaaattcttcctgagaaatgactcctcttggtttggtttgaagtttttcagtgaaggaaaaggcctgagataggaagcagtgccctcgcttcatgaggtggcacatcttcggtggccgttggcctggtcgagctttggtcagctgcgtgggtgcctgtctcctgtctccagcggcagggcatggttcttggcagcctggtgtccacacggtgcattcctgtccccctcggccccaggctggctcagctctccagtgctgcggcgctgtctttgcagcattgccatgtcaccgtagcccccttcactcttggaagtttggggcttcaaggtttattctggcaagaacacctcggagccactgcattgttttgccaaaaacttactgcagattaagtaaagaacttagatgctaaattacatctaattttgtatgtttttttaaatgtgtctttgatgcatactttagaagcacactggctcgcggtttccatccctcttgccttgggacactcttgaggctggcagccctcctgcaatgagttgctctcagttccttctgtttggattttgctcaacatctccagtttctctgctctgaaaaatggggaaaactgctaaacatcccagagatttgcaatcttctagctctccaggtgagcagaaagaccaaatatccaaataaaagcctgaaagccattggtgatccaggggcaccttctcttcagcttgactgggcgtcttccgctgcataacactcaaggtgtctgctctagtcatccagaaacccactcccttctgaagcccctccttgggccgggttgtatcaggaggattcaaccccgctaacatgtggggtgccctctgtaggccttcacacagggaaggaagccctaccctttcaactcctgttggagtgagagtttcctgttctgattccactgtggccaacccaataattctgtccgaggaggggtaagggaataggaggtggggagcaaagagggcagcctgactagatgcccctgctgaatctggtactttctgcacagccttgagtgattggagtcccctaatgactaataaacttgaacatgtaacacacacacacacacacacacacaccattttaggaagtggttctcctactggaaaatatgctacagaatgaaagtttgtaattgaaagaaaaagaatgtattcatctgcttcttgggtttaagcacacacctgaaggggagatattgggggacacggtggccactcgcggtctgtgtcatgacacttcccattcacatcattggcctgcgttgctggggctttgaaccaccaccccgtactttgttttgcctgtagagtgttgtaaaatattttggatgtgaatgtccttgcaggccggttagtctccagtttccacagagaccacctacccaccaccttcccaggtcacctgcctggtccctgaaagaaagcatttgtgtgggcaatcccaacatgaaatgtagacagcgtgaatacggacaggaggtgatgccatattcacagtgggggatggagggcccccacccctgcttcacagaataatgggaagtgactctagtctttgtaagcaattttcattctcattaggaagttaaatgtagattcacagatacatttactttcagaatcctcaagaggatttcaaatgctaacttttagtttcttgggattgatcaaggcaagagaagtggctttaaccatgccagccagaatgaagcatcatgggtcctgatggtttcccgttttcatggtaacaaattcgcacagaggttttgctttatgctgtagaataccgactttcatgatgacaacttggtttatgcatgaatattgcagtatttccatatagcaaaataacatttctacccaggataatagtcacagttttccagggagggaatgatataattttcatgacaatgtcatgtgatgatagaatttctccattgatgaatctctagtatgtgtgtatactttatttacccatacgtatattttatgaccatgagctaagttgttatttctttcattcatatccctgctgaaatattggtactagcaacttaaagttggcaagtctcatcttcagtaatacggatgccatgggagtggccaggccagattgaaggtgaatatggagcagtagcagaagcctcattccagaacccatctggccagagaagcagcagcatcctgggggatggccgtgcatggggtgtacactcgctataggcataggcccggcatggctgtcgctggacgccagctgtgcacacccagccacacctgctgcacgccgcgttagtgtgcggctccgggcctgagcattcgcaaagctcgcttctccagggagcctcctcttggctttggaaaagagcccagggacttaacgtgctgcctgttgtactctgtcccctcatgactttttagacacagggactaggacatcgaccaccctctgcccctcctgcagtcagaacccgagtagtgcaagaacggccacccggttttgccagcgttcagcgtctgcccatggacccataaggcacattagcgttgggggtctcttttcagcagcctcacagacattcccgtcctttctggttggtgttgactgtgtttcagcatcactctaccctcccatgtccttagcattgctgtgcgtgtttccaggcacttaggacacccttccccacgttgccatcttactgacagttcaaatgactctccttttttgttcgttagtaacaatcttcatttgacaccttaatacatttctgactgttcttaaaacagtggggatgcctatattttccttgagtttttgtgactgactttggctatatatacctttctggggttttgtttgttttttatttttattttgattaccgagggtatttggggtggggttgttttttgagatgtgtaattcttttatggagtttttaaaaagaattttcatattgtttttctaacatggcttcattaaacgtttaagtattttaaaaatatgtaatatttggaccagatgttgtgaataatagtagagataaagctattttattctgtatttttaaaactgttccgtacaaataaaagctctcctggacacagttttgctcttcacgtgcctccttcttgggctactctttaagaaaagagtcatccctcagaatctgtaggggattggttccaagacctcctcggataccaaaatccgagactactcaagtccctgatataaaatggcatagtgggtcaggcacagcggctcacccatgtaatctcagcactt

SEQ ID NO: 12599 - DNA, 1230 bp, Homo sapiens
gagtccttggatgcagaggcggctgggctccctttccatcatttaatagtcacgtgactttggacaagctctctccaagccctgtttcctcaatggtaaactaaccataagactgttagtgagcaggacaccatggctcatgcctgcattcccagcactttgggaggccaaagtgggaggatcacttgagccccgaagttcaagaccagcctgggcaacataaggagaccttgtctctacaaaaacataaaaaaaaattagccaggtgtggtggtgcacacctgtggtcccagcttctcgggaggctgaggtgggagaattgcttaagcccaggaggtcaaggctacagtgagctgtgatttgcgccactacactccagcctgagtgacagagcgataccctgtctcaaaagaaagattgttagcgagcatcaggtgagctgatgcctggtacctgtccacactcagtggctgactctgtttatcttagttttccccactgggagggaaggaggcaggtagtgcagcgggtgcacagcgagcaagggctggacagccttgtgtagcaacgcagacctgatgagtgtagcagggcttggggttggccacactgccagtgtccccagccagggtgggccccactgaccctggaatctatggcagaggccatcagaaagctgtaagggcatttgatccagcccctcctgaggccggagaccctcttgcctcagccaagcttgttctctaaggcgggtctactcgcttttgttcctgcaactctagcttttctgggtggtctcccttcagttactccacccttcctctgttagctggtatttgtgatgtttcaagggcctgggagtctgattgagtcctcttgttacatgaaagtttaatgaatttggttttctacaacctttcttcttcaactgtcaggtccttcttgccccaaacatttccctgggctctgaattgctcatcctcctcctcatggccttctgcttcccctacctcccctcccctaacccccattcttcctttttaggcaggtgactgccctggcaaaagcagctctacacaggagtgaacagtacttatcaccaaataaggatggaagctcttttcctgttttaaatttggggagttttttcaatatttggcatgactctggtgttttaaggaatgtgttgtcatctccctgcctctgctacccccatcctcctaagtcccc

SEQ ID NO: 12600 - DNA, 1221 bp, Homo sapiens
agaattcaaatcaccgtgtttatatactttagaattactcttttcacctaacgttatctgagcaatagtgtttggataggagggtgtagaattttaaagtacaaagatcctttttacttgcagggatgaagtgggctgggaggggcagatcagtgtgctgtctctttgaaagtggttaaaattttctaagatttttttcatctggggtctcacgcaaggactgctcgtgccaaggtatcattttgtggtctcaacctgggaacatctctgtccatgcaggaggatccccaggcctggggagaagctctgagcaagtttggtgttctcagggatgagatgttgcccaaggacgctgaccccccaaattctgaggattgaccatcccggtgggcgactgtacttgagccaaagagaatacttggcttcaaagatagccaaggctcaaaactgcaggaagatggcaaccacttgataaagttgtttttctgtaatagtggcctgtacatggccgagctaacactggtcttcacgtttaatgagcaccttcttttctccttctggctcgcagagctctctcgctgagaccctggatagcactggcagtctggacccccagcgatcagacatgatttataccatagaagatgttcctccctggtacctgtgtatatttctggggctacaggtaagatggttcctgtaggatgtgtaactaccagcaggtgtttgcattgtctaccatctggaattgtttaaaaattccactttggtttttgtttattgaagacttttataaattcctcttttaagagtgatgagtaggggctgagcacagtggctgatgcctgtaatcctagcagttttggaggctgaggtgggcagatcactggagcctaggagctcaagaccagcctgggtaacatggcaaaagtccatctctacaaaaaatacaaaaattagccatgtgtggtggtgtgtgcccacagtcccagctactcaagaggctgaggcaggaggatcgcttgaggttgaggttgcagtgagctgtgatcacaccactccacttcagcctggttgacatagtgagaccctgtctcaaaaaacaaatgatgaatgggaattgttgacatcacagcaggaggaagaaaagaacaggtagaatggattaccagggaaaagaaagaagatgttcagggcacaagcaagagcagtgacataaag

SEQ ID NO: 12601 - DNA, 1257 bp, Homo sapiens
tatagctgaggactaaggaattctgcagcttgcagatgtttaagaaaataatggccagattttttgggtccttcccaaagatgttaagtgaacctacagttagctaattaggacaagctctatttttcatccctgggccctgacaagtttttccacaggaatatgtatcatggaagaatagaggttattctgtaatggaaaagtgttgcctgccaccaccctctgtagagctgagcatttcttttaaatagtcttcattgccaatttgttcttgtagcaaatggaacaatgtggtatggctaatttcttattattaagtaatttattttaaaaatatctgagtatattatcctgtacacttatccctaccttcatgttccagtggaagaccttagtaaaatcaaagatcagtgagttcatctgtaatattttttttacttgctttcttactgacagcaaccaggaatttttttatcctgcagagcaagttttcaaaatgtaaatacttcctctgtttaacagtccttggaccattctgatccagttcaccagtaggttggacagcatataatttgcatcattttgtcccttgtaaatcaagatgttctgcagattattcctttaacggccggacttttggctgtttcctaatgaaacatgtagtggttattatttagagtttatagccgtattgctagcaccttgtagtatgtcatcattctgctcatgattccaaggatcagcctggatgcctagaggactagatcaccttagtttgattctattttttagcttgcaaaaagtgacttatattccaaagaaattaaaatgttgaaatccaaatcctagaaataaaatgagttaacttcaaacatttcagaaaacattttaatgattttatgatatctttaatcccagtacctagatctaccttagtttctaggtagctggcattgtgggtcacactcaactttccctaactctgaggttatggacttgggcaactggaagcctggacatgccatcagctgagttgcaaggctgtgggaagagcaagttttagatgtctactcaatatccaagtggagctgttgaggaggcagttgcgatgcatgtgtgtgtctagagtttaagagtgggtcttggatggaaatagaaatttgggagtcagcatttggacagtatcttaaaagctagagggctgtttgagatcaccagtagagtgagtatagttggaggaaaaaaaaaaaactcagg

SEQ ID NO: 12602 - DNA, 1106 bp, Homo sapiens
aaaaaacgatccatttttcaaagtgctgccactgtgataactgaggagggcttggggcagggtgtggctttgtgttggctggctgctcagcagggctgaccatgcaatgaccagttgtctgcctgtgtccatttctagaaacaggctcactggattatcagaagcattggcccttgttttaccgggatgagcaaacagacctgcaattcagtaacttgacatgttggagtttgaacccaggtgtgctgaatctcagttccatgttctttgcgttacgattctgccttcctagcttcctggtctccgccagtcatttttctcccacgggttggccaaagagcccctaacacagggaagacttgcaagtttctcagggtcagccagcagggccatgaggagtggggcagcccttgccttactttgtacccagtctcggagagaaggggaggtgacaggggccactgggttccatggggcctgcaggccgaaagcaagggcaccctggagcagtgcaggcctgtgtggcacagtgccctcatcccgaggcccaactcagccccagccccagcctctgctgtggagcattcctgacgctcccaccccatttcctcatctctgtctcctctctaggcttctttggaaattgactgtccaaaccctcattaggtgctgtctcctcagcagatggtctctggagtcaggttctttgtcttcgatttctgtagctcccacgtgattcagtaaaggcatgctgattcatcatagggttcctggcagaagggcaaaactatcaggggaacaaagtagccagagatcacatgcggagccaccttctgacttggtcaagaactccttgctggtcagacctggctgttcctagcacgtatggttgtcaggaggttgagttggtactaaatcagctgtgaagattagcaactgcctgggcagtgagaaccaggcctctggtttcgggaggaatttgttgtgcagcaaaataaaatattgccatgttagtgtttatttttagtgttgaaatgccaccttaagttgacagtgttaatgctacattgacatatgatatacttagtatcagtcccaatatttca

SEQ ID NO: 12603 - DNA, 2157 bp, Homo sapiens
ccatttggatttttttaaaacaaaagtattaataatctggaagacagtgttgcccaggtcaggagtgttttcttggtggttccagcccccatcaattgaactgtttctgggctcagtcagacacagacattcatctgtgtctgaccaaatcaggggacttccccacctgtggtgggaggcacagcttagatgttttgtacacctggtcttttctagaaatccctgcttggagctgcagaagggttgccttctgtaggtcggaggaatggaggcttactaaccaggtaagccttctatgcatccacaccaaaatcctgcagaatgtaagtaagctctgctttataagatgggttcaccttcatcgcagactgaaagtttcagtttttatttttttcagaaagcacgaaaaattatttataatagtctggagaaaaaacacactgtaatatttcaagtgtatgcagtagaatgtactgtaactgagccctttcccacatgtctaggctccaatgtctcctgtaggtccacctaactgtgtgttttcagggacaatgccatccatgtttgtgctgtagacttgctgctgctgaatcctttctggggactttctcatcgggcagggagcagagggcttctcgttcatgcaccctttgcctgaacacccatgtagctgctgtgttgtgtatatattactcttaagaggagtgtgtgtgtctgtgtttgttttaaaagtcacttatttcttacagtgatttcaattgcaccatgacttcttcactaaaaccacaaagtcctgcttaaaactatggaaaacctaacctgattagagccttgactattttgaagattaaatgcacactttttatataatgtgaccagtttaaatgtagtttgtattgtactgggggacctttcgttgttgttgtttgcttaaactgtgattttttttcccctccctaatttcaggggtgagattgactttgggaagacagattagttctttgtcaggccaacaagtgatggagtgcgggagagagaacttggcacccaaatatatcaaactattccgtgccgtggatgttttcattgccaacgagggtgtaatgatttgcttctgcaccttggtctagtgctggtttgtggtgtttttgtttgtaaattagcctcactgcctccctgaaagtgcacagtcagcccaggtctctagagtgtccagcagaggatggagccctcgggatgtttcagctcacacatccttgagtgacttcccatatgtgtgtggggctgaagcggcttctttccgctgaacttttatttccatttcagcctcgtggcttctcttattcaggtccaaggccccttaaaaacaaaacatattatcgcaagggctttcatttcagtattggctgtgtcactggcaggatgcatcactctccagggcctctttttcggagctactcccaattccactcttctgtgattctggctgagcaagttcatgccggtagaggctcattaagtgaggtcctgggcaccccccaaacaggaagtgttttcaggcccttacatgcttatccttaaggtgagtaggtatctcagcagcacacccgaacagtaaaggtgatcaataacgaaactgtagttttcagattgaagaatgaacctggatcaccaaactagataccgaaagggctcctcatttgtctcttttgtcccattgtgggcatatggtgggctccttgagaggagggagtctcagctggggcctggctgcagagacctgctcttgaatagggctgcctttgggatcagggagccgagcatactgggcaaggctcatcatgttcctttgtggaagtggttacttggtgggggtggggtggggaaggggggtctaggaagccgaagctgagtgcgcactagagctgctagcaggcaggccagagggtcagcttgtgttttattttctgatttctcctgcatgctttctggagatgaggattttttgtcaggtagctaggagagcactgccaccttgtgtccatatagcacaatgtttctctttcctattcacagacaagattcaagaaaccatttttacgtgtgtacattcaaatcttcatgaatggcatcacttgctttagacccatttttttt

SEQ ID NO: 12604 - DNA, 1630 bp, Homo sapiens
gtggccttacctggcctctcaggtggatggaggctgttctcatctggggctgtctcttgattaaggctgtcacctgtttgtatagggaccatgtttcccaacgcactttgagtgcagtttaggaggtatcctttggatgctgaagtgttgggattttgaggacatgcggatgatttatgagaatagaggggcagagtttgtgaagtctagggttttttgtccagtgggtttcaaatttgttggctgtttaaagaccctgtctcctcccccaccctccccttccttttcccatcaaatgcctacctactgaggcgccttctctttttattcttgagccaatgagatatcagtgtgtttattaataaggattgcaatagtatagtgcttaatatgtgccaggcatagtgctaagggtttacatacgttatcccttttaatccagaaaacagcctttgattaggtattgttgtctccattttatagatgaggaaactgaggcagtatgactgaggccgagagcagtggttaagacagactttgggatcaaatcaccctaggtgcgggcaggtttctaggctgctctaagcttctaccttgaaggcagttgggtctgataatagtaccttcttcctggggtggttgtgaggatataacgaggtaatgcatgtaagcatttagtaccatgcctggcacatagtaagcactcaataaatggtagttacttttgttgagctcagctggtagtttgacctccgttggtgcaatgccagagatgggattgtcagccaccacactgccaccaccctgcacacagtctgggtccctccgagagaagcacgccaaccttaacatcccctacagcatcttggtgcttcacacaccatttaggaggccaccctaacgaggcaagaggacatgggggtgtgcagaagttctgttcttagtgagaatggctggcctgagaatccagctcacctcctctgcccacagtctggactgcttgtgggaaggccatctcctcctgtctggtggtacctccactctgggcagggagggcctgtctgtgactcgctctggaccccacttcccgctctggccaagggctgtcttctgtgcacatagctcaggagcctgcagcagttccctgtatgggtggatgtcctcaggggccaagaagagaagaatggggacaacagaaacctgctttgtaggggattatgtagactaaaagcctagaagttctgcccacatccttatgacgcagccaatctggagcttcatgtttccttctaaaagtagtaaccgggtagaagtgggtgacccattgaggacacatgatgtgaggtatttctgccggattctaggttagcaaagactcaaatgggtgactcatgaatgaagggagaacaggcacaggacttaatgaaaagagtttcttgaacttagttttctgaatgggggtggggagttggggcacgtgtgtgtaaggggaggctgcctcactttgaaggaatggtgttggctaacaggatccatgaaattcctaggtcagttgaataataactgaactactggtttgactgtggattatttcctgggtattagtgggacccaacagcacattgctatt

SEQ ID NO: 12605 - DNA, 1245 bp, Homo sapiens
catcaggggccgatgaaaccaaaggactaggagtcaggagaacaagtcagggattaggagacagcggtttggtttattgttatccagctggaggactcctaggggcagcagcaggaggaataccagggccacggaggggccaggagtctcacagtggagggcagactctaacagatgccagctgaacgctcgctggccctggatgtcatacgagttggggaccagaaatctgggctcagagaacccgtccagggagatttgaagccatgggttatcttctagagttgatactgataatatattttaatttttattgatgtttaataccttctgaaacaggagggtaagatcagatgggaagcccctctgttgaaggatcttgggaaccttggtggttttttttttttttttggttttttttttttgatcgagctgtggacatccttcttaattcgattctgaggatttgtttaactaaaaagttcccaaacacagaaagggcctccccacctgctttggggagctgtctgtgctgggagtgccaggcatcccatgggacccatcactgccagtgtctgtgcctcccagaggtcagccgtgtctgccctggctctgtctcctctgtgacagggcagagcatttctggtcagtttctccatggtgcctcccacccctttgtaaagtggatggacatgatggaattcagttgtctcaccctgatagcctgggtgttgatattcactttacccgcactcagacacaggcgaccttgaagcagttctcggtgtgtagagtccacgtgacagtccccacagcctccccagatagctgtgtgcctgtgcgctactgctgtgccattttcccaacttggcgtttcactaaatgcagctgatctctctctctgtgcactcgtgatccatgttgaacaatacatgtaggttctttttccacgcaatgtaagaacatgatatactgtacgttggaaagcatttaccttatttatatacctgaatgttcctactacacaaataaacatatattaaattctagatcatgtgtggttttcgatggtgggggtggcggaaggccaggggtgtggacgtttggttgcttatgtggagccagcattatttcccaggatgctgctgaccaccgcttgcttctagagactccctctgtccttggccttggcaacctgcccccccggctttcctcctgcccttggttgctcctcctcggtcttct

SEQ ID NO: 12606 - DNA, 1141 bp, Homo sapiens
ttgccagagcttaagagctgtttgtgtcccactgttagccgctttgttccctcatctttgtgtggggagtctgatatccatgtggatgccaacggcattgataacgtggagaatgcttagtttttattgcacagaggtcattttgggggcgtgcaccgctgttctgggtattcatttttcatcactgagcattgttgatctatgccttttgggcttctcagttcaatgaagcaataatgaagtatttaactctttcactacagttcttgcaagtatgctatttaaattacttggccaggtataattgccagtcagtctctttatagtgagaaaatttattggttagtaatataaatattttaaactaaatatataaatctataatgttaaacatatgttcattaaaagcatagcactttgaaattaactatataaatagctcatatttacacttacagcttttcatttgatcaggtctgaaatctttagcacttaaggaaaatgactatgcataattatacctgaccatgaaaaaaataagtacctcaaatgcatgcatttgcactggtgattccaactgcacaaatctttgtgccatcttgtatataggtattttttacatgggttgacatgcacacaacaccattttcattcagtatgaaccttgaggctgctgccatttttccacttaaccaaaccagcctgaaggtgaacctcgaaacttgtttcataaatctttcaaaagttgttttacatcaatgttaaaatttcaaaatgctgcagggtaatttaatgtataaaatattagtaagaaaaagtatgtattgcatacttagtagaatagatcacaacatacaaattcaattcagtgcatgctttaggtgttaagcatgagattgtacatgtttactgttaggtccttgcatctgtggtgctaggtgagtatgagaagatgtcaaggactggacgtattttgttgcctaaaaaaaaaaggctgtttgtaggcgttttaaatatgcttattttgtgtgtctctcactacctattacacactgttgctttgtgggtttgttttgtatgtgcgtgtgttatacagtagttaaatttccatgcagaaaaataaatgtcctgaattttcata

SEQ ID NO: 12607 - DNA, 1222 bp, Homo sapiens
tttatattttaagctaagtggaataatacaacgtaactaaaacatggcgggtaccgaaaggagggcaattcatggaagaaatttcctctgttcattccgttctcttcaacctaagcaatatggatgtgtgagtgtgtgatttattatggtaccaaaaatgtccaccttctttcctgcagcggaataagcttttttgaaatgctgaggttttattttaatagttgacaacctgggaaagttctgagtatttattttactgctcttttttgtgcatagaaaggtttagtagggtacttttttgcattaatttgccaatactcttattctttgttctaaataaagtgactagaatttttgtgtactattcaattaaaggaaacaaatgtcttttccccctctatggtcttatggatacacatttgcacacacacacatatgtatatagatgttggtatatatacacacatatatttatatatacacagatatatacatacacatgcaagtggagacatagattgtaccacctgtatgaatatgtatgtacacatggggacagaaagagtgtgcagtctatttgaactgtatcaaagtcttgtgcaggacttagaccaattctcattgtattagtgtcattccttgtcaaatgtccctaaagtgcctttcttgattattaatgctgaagaactctgtcatgattagatggttaccctttctaagctctgaaaaactctaatcatttgatcatgtgctgtagcaaagaaagtgtttagaatcagccaaggctcttgttcatttgagagattgagtcttgctcactggaacatggtcatcgtttgcgttgctcctgtcatagaataggcctgtatcatacagcaaggaacatctcagaaaaaaaattttttttccaaatagcatgtgctatgccaatgtgattactaagtacaattttgagtcctttatcctaattgctattaaagaataaaaatgtcggccgggcacagtggctcatgcctgtaatcccaacactttgggaggcccaggcaggcggatcacctgaggtcaggggttcaagatcagcctgacaaacatgttgaaaccccatctctactaaaaattagaaaattagccatgcgtggtggctaacgcctgtaatcccagctacttgggaggctgaggcaggagaaccgcttgaacccgggaggcagaggttgcagtgagc

SEQ ID NO: 12608 - DNA, 1153 bp, Homo sapiens
atatttattaatcatttcttctgcactagatactgtaaaccacccacaagaaccgtagggcgccgcacgcaccttggagggggcccttctgccggccacccgcctcagagggtttcaggccagggcctgaggtggctccggccccctcgcggctacgtcggctgcgcggtcatcctatcttgttcgtttctcccctttccccgcccacccccgggccttggctcccggctgcgggccaggagaagagagcgccgcgtacccgctgcttcccaaaacccactgagcctgatgcgcgcgcctccgctgtgccaggggcgccgggaagcccgacgacgacggtgtcgtaaaagcgtcgcgaaggcgtccgcccttggcggcttcctgccacctgtataagtggagtgtgctggggtgtgtaaagtagtatggaggcagcggtagcccagtgtctgagtggttgccgggtctccatggagaagcggctcgccagtgtcccaggctgctgagctctcgccgcccgagaccccgcggcgcggccgcagggccatgctagccttgcgcgtggcgcgcggctcgtggggggccctgcgcggcgccgcttgggctccgggaacgcggccgagtaagcgacgcgcctgctgggccctgctgccgcccgtgccctgctgcttgggctgcctggccgaacgctggaggctgcgtccggccgctcttggcttgcggctgcccgggatcggccagcggaaccactgttcgggcgcggggaaggcggctcccaggccagcggccggagcgggcgccgctgccgaagccccgggcggccagtggggcccggcgagcacccccagcctggtacgtaccgatgaggcggcggcgggccggccctgggctggggtcgccgcccctgcactcaggtaacaagctctgggtggtgcagctcggacgcttccgtttcctaacttttagactcttccctgaaaagaagttactggcaggtcattcggtcgggatgaatttcagggtcaccagcggggtccacctacggtctctgtggtcaagttagaaatcctctcatcccccttctatctgcacccgttgctggaagggccgcctctgcatattgcattgataaaggtagccttcgcttgtctta

SEQ ID NO: 12609 - DNA, 1231 bp, Homo sapiens
cggcgctggtccactggtgtgcccccaactcggtagtgcatgggtaccagatccgctactctgcggagggctgggcggggaaccagtcggtggtgggggtcatctacgccacggcccggcagcaccctctgtacgggctgtcgccgggcaccacctaccgcgtgtgcgtgctggcggccaacagggcgggcttgagccagccacggtcttcgggctggaggagcccgtgcgccgccttcaccaccaagcccagcttcgcgctcctgctctctgggctgtgcgccgccagcggcctgttgctcgccagcaccgtggtgctgtccgcatgtctctgcaggcggggccagacgctgggcctgcagcgctgcgacacgcacctggtggcctacaaaaacccggcctttgatgattacccgctggggctccagaccgtcagttagcccagcttctgggataacgcgtctcatcgaactggatctgagcgcaaaaaggaagacacagacggtcaaaaacgaccccatccgctcctagggtttctaattcccgtgaagccagaatgccttgagcacacatggaacttgccacactgagtgtctgggtccaaggaactgctgccctcccttccttctacttaactctgttcccagaaacctgatggtcaatgccagatcgctccccactgccgccaggccttcttgtgtgttgttggttcatttgcggttttcagcagtcagtgcctctctatccagtagaatagtgtatggacgtaggaagggatgaaacagagaagttgcataacccagcctctttgatcatgttagaaatcacatcctcaggtctttccagcggaagctccttcatggtcaagctctaagacacaacgagctctgttattcaagaaatcaattccagtggatttccagttccaattcctgagaactagggtaagggggagagctaatggttgcttcctaaggccttctgggtttattagttccatttcaggacatgacaagaaaatgtactcccggctttacagttaaaaccagttttctgggaacatttgtcaaacacagggaaaggctgtccttttaagttagtgtttactgcatttcacctaagactaaatggacaaatgaattataaattcattttttaggaggcataataaactttggaaatattttttcttaattagagggaagaaatgagcaaaagagaacccgaggct

SEQ ID NO: 12610 - DNA, 1863 bp, Homo sapiens
tgaaataatttaaactttatatgaacatttcgataagagtttgtggattttttctgtagataatatatttgatccggaactcaagtgcatggaaacatgattttgatttttaaaatctaaaaaaaaaaaaaattaaaatcatgcttccctctattgcagtatcagttatttagtcacagaatggtattttatgtaaattaaaattaggtgaatgcaatgcaggtaactggttttggaatgggaatgtgcagtgctttatgtttggggagttggagcagggtatcttttcatcaattagaaggaaagtttgaaacttctgattacctttatgttggtttctcttattatttgtctcttgctagatctgctaaaccaacccagcttgctcagagatctcatattgaagcaacatacaggcaatccacatctttctttccctttgaagtatagtcattggatgggatgagggacagggcctgttgggttcacagggccttgcactgcatgggcacatacttaaaagctcttgtgcatggaatccctgtctgttagccacaggcctctttagctctatacattcaaaataactactgtagtagaaaatagataagcttcagctgagttggcttttgatagtggaaaaaaaacaaaatttgactttttatggccaaaattccttgttgacagctgtgatgttctaatatgatttgggaatatgtcagtctacagaacctgcatcctgtaaaaacacctttggggtagacgataaaagtcatttttaaggcaaatacttaccatgtgactttttattaccaaatgcatcagtagtggagctggtatgttgtttcataggatggaaacattagaagtccagagaaaaataaattttaaaaaaaggtggaaaagttacggcaaacctgagatttcagcataaaatctttagtatgaagtgagagaaagaagagggaggctggttctgttgctcgtatcaataggttatctgtgtccctcatcttggtgttacagtgttatttctgtcagtattatgaatatgtggttgacccatcctgtcaaatgtaccaacattttcgaaagaattcattcaaatctcttatgccaacagaaaagttccttcttgtttaatatctctttacctcagtcctacattttgattctctggaggagattttagcttgtcttaaaaagccaaatttggagtcatcaagcctgctgaacctgatggggcagctttttgaacagctttctggaagtaagaacttcagttgaaaagccctttgatcgcttcagcccgggacatgcccttcagatggcttattctcagtaaagctttatgtagactgtgacactgtatatgtgtgactcgtacaactttgacgtgtttctgaagtggtttaatcgtatttgttattagcttctttgtggaaatgcaatttttatactaaaaacattgcttatttgcaatgcaatatgttataaatttgttgtttatattactggtattagtcttagcctaatgaacctaattatttttctttctgtattctttgcttcctcaaatagcatctgcagcaattggaatgagaaatccagatatgtgtttcaagtagtacattgcctgaatcacaaatcacttgatcacagtattgtatataatccctgatcctatttgtttcattttattgtaaattcccatttgcatcaaaacctaatgatagtgattggtaagtaaaaacaaatggtgtattgcttttcatacaagtgttttcacaaaagccatttgcctaggcagcaaaaaatattaatttgttaaaaaaaattttccttcgtgtccatcctccatct

SEQ ID NO: 12611 - DNA, 1068 bp, Homo sapiens
ttgttgttgatttttttttaagttttctaagcaatatttttcaagccagaagtcctctaagtcttgccagtacaaggtagtcttgtgaagaaaagttgaatactgttttgttttcatctcaaggggttccctgggtcttgaactactttaataataactaaaaaaccacttctgattttccttcagtgatgtgcttttggtgaaagaattaatgaactccagtacctgaaagtgaaagatttgattttgtttccatcttctgtaatcttccaaagaattatatctttgtaaatctctcaatactcaatctactgtaagtacccagggaggctaatttccttaaaaaaaaaaaatctatccatctacttctctcttacctgatttatgtgttagaataaattcatgaaattcgattccaagcatacgaaagatgcctaaagttgattctatgctccttagatccagacagaataatgagtacaggtttatgaaattctaaaagtttctgtcgtctttaaaaaggaacgtgcagtatatttctatctggctgtttagataaccctttccttgtattaattgtgagcacggagctcactggtgggggaggttctgaaactctctgccctcctgtggttgaatgaagatgttgcaagacttgcacaaaggaggttattcttctgacagcatcaacttttagagatggttctttttcatctttccaattcagttacttgacagtctccttccccagtatgctgaagtttgttaagagtcaccagtaattgtgcttttcagacagtagtgcagcttcaaaatcgaggccatcactgggctgatgggctgggagaaccttgccatgtgcctgcctgtttcctgcccccttagtcactgcccatttcctgcccccttggtcgctgacacaccttcacccaaagtgccatggttctgatggtggcagttccatctccctgacatcaggaagcttttctcgatcagagcagagcggggcctgcctgccctcgtgtcactggatttctttctcttataatcagctgaaacagagttctc

SEQ ID NO: 12612 - DNA, 1109 bp, Homo sapiens
gtacaaaacaggagtcctcaacttcactccaaacttgtgtctccttccggtttctaaatcttcatgaaacaagctatccatctgttgagtctaccccatcaatatccttcatttttgttcacttttctccattcctattgccgctagcctgaatttatgtctgcagaatttcctgtcttgattgttccaagaatttttcattcagtctctctatactgtctctttcttatctgtgcctccattcatgtcttctattggctattcagtgagcatcaggtactttaacagtgagatcttgctctcaggagtttacagtttactggaggagacaaatagacactactttataagtttacatctttgcccgttgactccattctccaaaccagctaaagtaatttgcacaaaacaaatcttattatagcattacctctaagatacttcaacagctccctgttgctatcaggattaatttgttttcctaatttgccaaatgtaagccatccctggcctgacccctgtgatgaagttttaactcctttatttgcatcacctatactaggctgtgttgaaatccaagaacataaagcctgctgcactgtggacactgtggctttgcactatgactttgcactcaatccccttcttcaactggctgactcctacaggcctttagagacttcatacagttgtcatcttcctgtaaagccttccttgatttccactccagtccagattgggtgccctactttagtcctcctgttgaacagtttgcaaattttagccacagcatgactctcttgggaaatggaacaatctggtgcatattagtgactaagttgatgtctcttaaatgaataaataaccaaatgccattattgcaaagcctgcagattgggtaaattaggaaaacaatctgatgattaagcaaaaaaaaaaaaaaagccaaagtttagtaaaccgaagccatctgcagacctattaaagaaaaaagtatttcatgattatttacactggtcattgaaaagtagcagaataatcaatttggaaatatgataagtaatttgaaaattctatatccattatttctggtaacagaaatcctgata

SEQ ID NO: 12613 - DNA, 1190 bp, Homo sapiens
tgtgataaaattatctacacacagtcaaagcaacgtgtcaatctgtagaaactaaatcaaacagtttgtggtatggtctaaagataaagcaagtggtctaccctcttctcaagtggttctcctggcactgtgtaaaccagtccccaaaatttaatgtgtataaaaacttcctggagatcttgttaaaatgaagattttaactgattcaatagatctggggtagactccaagattctacgtttctaagaaggtcccaggcaatgctgatgctgcttgtacatggaccatattttgagtagcaaggatgtggtgacaggatcatatttatgggagaagagaggccagggttgttaagtgccttcagataaggatttcaacacacgtaaggccatgtttctgatgttataggcgaaggagatgcagcagatggtgaaattggaagccgagatggaccgcagaccagcaacagtagtatgaaactccaaaatgcaaactgaagcagcaaacccacaaagcatcaaaagactcactcacaaacttctgaacacaaactccatggatgaaagctgtttattttgtttcctttatgtgtaaacaagatgatatctgaaaccagagagacttggaatgtctgactgacttctatttaacagcttgagtattgcatttccttggccaaacaaaaatagctacaaatccacaaaaatttactattccagtaaggcagagtccaaccattgataatacaacttaaacatgtttgctataaaataccatcacaagtaaatgagcttggtgtgaacaactctcctttgtgatgccttaggacatgtttgaactgcagcaaaaaacaaaaacaaaaaacagtgcattagcaatttcatagcaagtgcatgcactaggaaaagaaaactctgtctacaagtttattagcagaagtggtggtctgctagacaaataattttgcaaaatttttctacatctaagttacctcatcagtaagtgccatgtctctaccatgccatcagaggctaatttcctgtaaaagttgtggaaattgttagaacaatagaaaaatagagcagtgtatgtgtgccaaaactcatcattactcaaaggagaactgtgttaggcacatttaagaaagtttacatctgacattgctttataggaattgtttctgcagattc

SEQ ID NO: 12614 - DNA, 1195 bp, Homo sapiens
catggacttttcttccttttggccagagttgcttcagtagatctgcagccatgacttttcctctgaactccaacttttccttttccttttcctttcccctttcccctttcctttcctttcctttccttttttttctttctttctttctttctttttttgagacggagtctcactctgtcacccaggctggatggagcgcagtggcatgatcttggctcattgcaacctccgtcacctgggttcaagcaattctcctgcctcagcctccctcctgagtagctgggactacagttgcacaccaccacacccagctaatttttatatttttagtagagacagggtttcaccatattggtcaggctggtctcgaactcctaacctcaggtgatccacctgcctcggcctcccaaaatgctggaattacaggcatgagccaccgtgcccagccactgcacaccttatttctattggctttccaaacagcttcacccagaaatctcattgatcctcatctctaaagcttggtttatcttaccaagcctacctaccctctctataccttaggaagctaccactcatgtagtcaacaaagttaaaaaaaattgtcattgtcatcagtcttctctgaacacgtttcattgacaaccaagcctgtctctgattttcatctctaaagtgtcccttgaatatctctctctcttgttagtcctatggctactgatgatccttgccttctcccacttgactttgttaaaagaaaaactttagacaaaataaatataacagtttatttgagcaaataacaattcatgaatcaggcaacactcaaatccacaagagattctgagagctccgttccagcagtatgggcagggggctttcataggctgaatgtggaggcaaagtaaagaaattacttgattggttatagctaggcatttgccttatttggatatggttcaatagaaagtccctagttaatataacgaatttgctagttggttatctgcgattggctgaagctccattcaaaattaatcagtcacaaggaatgcctctaagttaagttttggtttgcttatttatgtaagggttcctagtacagaaacaaccccagactaatggtttcttgcttattttggcttaacagcttgttaatgataggtatgcagtaatttgtgataaagagggaaaa

SEQ ID NO: 12615 - DNA, 1179 bp, Homo sapiens
cttctcattacttgttgcctataagccaaaattaaggtgtttgaaaatagtttattttaaaacaataggatgggcttctgtgcccagaatactgatggaatttttttgtacgacgtcagatgtttaaaacaccttctatagcatcacttaaaacacgttttaaggactgactgaggcagtttgaggattagtttagaacaggtttttttgtttgtttgttttttgtttttctgctttagacttgaaaagagacaggcaggtgatctgctgcagagcagtaagggaacaagttgagctatgacttaacatagccaaaatgtgagtggttgaatatgattaaaaatatcaaattaattgtgtgaacttggaagcacaccaatcttactttgtaaattctgatttcttttcaccattcgtacataatactgaaccacttgtagatttgatttttttttttaatctactgcatttagggagtattctaataagctagttgaatacttgaaccataaaatgtccagtaagatcactgtttagatttgccatagagtacactgcctgccttaagtgaggaaatcaaagtgctattacgaagttcaagatcaaaaaggcttataaaacagagtaatcttgttggttcaccattgagaccgtgaagatactttgtattgtcctattagtgttatatgaacatacaaatgcatctttgatgtgttgttcttggcaataaattttgaaaagtaatatttattaaatttttttgtatgaaaacatggaacagtgtggcctcttctgagcttacgtagttctaccggctttgccatgtgcttctgccaccctgctgagtctgttctggtaatcggggtataataggctctgcctgacagagggatggaggaagaactgaaaggcttttcaaccacaaaactcatctggagttctcaaagacctggggctgctgtgaagctggaactgcgggagccccatctaggggagccttgattcccttgttattcaacagcaagtgtgaatactgcttgaataaacaccactggattaatggcctgtagtgtcgaggtgaattgtttgtgagcaatcaggggaactggccacagcactgaaagggttttaaagggtttggaattggtgttgggaaacgagcagggagatttaatgtct

SEQ ID NO: 12616 - DNA, 1103 bp, Homo sapiens
cattccccatatttaattaggtgtaaacattttagcggtgattaccatgcacattggaaataaaatgtcacaagttccattgctttgaatgcatctgttctacctgataaatttcccttgcctttgcaactctgattagatctactttttgttgtcgtgaagactcattcttttgaaaatagtgctgttacaaattcattttatattgaaccctaaatattcagtactattggccaaggctgaatggaaaaaattgacctatgtatctttctgatgataaatcacattgccctcagtttaggccattaacggacagcccagttggaaaacacatctcgtttaaagttctacacctgctttggagactcttgtaagtatttgttgcctttgtgagagtttttgtcttttaatgccacctaatttcttctactaatctgttttttttgaaagtggcggtcttgcctacccatcaccagcaaacatactctatagtgagggactaattttggccctctgctatgatgttgtactttaggtctctgtggatagagaaggacttctaatgtagactgccacctattttcatacctttgttcatggagaatgtagcaaaaagtcaaatataataaagtccacctactttttttttttttttttttgagacagagtgtggctctgtcgcccaggctggagtgcagcggcgacatctcgactcactgcaagctctgccttctgggttcacgcctttctcccgcctcagcctcccgagtagctgggactataggtgcccgccaccatgcccagctaattttgtttttgtatttttagtagagatggggtttcaccatgttagccaggatggtctcgatatcctgacctcgtgatctgcctgcctcagcctcccaaagtgctgggattacaggcttgagccaccgcacccggccaaagtccatctacaaatttaatgtgttgttggagaatgatctatattcctagaaaacctggaaattggtacaattcttaattgaggttatatcaggtgacttttcccaaaatcttattttcaatagaaaaaaatggtgagaagctacaaaagtccctcc

SEQ ID NO: 12617 - DNA, 1261 bp, Homo sapiens
aagtagacagtggttgtgtttggctctcgttttattccttttacatttgttgcttctgggatttaaaaaattactaaattcataagatagttaggtattaaacacttcagaatatcaatgtaaaattggaaaataaggaactgggggcatttgtttaggccatgacttctacaagcagatttcttttcttttagtttagaagacaaaaaatttcaatacagatacttcttttagaagtaaatttttagattttattgtcagtagaaaaaagttaaactcctactaatttaaactaagacagtttaaaaaggaagcctgaaaaagactcatactacaaataatttaattgatggcatataagaatatgcagtttgaaaaagccaaactcttctctccacttagcttttgatccccactgtttgcttatttgtataagtcatactgtgtagaatttctattttctttttccccattaaaagaggaccaaacaattctttatacaaatggagtagcaactagttttgtagcactacatttaatgtaatgagatacctttgttcatttttttaaatttgaaatatactttacctgatccactttgattgtatactatattctttgttaattttaattttgtcctgttcctagactgctagaatctggcccctggccatcttaaagtgccaacatatgcctgcagggtttataaaaaatggcctggagtgacacattttattatacctaatattcactgcatcagtatcacatctagctcccttacttgtccacagataatgtaaacaaaggagggaaaaacttattaaattctccttcgctgctggcttgtgctggtttagtgcctgtgtccctggcagtgtccagtgtgttcacttccagttgaagtatccatgtgtttctgggcagcttttctgctcagtgtgatcctgagatggcttccccgccgccacccagagtgtggtccttggccgcctcctgctcctgctctgcaagcctgaaactggcttgtctggagccaggagttagtcctggggtgtgtgtgtgcctgcgcacccatgcgcatgcaagtgtgtttgccagctcaggagctgtctcctctctacctggctagtaagaggtgggacagtaatggtcctcctgctggccccagcaaggcccatgagtgactgccctgacgtattcactgtgcctctgggccacttcttcccctgtagatgtgggcttgttgccttcagccggcttc

SEQ ID NO: 12618 - DNA, 1201 bp, Homo sapiens
acctttagtctgtgtagtttatattacaaaataatatgatacatcttgatttagaatttacattatagtatccaaaatgtttttgtcaaatgtatgcttttatcctcagattctggcatgcccctgtgactgagagtcacttctttttaagtatggagagtattaacagtgggaggagaaatgattagtttgagatttagtgttctgtataaaatatgaattgtcaggatatttgaaccaaactgggtcatacaatttctgtggctattttgaattgccttacaatgaatgaagcttactaaattccttgtacttttcatttaataactagattttattgttttaatttgaataatattaagtgagccatattaccaattaacctgaatataaacacttgcttgtttttaatctgagtagtttatgtcttaaagtatggaatggaactagtggtcaatttttattaatctaagtgtctcccatacttctttaagcttttggaaagtttgagaagttgtgattttgcaatgaataatctctccccttggtttcataggcaattgaaaagctgcaggccggtgctcttgcaactgacgcagtcactgcagcactggtggaacttgaggtatttcttttctctgttttatttaaaatatttgtgagtttatctttattgttcttaaatgacatgaaattgttgagttagtcaaccataaattatatgagcagtgtttcccaccaatattagcaaagttatgaagaagcctatgatattgttgttttcattggtgacttttctgagtaatataaaagctggttaaattcctttcttttcttttttttttgtgagattcatgaatacaaaagttaaggattggatacttaagtttcccattttcagtaggaaaatccttgaagttaacccccaaaaagtgatgtatattctgttgtttaaaaataaaagaaaaattccaactgtctagaagtgcctaaagtagaaggggaagattcttcacgaacctaacagttagatatataccctgaaattgtgtgctgtgaagtgtgccttgtcccagtgttatggttaggtttgtccccagtttactgtggacatcgaataattgagtggggaggctctcacgtttgccataattttttatactctagagtgaggttctctcagttctcttgatttggaacc

SEQ ID NO: 12619 - DNA, 1187 bp, Homo sapiens
gacagagcttactttgttgcccaggctggagtgtagtggtgcgatctcggctcactgcaacttctgcctcctgagttcagtgattcttctgcctcagcctcctgcgtagctgggattacaggtgtgtgccaccacaccagctaaattttttgtatttttagtagagatgaggtttcaccatgttggtcaggctggtctcgaactcctgacctcaggtgatccacccgcctcagcctcccaaagtgctgggattacaggtgtaagccactgcgctcgcccctaagcaggtactatcagtggacagagagatttaaattctaacctttttatattacccaattaaataattttatccgacttcaatgggaataagaaaaaataattttaataaatagctttgataccttttttgtattgctcaattaaataacttaaaaataggatttttgaacattatctttgcatgaatttgtgtaagtaacttatgtgttggtggaaagaaatgtataccatctttgcctgttttcctttagggtaattcctctcctgcaattacttttggatggaagtatgcccctttctcagtagaagatggtaatcttggagaatgaccatggagaaggggatgagttctggagaagggctgccttccagatcatctcaggtttcggctggtaaaataacagccaaagagttggaaacaaagcagtcctataaagagaaacgaggaggctttgtgttggtgcatgcaggtaagctttgtggatggcttggaagatgccaataatgttgatttttctttttctgccttgaagtacactgagaatcacatttcacacttggaggaggcaaaactgccagagaggaattggaagcaaagcgattgtttgacttggatatagtgaggacctccctctttactccccagttagaagatcttagaatggcagctcttcctaggttttcacttccctaacctattatttactttaactctatgtaatagatgtatttaggttaggtagtattaaaaccagacaaagtaatttttgaactctggtttatgttttttaaaaataatgttgctgtgggaggctgaggcaggagaattgcttgaacccaggaggtggaggttgcagtgagccgacatcatgccactgcgctccagcctgggcaacaaaccgaga

SEQ ID NO: 12620 - DNA, 1136 bp, Homo sapiens
tataaaaggagatacacctataatgcatatttgctataaagattaaagggcggctgggcgcagtggctcatgcctgtaatcccagcaatttgggaggctgaggtgggtggatcatctgaggttaggagttcgggaccggcctgtccaacatggtgaaaccccatctctacaaaaaatacaaaattagctgggtgtagtggcacatgcccgtaatcccagctactcgggaggcggaggcaggagaattgcttgaacctgggaggcggaggttgcagggagccgagactgagccattgcactccagcctgggcaacaatagcaaaactccatctcagaaaaaaaaaaaaaaaaaaaaaaaaaaagattaaagggcatcatgtatgtaaagagtacagaggagggcacatagcaagcactcagtaccttataacttttattattctttttcagcttaaaaaattatatgtctacattgaattcatatttattcatgaatgaatacatacgatgttttctgtgtgccaggtcctgttctaagcatgtttcaaatattgtctttatttgatctgtatggtatcctgtaaggtgaggacttaaaatattcccaatgtgaaattgtgaaattgaggcacagacaatctaaaaacttgcccaaggtcacattgctggtaagccactaagccagatactttgaaaatagtattagcatttatattatataaaatctcttttagtttccctttttttcctaatagtgcaagtttattcaccatgtttttagtttttctcaggaagatttaaagaagtgttaggtggtggccttggtgcttcagtggctatcaggtcagccagaggtgactcgtttttgtcaccagggtgtgctgtgattccaccagtctgaacttactgcagctgctgtgaagctggatgggaatctctttattgtctttgctgctgcttagcgaccacaggtttttcagcttggcgctttaccatcacctgggcaactgcctgagatcccaagttattttctttttgtgttgtaccatcctttcctgctcatttgtgtcctcgtgtaaatgaaggagctagcatgtctggcttgttagcagagtgcctagatgcccgagctgtat

SEQ ID NO: 12621 - DNA, 1866 bp, Homo sapiens
ctttcagtgaatgctgtttgtgaggcccatctatcttgatgcatgtagttacaattattttttctcgttactgtgtagtattccgtgtttgtatataccccagtttatccagattagaactggtcttttaaaagtttggttatcttagagaaagaggtaaactgctgccataattgtaaatagaagtgttgttttttctctctaggcataaaacatgaatgtcaagcaaatggaccagaagatctcaatcgggcttgtattgctgaaaagttaggtggatccttaattgtagcctttgaaggatgccctgtgtagattattcagtgccacaaattgaaagcttccatgtttaatgttatcctcttgctatataaataaagcaaatatatttaggccagggtctcactgagggggagctgtcttgtcatcttttagagtaaactattctataaacatatgcaaacagccctaaataaatctaaagtctaaagttttattgatgtgaaattaaattcttattggccaaatgcctgttttgatgagttgatttataaagatttttgttaagctcaggattttaaattacacagttcacaaacagtaaaggccatgtgaagagaattattacatctttattaacctcagcatttactttgtttcttttgcttaggaaattgctcataatctggttataattttggtccaaattctttattcttccttgagctaagcagaataatggaatataatatgtcttcataatataacaacactaatacactaatagtaagattaagttaggcagtcttctaccaaatgtgtaatggagattgcctcaaaattgtgtccacataatccacgctcatcttgcaaagcgctatttcaggcacatcattggaatacaggaagtagccctgcacctgccagtgagctcgccattcactgattggaagagtgacctggcatcttggaaatcattgtgtgtcttcaggagaatgtgcagtgtcttgtaacaactaattataatgcaaattagggctacattgtaatctgctttgttaatgaaaatgataaaacagaatattgacaagctaggacacctgtggtatctttaattgtatctccttcagaagtttgcttcttatggtataataaagtatggaagaatattgagtatatgtttactctgggcctgggagaacttaactttctagagcagtttgttgacttgtgtgcaatggggagaggtaccatgatgacactcacagggagccactgttcactgacacttggaagcggtcattgttaatatcacgggcgtaacactttgaacgatatagagatgcacaaacagttgaacttagaagtagcagtattggctttatgtaataaaggaagcatttttgacttacctctcgtgtaattttcatgtgtgaattgggaatacaggattttgccttccatatggggtaaggcattgaggtttgggtatttccaataattaagagttaaggttggctgagtgtggtggctcactcctgtaatcccagcattttgggaggccgaggcaagaggatagtttgaggccaggagtttgacaatcagcgtgggcaacatagtgggatctcatctactaaaaataaacaaaattagccgggtgtggtggtgcacgtcagtagtcccagctactttggatgctgaggtgggaggatcacttgagcccaggaggtgagctgagatcgtgccactgtactccagcctggatgacagagcaagaccttgtctcaaaaaaaaaaaaaaaagtcacaactccctctggtgaataagaaagttggtgtaaaagttgggaacgttttcaatgtttat

SEQ ID NO: 12622 - DNA, 1189 bp, Homo sapiens
gtttaggaggctggtttccatgcctttatccctcgtgcaattctctaaggtggatttgaatttttacctgtttgacagaagcagaaagcaaagctcagacttcccagaagtcatgcacatgaccagcagatggcagagcggccggtgtgggcagcccctcccgaggcccccgccctgcccggcaggtgcccctgtgcccttctcgccggcagttgcacagagaggtgtacacggagatcaagtcagatactttttcttttgaacctaactcagtttctcagggtctgaagctctgaagaaaactctctggggcttatgaccctttattcactttctgtggaagttcttcaaacccaactttttcttttcttcttctttttttaaagaagaacaaaaacatcccctagggaagcgagccaagtatcagtgtgagaagctgctagatgacactcttccagaaatctcttttcagccacttgaaaacgtgttgaggctgggactccggtcactgcccccagacggctgtggtcagacagcctgggattaaaaatcccctgccgttttctgcaggcattaggtagagtcctaattgctgtttaaactgtattctccttgggccagcctgtgtgccttgggaagggccttgcccagaggtcctccaggaattgtcgttcttttaaaaatattgtgatgtgggttttttttaactccaggtataaaattggttttgttgaaatttggaggaaaaaacaaaactttaaagaggaaaacagttcttcaatctataggatattttaaattccattagataccattaaatataccagtccccaagtttgtagccgattacgtttttctccaactaaaggaaaaggactgattgaaaggccctgaattgggttgttcttgacattatttgtactgagctccattgcccttaaagctgcggatgtgaccgttcgtggcatttggggtcaagtgcagctgcgcctccttggcctgcttcctgtcaggagcgctgagcagcgcttgggcaaggccgggctctgtggcctgagctgggcctggagtccactgtttgtgcactgcccagggcctgcctcagctgtgggcagatgagcaatgagtgagagcaggagtcgcagtttgcctccaggagcatttggtagatcttcatttcctccagggt

SEQ ID NO: 12623 - DNA, 1363 bp, Homo sapiens
ctttttgagacagggtctcagggtctcggcctgctcccaggctcgagttcagtggtctgatcgtagttcactgcagactcaaaatcctgagctcaagtgatcttcccacctcagcctcccagagtgttaggagtaaaggcataggccaccgagcctaggtgattttttttaaggctttgctgtgttgcccaggcttgtctcaaactcctggccgcgggcgatcctcctgcctcagcctcccaaagtgctgggattacagacaagaacctctctgcctggctgggtttcttttattcatttgttggacctgctttcttggtagcagtggtgtattgattcccagtaggatttatctgccaggagatccttacagatcattagttcagctgttttgctttgtgaattcatttgaaagtattataatttcggtacttagtaattagatggatttcttgacatgcattagatatttaaggcagtaatttaactctggttccatgttgattccattagtacatgggcttgcagccttgtgaaatgatgattcagtttatccattcgctgagtgcgctgcactgaccttcttccaagcctcagttcctgttctaggaacttgaggctatgtagcctgaaaatgccctgcagtctgcagtgttctactgtgaactgcttgtgtgttggcaggctaccggtaagaatggttggtgtcagcagggacggggccctctgagacccatctcacaaagatgagtggtgaaaatctgatcacttgctgcagccctttagttttttattaagccgatgcctgagtagctttaatagctattagctatgttagtagactgagatcttctgttagaagtctttagttctgttttccttgggggactaagaaattatattgcaggcctgaattacaggaaggggagaaccaatggctagggaatgagagccaatacctgtaaaagcagagttgggctgggcgcggtggctcacgcctataatcccaggactttgggaggctgaggcgggcagatcacgaggtcaggagttagagaccagcctgaccaacatggtgaaaccctgtctctactaaaaatacaaaaattagctgggtggggtggtgggcgcctgtaatcccagctactcaggaggctgaggcaggagtatctgggagaattgaaccccgggggtggaggtcgcggtgagctgagactgtgccactgcactccagcctgggcaacagagtgagactccgtctcaaaaaaaaaaaaaaaaaagcagagttaatatattgcttatagttagttgaaccagttgtttctcacacaccagtgccataatctaaagctgagattgaaca

SEQ ID NO: 12624 - DNA, 1244 bp, Homo sapiens
gaaagggctctgtccaaacatgtcgaaaaagttcacaattttgatgtgcaatatcattctgatgcagctttcgctttgatggttgttttctctccaataggaatacaaacataaaggccttcgaccgttgcaaatagactaaagtgaaaacaaatctgaatgaagatgaagttatttcagaccatttgcaggcagctcaggagttcaaagttttctgtggaatcagctgcccttgtggctttctctacttcctcttactcatgtggccggaagaaaaaagtgaacccatatgaagaagtggaccaagaaaaatactctaatttagttcagtctgtcttgtcatccagaggcgtcgcccagaccccgggatcggtggaggaagatgctttgctctgtggacccgtgagcaagcataagctgccaaaccaaggtgaggacagacgagtgccacaaaactggtttcctatcttcaatccagagagaagtgataaaccaaatgcaagtgatccttcagttcctttgaaaatccccttgcaaaggaatgtgataccaagtgtgacccgagtccttcagcagaccatgacaaaacaacaggttttcttgttggagaggtggaaacagcggatgattctggaactgggagaagatggctttaaagaatacacttcaagtaattatctcaattctgattctatatgtttgctatgttttctataatagagagcaacggtgtcaaaagaatgaggtttggttttgtttttttaacttactagcaaggaactcccttcagatagtaattaacattaaatagcactttatgtgtattaactcacttgatcctcatggtagtcctgtggagtatagatactgttatccacattttacagatgaaactaaaatagatcaaatatttgactaaataatacataaaattcacttgttttataagctaccaacaatattagaattgcttgttttccttgattattgaaaaaagtcacctggtaacagaattctagttgtttgctagataattctgtttagaatccagtaaatacccactgtcctacttattagcgtaaactgactcgtaaatttaaagaccttgaagcagaccagaacacatgacctatatttagaccttggtaaacataatcagaggttcttcataaggatctgaggataaatacactttaaccttcaacttctaatttactaacttggacaagtgaggagaatagctt

SEQ ID NO: 12625 - DNA, 1104 bp, Homo sapiens
aaatttggtcttaggggttgtcacttaaaaataactaatgtaatttttggccgggcacggtggctcatgcctgtagtctcagcactttgggaggccaaggctggcagatcacgaggtcaggagttcgagaccagcctcaccaatatggtgaaaccccatctctactaaaagtagaaaaattagccaggcacggtggcgggcgcctgtaatcccagctactcaggaggctgaggcaggagaatcacttgaccccaggaggcagaggttgcagtgagccaatatcgcccactacactccagcctgggcgacagagggagactccatccaaaaaaaaaaaaaagaaaaaaaaatgtcatttttaattgtattgtttcagggcgttttagagtatttgtttttcagtgttagctttgtttgtgtttcccccctccccttttccctgattttcttttcagacgtctttttacaagggaaacggttccacgaagccttggaaagcatactttcaccccaggaaaccttaaaagagagagatgaaaatctcctcaagtctggttacattgaaagtgtccagcatattctgaaagatgtcagtggagtgcgagctcttgaaagtgctgttcaacatgaaaccttaaactatataggtctgctggactgtgtggctgagtatcagtaagtatgagattggaggtgaattaatacagcgtaggacagatggtgcctgtcaaaggtgtgcctgtaggtactgtagcctctgtctgtttaatgtccagacctttgtgctaggtaaaagaattgggtggggcggggttgagaacaggtacaaggagaagagccacgtaacctttgtcatccagtactccaaaatcaaattgtttgctggagaaaggtatattctttgtttgtttgttttgttttgagacggagtgtcacccaagctggagtgcagtggtgcaatcttggctcactgcaacctccgtctcccaggttcaagcggttctcctgcctcagcctcctgagtagctgggactacaggcatgcaccaccgcacctggctaatttttgtatttttagtagagacagggtttcaccatgttggcc

SEQ ID NO: 12626 - DNA, 1203 bp, Homo sapiens
tataaagacctagacttcggcacgcgaaatcccagctatgctacctcttatttacctgaaaggaggacacgcaggatgggcagtcatgctggtgactcttgtactcccttgagggacattgggggggggggggcgtggtcccaggcaggatgcccagtctttgagctgagattggaaggcagtgaggctgagggtgccaagatttccccagggttcacccagaggggaaggggctacatgcccccagctgtgtgcagggaggacacatcagcccactaccgctgccaacaccaatgcctaaaacttgtttcatacattggggttttctatatatttcagctgggaaaagcttacatttaaccttttgaaaaaataaatacgtgattagcctcaactaaacattgctgactataaagacagtatattcaccatgtcgctggcaatatgtcattgcgtaacaccaaataaccccccagaagtagccagaggccagtttgaacatcacaattctaagtgttttagtaactatttctggcgtgagtcaacagatcatgtagatagagtcaattattgtttgtggagtttttcagctataggggaggggaactattaaaatccatttgtttctattcaataggtaataaaaattagttgtccctgggtttgggaaacttaaatgcccattacagccctggggaagggttttctgtcttatggagtgagtcttagcatttaagttatacagttgctgccttaaaatagtagcctgctacaatgacttctttgggtagccattttcataagaaataaaatacaagatatgagtaatgaagctttggttttgtttactttgtgtgtttataggataattttataaacctggaaattgtttgcactttttttataattcagaattttacaagcccaatagctttggtgagagttctgtgtaagtgcataaaagaaagcgtcctcggctgggcgcagtggctcacgcctgaaatcccagcactttgggaggccgaggcgggcggatcacaaggtcaggagatcgagaccatcctgggtaacacggtgaaaccccgtctctactaaaaatacaaaaaattagctgggcgtcgtggcgggcgcctgtagtcccaggtgctccggaggctgaggcaggagaatggcgtatacccggaaggcggagcttgcagtgag

SEQ ID NO: 12627 - DNA, 1430 bp, Homo sapiens
cacaaattcactgactgtggccactttcagaacacagagtttcatgaactgattactgttgtaaagtctttgctgaaagtaccagcatagactgtatgatttctgctattttgcatcccaatataggagtagaataatatctactatcagctgattactagacacatagaacatccagttaagttccgtaagtgcctgaaaaacaaacacaagtttcaacattcaatctaagttacaaatagcacttccattttccatagactctaaaactccccaaattgctatgaactaccacagtattttcctcatttgataagaaacataaggacagcttaactacccttctctatccgaagtgagtcagaaacagaacccaggtttcttgattcccactcctgagtaaaattaaataggttttatgtatgttgcaggtattgcacacttttcctctttgaaatcaaacttttctatttcactggggaaagaaaacatgactgaaagtccagagtgttagcttagagctcaaaatactagctgctgtttcaagctggccccagacattaaactcagactagggccttcacctctgacacttgcccctaagtccttcagacatgttgagagagactgagacaggagtcttccggagtcaggcaggaaggagaagcacagcaatatacattcataatatacgtacaactgactagatttgtttgagacaagagtggtgggatcagagccatgtggagagctcatggcctgtctaaattgttgccatgtggaaatggggcagagtgttgccaattttctgattttttgtgtggaaaaaaatctccaaattgtagtttttaaatttggggaatgcaaatatatatatatatacacacacacacacacacatacacatacaatccatatacatatggagtatgtaagttggcaataacagtatacatcaaaaaatttacaaacactgcaagacaaataaaatccaagccatccatttgtgaccacagtcataagcattcacttagccaggggcttttagataattgtctgtgaagtctgagaaaagactaagataaccaagatgaacataatgtcaaaggacgaaatcatggggacaatttggattttgttccaaaagacaagtgtttttaaaaagaacctttccatacttcgtgttctgttctatagagttaaaccttttaacttccatggccctttagatctctttcaagcacattccattttcttctgatcatacttcctcagaaaacctttttttggctgggtgtggtggctcatgcctgtaatcccagcactgtgggaggctgaggtggttgtattgcttgaggccaggtgtttgaggccagccagggcaacacagcaagaccccatctctacaaaatattaaaacattagctagg

SEQ ID NO: 12628 - DNA, 1195 bp, Homo sapiens
ttgataacctttttcttttgtaatataagcatttaatgctgtgaatttccctctaagccctgccttaggtgaatataacaaattatgatatgttgtgttttcatttacttcaaagtattttctattttgcctggtgacttctctttgatgcaaaagccatttagaagtgtgttcagatatttgccttggtgtcttttgctctaagaatggagttttaatgaactggagactctttgaggagaaggtatttgggtttgtacatggcaacatggcaggtttttcagtgaagtgatgcactgatgctggtgtcactgtatgagcttgaaaacatatcttcagctgcttagttactcttatatgcctatgctaatagaatctgaaggcaaacattggaatccttcttaataacgtgtcttctttggtctttttagtgtgttatcattgggcagaactggatcctgaaaaattcaagatgctaagcacctacactactttaagaatttggaactgaaacatgaagaggaagacagaaataagaatttgggaacctgaatagctctgcaaaaaacaccaaaggaccgttttatcgttttctgttgttgctgtggtggagtgatgcagtgggcactgccggtgggccagggggcgggtgcgcatgtggtagaaggtgtgcgctcgtgcctcccccacagaaaggctttgttggtttctaccacatcttggcttgcttttggaacaggctggcccagcatcatttgtcatcaagtccactgtggtgtattctgcgtgtccatggcgggggttctccaatacactcacactgtccatgttctttttattgccagggcccgtgttgaagtgtcaagagagcaatcatcaatgataatgtattgtgtgagacctttgcatcttgtaaattttctcttttttctaaaaataaataataataaaatcctaaatctcaacaaaccactttattatcaaacaaattctgctctgtttctgcataacgatgatgtccatagaaatgcaatgcgtctgacctctctctatgcgtatctacacttcttttcacataagtctctcgcaagagggccttctctaactggcccacacaggctcctgagtccaggtgggagcctgtctagccagtttacaattgatgacatggtacttggaagtgagatgtcaggaa

SEQ ID NO: 12629 - DNA, 1143 bp, Homo sapiens
gatgaacccactgacacgtgggcactggtgtggctgctctgggcagatgacagcaggaaaagattctgcgctttcagggagggggcagagggcagcttgcttctgcaccccaagttgtttcttctcatttatgaacccaagcatgattcacaaaggggctggcaaaacaattgtctaattgaggaatctgatctgcattgattttgctagttccttttatgttaggatttatggtttactcaaaaatttcatcatcatggaaattggctttccccggggtcttttgcccaggagaagttttacctcagttgtccagtgttttcccacatggtacctgacgcccgctaactaagcagaggctctcctcaccacgcagaggcgcttcaggtcatgacagtgatgcccctatcttagaacactcagaagattccagaaatacagggtcctgtccttgcataagttcctgcaggacaggaagtgtcccaaggctcaaaacaacacagaccacatccacacaaaaggcgcatgccggcttcaggcgctaggctgagacgggtaccccccgaatggccttgtgcctccaaaagcctcacgctgcaactttgctgctcctgtctgttgcccagagaggcctcacacaggcctcagaaatgtttcttgtcacacaaagcttttggtagccgattccaagcgagggatttaatccttacatttttgcccatttggctccaaggaaggcttattagacctgtttttttgttgttgttgtttttttttcttaaaaacaaaatgaatgaatgaatgaaaagagaagcaatggtgagccctctcctgctggggcgccctgggtgggccttgcccgtcctgcagcagagaaatcagtcagcagcgaagagctgctggcgcaggccccaggctgtgtcctggacccttgacctgcctcagagctagaggtttgctccaccccgcacttcacttgggaagtaaatccaagaagcttaccagagtccatcgccactgcgcaggctttgttctcacagcggccaggtacagagcaacgccctgcagtgggaagggacagcagcacgagagacgcagcccctaactcagggcttatgatgggtgggctggtcctgggaaagg

SEQ ID NO: 12630 - DNA, 1190 bp, Homo sapiens
agagaaggagaccctgtctcaaaaaaaagtagaaggaaatgaaggtaatgcagtatcttggaagcagagggggaaaaggtcgagaagaatgaggactgtgtaggactttgtagttgttgacagggatcatcatcatctcctttaagagttaatatacatcaggacccatggcaggaacattaccagttccataactggtttcagacagatgcaaggatagtgtgcagtgaagcatgtctgtgtatcatgcataattcacatgatgtaggcacttaagagcaacaccatttctgtaaatgacaacagaagagaaaaaacgaagaacctggtaaaattttgtcattgaaagttttgctgaagaatccctagtaaaggagcattgtggggcagtcctgcttcactcaatttgaaagccctagacctgtgtcctgttaaggtcagcgtctgctctgtgggtgacagcttaagtgctcattgcaggtctgacatcagtcagctactctcatatctttgatttgacttttatcagtttttaaaatttgtttttccatttcaaatcaacaggttccattttttgggcctctgtttgatggagccatagtgagtgggaagctgctgccaagccttgtatgtgccacgtgcatcaacgccagcagggctgtgaagtgcctcatcccactctaccagagcttgtatctttttgctttaaatgtgtaacttactaaccatcccagaatcaagattcctggcagtttttcataagaggtaagtattcaaaactgaattgaagagggaagagaatttttttcaacctctgttaaaaataacatagtggtttttcatagcatttgttaatttatattaaatataataattttatgctgcattaaacttagagtttactttcataatttactcacatacgtttgtgtctgagaagctgtgaccattatgagatgctcatatcttcttaggtattttgccccacgttcagtctcatcctgtatccctcttatttgtggcagtccattgtatataaggtgggatgctgagcaaaacgtatcgctcattcagagtgcctaccagaaaccaaagcaaatgaaatgaccctaataaatcaaagaatgtggcaggtaccacctgagaagtgcaagtaggtttctggaagatcagaggagatagaaattgca

SEQ ID NO: 12631 - DNA, 1371 bp, Homo sapiens
atgtgggtatcttaccacaaagtgacttgaattactactgctaggacagtgagaaaattgagaaccactgtctgtacatgttgtttacacagaacactttagttatttgtgtgcatttgtgattgttaaggttttttgttttatttttcagtaatagcatttgtgctagcctccaactttgcaacaagtctgtattaaagctctggatcaaagcaccttttatggggcctttccatgtgctgtacctttaacacatactcagtttccttatgatgtgtttttccatagaggtttaaagttaactgacttgcaggagtatcggtccagaaaataaactctttcttttgtttattttcagggatatcccagagaaggaaggaaataccctttgccaccaccctcaggaagatacaattggaattaagcttttgtaaagctttcccaaatcctttcatcattctacagttttatgctatttgtggaaagatttctttctcaagtagtagtttttaataaaactacagtactttgtgtatttcttttaactgtgtatatttctactgatctgatctcactgtttatgttgctttccaaagatgtatgttgcataatacagtggatctgaatttattattgcttataaaacacatttgatggaataggagtactggtttttcataatggttaaaaatgaaaccagctgtggatttcaaaacacagtgtattctagatcatctaagatccatgctgatttttattgcacaagaattaggtttgaactcgagctggaacctcagcaaactagagtatatattgttcagtatttctttggaaacatttcattaatgtacttgtcttacagaaatttctgaactttagtaaaaaaaaataaagttaaacttttaaaactctgttttgtgttgttattttgcagtatttcaactttgaaaatcttgaccaagcgtggttttttaaaattaacttttgcagaaaactatttctgtaatcagatgtccaaaccaaaggacaaagaagtcaatgaagaagtagattttaaaagatagggtcagcaagacataacaaaagctttaactttgttgtattatgtcagtgactgatctggctaactcagaaatctttgtgagataaattacatttttacaaatttaatgtagacttctccagttttaaggacttgttttaaatcttcaagttgacaattttaattaatggccaaatagtctatgctccttagcatatttttgtatgtcattagattgcaatttgtactcatgtttttccttgctactaagtacactataaattgcttaaatgtgtgtttggagttcacatacagcacttacatatgca

SEQ ID NO: 12632 - DNA, 1358 bp, Homo sapiens
acccacatctctacaaggaaataaaaataaagaaattagcctgctataggggcaaatgcctgtggtcccagctactaagtaggctgaggtaggagggctgcttgagcccaggagttggaggctgcagtgagctttgattgtgccactgcattccagcctgggtgacagagcaagactctgtctctacccccaccccctgtttttaaagaataaattctcgtcttgtagattataaatctgagactaagaatgatttactcaaggtgacatgcctattaagtgcagaaccagaatttgaaccaggtcttttgaaattaagtcctatttaagactccccagctccatgtatcaaccacatctaaggattggcacctcagtgaaggcaacagtgaaagtgtttggacatgtcaaaaagggagggaagggctctcagccttagcgccatttttttggaaacctctgcgccatgagagccaagtggaggaagaagcgaatgcgcaggctgaagcgcaaaagaagaaagatgaggcagaggtccaagtaaaccgctagcttgttgcaccgtggaggccacaggagcagaaacatggaatgccagacgctggggatgctggtacaagttgtgggactgcatgctactgtctagagcttgtctcaatggatctagaacttcatcgccctctgatcgccgatcacctctgagacccaccttgctcataaacaaaatgcccatgttggtcctctgccctggacctgtgacactctggactatttctgtgtttatttgtggccgagtgtaacaaccatataataaatcacctcttctgctcttttagctgaaaaaaaaaaaaaaaaaaagaaaagggagggaaggagtgagctgagtggtggctgttttgccaacaggggtcagcttagcttgtttgttcatctagctggtgttcttatcctgagcttggttgtagccacacttccaatggagacagtcacattcatcacccatacacaaacacaacctacgacttgcagccacacatatgactgtgtctgcgacagatccaaagaagtatatacagtaggaaagctgttcaggcagtattggtcccagtagtcagttgactcagaaaactgggcaaggatttttattgcttttgggacatataggcagtgatacaaatggtaccttaggccggaaagacaattggctaggcctaaaagggattaggcatgtaagtgctttattcataacataaatagtgcaagccacaaaactactgttaccatgttccctcctccagggaccaagccaacagaaatcaccagtgtgggatgaagtttgacctgaattggagccacat

SEQ ID NO: 12633 - DNA, 1210 bp, Homo sapiens
tccagcctggaacaaaaccaacccccctacccaccaccacacacacacacacacacacacacacacacacacacacacacacacactcaagcatggttgggtctggagtatggccttggcataggtaattttcagtgtcccaagggattctagtgtgcatggggctgtgaatcacagctccaggtgggccaactatgtgcacactggtgcctggggtaggtactaagccctgatcctcacccctgtgcgggtgcttcctattatgctttctgcctttagccctcctcctccctcacaacctggtcaaacacatcagacagggaaagaagcaacatgtgtattattaaattatttgtcagaatttccagaatcagagtctctactgggcaagtagaaaaatagaaaagtttactactttgaaaaggaaactatgacaaacaagtatatattcaggaaagggactcctagaacttgagcaacaaaaaagagttcaacctcggcacagtggagtctgcagtgtctccgcaacaacagaaatgaacttgtgttcctcacatccttgagagtcgaggtttgcatttctctacagagctagggctgaatgaagcaaagagacctctgccacccccactagctggcccagtcctggaagcggaagcagtcacttgcgatcttccacactgtgttgctgggtgaggcctgggcggtcaggatgaagttctggttgaagtcccgttgtttgttcccctcaaacttcactgatccacagatgacaacaaggaccgtggtctggcttggtgtggcttcatcatgaacaggctggcagtctaccacgctgatttggaactcgctggaaggcaacatttcaaaaaactcactcaaggattcttgtcctgaaacagcattgccattccagaccagggtggctgtgcccatgtacaggcgggacagcaaacgccgccgcttatccatggtggtgtagtagacattgacaaactcctcagcagctctgcaggcctgatccacataggtcttgaaatccacagatgccatctctggttctatggaaggagggctccaccagggtatttcctctgccttggggaaccaggggctgcagggaagtaaggttgaagagaagccacgtgaatgccaaagttcattctgccctgacaatggaacattcctccttttctactactggcaaaat

SEQ ID NO: 12634 - DNA, 1425 bp, Homo sapiens
gagcttagcgagctgaccccacagacagactcgatgcccacacagcttcactctttgagcaacatggaataagagcttcaagcagttcccatcctgttagtctgcgtgtgtggtagctgaactcaagatgatgtggggctaagaaaaataattgtccatgtgcaaagatgtgggcaagaatggcctctgcagattttcctgaacttctgctaacttgcacggctttatcacagcatttttaaagctttccctcaaaaatcctgatctgcatgatctcagctactttattgacaaaaaggcagtgaacataacctcacttaattctggtgtagggtgtatgtgctaatcgttctaattcttgattacctagtttatagataactgctggtcttaattgcagagtacagagaactgaaccagctcctgatattgtagttagcagtcttcctggcttctcactctgccttatatttccatgtgggtttacttctctcataactactttcaaggtatttttcttccaagctgaaataaaactggggccacatattttcagtcatttcttccctgttgaattgaagcaaatcagattttctgtggggaccctcaaatgcaactgaagaaatagattgttgcattcattcctccccaccccccatttgtaggcagtaaacaaagtatgactgacagattgaacacctgcaaaactgctagcgtaatctcagcacatacgcagctaggaagtttgtcataaaatcaacttagaaatgagatgaggctgttcagtttgtcttaaaaaaatcagattaggtaaaagctgtcctaccaaagagtctagcaaaacaatatagtatttttttgcagaggcatgaaaaattaagacgctttagagtacttgaaagttgtgtagtcattttatttgcaaaatgaggtgactgtggcaaattatagaacacagagtattattacttttgccaggtttttctgacttgatttctgtaatttccagaaacccagacttctcatttccacacctagagatggaaacaggcaagtaactgacatgtctatttccttgggagcatgtgagaacatagcagtagggaccaaaagtctcagcacacttacctccgattatgccttaaagagttgattgtgaagaaccagtaactttgtcccaaatgcttctttggctgtttcatgcaggacttaattattgcttttaaaaattcacaatgaaaagacgattctgctgtatttgttaaacgttgacatttggttctagggccttgagtatgtgccacgtgcttgtgaaatgctatgattcacatgtaacatttaaacattaatttaaaaagggaaccttggagaattcttttgttcactagttccttttttctctacatttttaatttattaaacttg

SEQ ID NO: 12635 - DNA, 1357 bp, Homo sapiens
tagtaggcggctcgcgaatccccgccgccatgacaggacccggactacagctcccgaaaggcctcgcgcgtcgcgcctgcgcctgcgtccctgcggccgccagagggagggttaaggcgcctgggcgcacagcgagccggctgagggggctgtggcggccgcggcgggcgacatggacaacgcggggaaggagcgtgaggcagtacagctgatggcggaggccgagaagcgagtcaaggcctcccactccttcctccgagggctgtttgggtgagcgccagaccgtgcgtgccctggggggggggggtctccgtacttggcccccttcctttcaggctgaccccccgagtcccccacgcaacctctggggccctcagaccacgtctaggggccctcagcctgcaggcgccctccagaaatcctgtagggtcccccagcgccccctggagcccccaggacgcccaggggccctcagtccgcacgcgccctccagagaccccacaggcccccccagggtccctggaaaccccgcatcctcccaggggctctcagcccccacgcgcactttagagaccccctagggccggcagaactccccagggttcctcagcccccacacgctctccggatcccctaacacgcccccttagaatccccagagtctcacagggaccctcagcccccacgcgcctttcagagaacccctaggacccccagagctccccaagcgccccacgaagcccctagaacactctggggggggggctgtcagcctcacgcgccctctggagaccccagatcgcccccctcgccctggcccgggttggtgcgggggtcccacgacctagaaggtcagcggctccctgaggcccgcgggcgcggtagctcggggcgcgcgtggggcccccttctcagtgcgtagcgagtcgtattggtgcatttcgccacgctgaagcccgtatcgctcctgagaccggtccgggtgaggcgcgccggggtggagccggaggggtgggtgcgggggccgcccccggcgcctggaacgcgcacctgggggcgtcccgcctgcaggtgggccccgccggggagggggcggtccggcgagggatccagagctggtgtgcttgttggcctctctccaggggccttgcgccgagtacacctttagtaaatacttgactaatgaacgaatatattttctcagcatagtatttttccttctccggagattgattgatagccagagcctcctgtttgattaacggtaacgctgctgctgtttaagtcaggcgtcctttgggaatccctttaatttcctgtaattcttccgtgctctcctaaggaggattttaaattc

SEQ ID NO: 12636 - DNA, 1200 bp, Homo sapiens
agccacactctccttgtcatctcctcaccaccccatgtgctatgacttggaatttccagttccctgggttcttccctctcgcccttcatagtgctggcctgagggctggaggtggaaggagctgggggcagtgagctgcctccccctgccctgtacccttagggctcccgaggccttgcacaggctgctcctcacagggctgtgctggggcaggaatcctgcaggctggggtgggggcccagtgccaccaggtagagttggagccctgggagagggatggagcagtcactgcccagtccagcggtgctctgggatcagcgggggtgggtggaggggtagataagggcccagtgtttcacctccatccttcttcactcccactctgatgtcccgtgcctgggcatcttctgctttgaactgtaacccacactgattgtcccctctgtttcctttcacagaaagcattctgctctttccagatctacgctgtgccttggcagggcacaatgaccttgtcgaaatccacctgtcaggacgcctaggggtctgtaccgggctggcctgtgcctatcacctcttatgcacacctcccaccccctgtattcccacccctggactggtggcccctgccttggggaaggtctccccatgtgcctgcaccaggagacagacagagaaggcagcaggcggcctttgttgctcagcaaggggctctgccctccctccttccttcttgcttctcatagccccggtgtgcggtgcatacacccccacctcctgcaataaaatagtagcatcggctccctctgagttcttggctgtctggggatgtgcacacaggcagggtttccgcagttcctttatgaagcctccttgtcctgctggtgtgaagatgagaggagtacctgggagctgacgcggccacagcaaggccatcaggcaagctgctgctataggagtcctgagtctcagagcagggagagcagccaggggctgggaaacaaggcattgagccacagcagcccctggtgagggggtcagggagaggaggggcccaagctgctgcccccagaagctgggctggtgatttggtctgagctgctggtcagaccaggaggagggagctggctgtgtccatagacaggggccaggcctcggtggagctcgccaggtcatagattccatctgtgcttgcagagt

SEQ ID NO: 12637 - DNA, 1710 bp, Homo sapiens
gataacacagagctagttagctagtagcaaccgtgttttctccagatctgtctagatacaaaggtcagaaatcttatttttatacttttatattgtggaagaacagcatgcaacactcacatgtagtgtgtggatttacttgaacatgttctttttaacatgtagttatgaaaatctccttttttgcctctactggtgaggaaacatgaggatcagaggccacatttttaattattgttagtgtatttggaagtctgaattggagatgtttgtacctctgtctaaacagttcccttgagaacttccaagcctccggcatcttttcctggtgagtgtttctcctgtgcttggttgtgtataatggagctaactcctaagcggtggggtgaatgtggccgccttagttctgaagctactccagttatgttctgtttcttcaagctgtgatccagaaagatttttgtgcccccagatgcctcttgataggagaggcaacatactccaaatagttgggttcttcagggaagctattagaaactcaggtgacttgttagagcactaacttggtcagagccaaatcctggcaaacgctgcctgaccttcactctgtggttggggcggtgagaaccactgaggtccaatgatgagacttggaggtctggatccagtctctctttgttttaatgtgacttaggtgctgtcaacattagcaagataatggaaatcacgacgccagtgggtgcttacctccctgctaggcatgcaggggctggcggttggcaggggaaggaggcccagtgagccgggtcccttaggggagggagagtttgtcctctttgccccacagtctacccttcagggccttgtggcagtgccagtgttcggggggtgtctgggccactgagtacccactcggtcgtggttgtgctggcctcttgggtgagtgaacctgtgaagcccaggaggtggtgttggctgcagggtacacaaatactgagtggtggtcttttgttacaggcttagcaacaaagctgtgccctgggcatggggggctgtagtgtagctacagttgtgcgtttgtgaaatggcttagctttccatgttgctgagaggaacctggacatggtcccgggcatctgaatgatctgtaggggagggagttcaaataaagctttattttgttcattttctctttgtggtgatttttttgggtccagtaatgctactctttttttttcctgaatataatcctacagacaaaattggaaggggccttttctcctggggggttcacactcacagccctgactgctccttggtgagctcacctgccttaccaaggatggctgactgcgctgatgcatcagccacacgtggccacttaactgtaacttaaacagaatagaaatttggttcccagtctgcagttgctgcatttcaagtgcccagaggccatgcacagcaggtcagataggcgcactaccaccatcacttggaggccgcaggcggcactgggctagagcacaggcaagagcgagggacaacctggctctgagtagcgtgcatgaggagcatggcctggtccctgggtcatccctccgctagggtgggctggtccttcatcaggacacactgaatcagtgccacagaggcagaatctcagcagtctgggtctgctcctgacacccatctgccagcccctcgatctta

SEQ ID NO: 12638 - DNA, 1316 bp, Homo sapiens
agcccatccctggcttccaaggagccacagcctcctgatgcacaaggctttcctgtctgtgtgatggtcccctctccctctctgtcttttcaagctcactcggaaaattgacaatgttgagaccagctgggctctgggggccatttttcattacatcgactccctgaacagacagaagagtccagcctcatagtggccgagccatccctgtccccgtcagcagtgtctgtgtgtctgcataaaccctcctgtcctggacgtgacttcatcctgaggagccacagcacaggccgtgctggcactttctgcacactggctctgggacttgcagaaggcctggtgctgccctggcatcagcctcttccagtcacatctggccagagggctgtctggacctgggccctgctcaatgccacctgtctgcctgggctccaagtgggcaggaccaggacagaaccacaggcacacactgagggggcagtgtggctccctgcctgtcccatccccatgccccgtccgcggggctgtggctgctgctgtgcatgtccctgcgatgggagtcttgtctcccagcctgtcagtttcctccccagggcagagctccccttcctgcaagagtctgggaggcggtgcaggctgtcctggctgctctggggaagccgagggacagccataacacccccgggacagtaggtctgggcggcaccactgggaactctggacttgagtgtgtttgcctcttccttgggtatgaatgtgtgagttcacccagaggcctgctctcctcacacattgtgtggtttggggttaatgatggagggagacacctcctcatagacggcaggtgcccacctttcagggagtctcccagcatgggcggatgccgggcatgagctgctgtaaactatttgtggctgtgctgcttgagtgacgtctctgtcgtgtgggtgccaagtgcttgtgtagaaactgtgttctgagcccccttttctggacaccaactgtgtcctgtgaatgtatcgctactgtgagctgttcccgcctagccagggccatgtcttaggtgcagctgtgccacgggtcagctgagccacagtcccagaaccaagctctcggtgtctcgggccaccatccgcccacctcgggctgaccccacctcctccatggacagtgtgagccccgggccgtgcatcctgctcagtgtggcgtcagtgtcggggctgagccccttgagctgcttcagtgaatgtacagtgcccggcacgagctgaacctcatgtgttccactcccaataaaaggttgacaggggcttctc

SEQ ID NO: 12639 - DNA, 1104 bp, Homo sapiens
atctctacaaaaaaaagaaaaatcagctgagtatgctgccatgtgcctatagtcccagctactcaggaggttgaggtgggaggatggcttgagcctgggaggttgaggctacagtgagtagagatcgtaccactgcactccagcctgacagagtgagaccctgtctctcataataataataataatagaaaataagttccagatgtcatgatactccacttctcaatatttcaacaggcatctcttaaaaggaagtgcatctcccgcctcgccacactgaaggagtgctgtcacacttaagaaacttagcagtagttacctcatatcagtattcagaccatattctcattttttcagttattaaaaagtgtcctgcacaacaaggttgctggcagtagggtgcagctgggggtgccacattgtgtgtaactatgactctgttcagccatgtttagctatcagatcaacttgctggcataaaccagccacttgagtgcattcatggcacctgtgggtcaggcattcagacaaacacagcgttgacggccgtccctgctctgtgatgtggggtctcggctgggaaggctggacagttggggtgacctaatggccagggttggagtcgtcggggaccccttctgcttgtgtctgtctggggcctctcctcatggggctggacctggaaggagtgtcgtggggggtgtcagggagctagtgttccagggcagctggtgggaggcgcatggctcccaagccctcctcggaagtcacactctacgttattcccactgagtccctggagccgcgggggaggcttctctgatgggcaagtgttcaggtcacatttcagaagaggatgtgggatggaagaggcttctggaggcttctttggacaacacatcccctgcatggtccctttggtgttttgatctagaagacctgtttttccccatgacactggcttttggaagagccccagtagtggtcccgtgggccatcccacattctggatctgtccagttgttttctgagagtgtaggctactctggtcgtatgtcacttgtctgccttgtaaactggaaattaggcctaaaggctggagca

SEQ ID NO: 12640 - DNA, 1123 bp, Homo sapiens
ctaaataaataaaatacagtaaaaataaaagtttttaaaagtgagaaagtcaagaaaggacctttgttttggcttatctcaccatgatgttagcgacttaaaatccagatggtttcctgctggaagctgggaagcaacaggccctcacctcacagtgcacctcacctgcaagggacccccctggaggccagctcggccagctcgctgggctgaatggctgcagctgctagaggaggtggctggctctgtccccacaggacctgcaggaccgcaacgatgagctgcaagctgagctggaaggcctgtgggcgcggctgcccaagaaccggcacagcccctcatggagcccggatgggcgcagacggcagctccctggactcggcccagcaggtaggagcccgtccctgggagggggctgacccaaggcctgctgttgacaacaaggcccagagccaggaaaagagagtggagatgatgaagatgatgatgttgctgtgacctgaagggaggtggtctgctctgcagggactttccaaggaggatccagggatgccacagggtgaccttgcaacacggaaggtcacctgcagagggaggaggaagggacgctgaaggtgggcagccccagggctggcccaggctgttcccacatctcagagctgtttcagtgacacggtacttgctgagactgagaagagctaaatcccggagaatgcattggggcctcccagtactcaggcctgttcagacagaggctgtcggggcttacccttgctgcttctgggtgatgtggtagctggcaccaccccccaagtctgactgaggcagggaggcaccaagcactaagggagcggccccacctggccaactgcccctgtgctcgcagccaatgggattaggacaagctccaaggacccagggtccccggaacccacatcgaagtgtctctggctcctctgcagagagaatgggggtccaggtgctgcagccgcccttgaggtctgtggtgctccctttggaggatggggtggcctctgcccactcaatagcagcatacaatgcacatggctccgtgtccactgctgtgacaggggcccatggggacccagcagccccacctgct

SEQ ID NO: 12641 - DNA, 1232 bp, Homo sapiens
tttctgccagggagcttgaaagttttcagaacctcttccccagaaaggagactagattgcctttgttttgatgtttgtggcctcagaattgatcattttccccccactctccccacactaacctgggttccctttccttccatccctaccccctaagagccatttaggggccacttttgactagggattcaggctgcttgggataaagatgcaaggaccaggactccctcctcacctctggactggctagagtcctcactcccagtccaaatgtcctccagaagcctctggctagaggccagccccacccaggagggagggggctatagctacaggaagcaccccatgccaaagctagggtggcccttgcagttcagcaccaccctagtcccttcccctccctggctcccatgaccatactgagggaccaactgggcccaagacagatgccccagagctgtttatggcctcagctgcctcacttcctacaagagcagcctgtggcatctttgccttgggctgctcctcatggtgggttcaggggactcagccctgaggtgaaagggagctatcaggaacagctatgggagccccagggtcttccctacctcaggcaggaagggcaggaaggagagcctgctgcatggggtggggtagggctgactagaagggccagtcctgcctggccaggcagatctgtgccccatgcctgtccagcctgggcagccaggctgccaaggccagagtggcctggccaggagctcttcaggcctccctctctcttctgctccacccttggcctgtctcatccccaggggtcccagccaccccgggctctctgctgtacatatttgagactagtttttattccttgtgaagatgatatactatttttgttaagcgtgtctgtatttatgtgtgaggagctgctggcttgcagtgcgcgtgcacgtggagagctggtgcccggagattggacggcctgatgctccctcccctgccctggtccagggaagctggccgagggtcctggctcctgaggggcatctgcccctcccccaacccccaccccacacttgttccagctctttgaaatagtctgtgtgaaggtgaaagtgcagttcagtaataaactgtgtttactcagtgaacaaagagcctgggctcttgtgtgctccgggatggggaaaggaggggccgctggagagctgggtactggtcctggctctgct

SEQ ID NO: 12642 - DNA, 1429 bp, Homo sapiens
gaaactagtgactgggacctgtaaaactctacaaacattttctcaaaaagaaaaaaataaaagcaattataagcgtagttctctgacatccctctcactggtaacttttccttactttgcaggtgcataaggcaaatccaatacgcaagtaccagggtctggagataaagtcaagtgaccagcctctgactgtgcctgtatctcccaaattctccactcgattccactgctaaactcagctgtgagctgcggataccgcccggcaatgggacctgctcttaacctcaaacctaggaccgtcttgctttgtcattgggcatggagagaacccatttctccagacttttacctacccgtgcctgagaaagcatacttgacaactgtggactccagttttgttgagaattgttttcttacattactaaggctaataatgagatgtaactcatgaatgtctcgattagactccatgtagttacttcctttaaaccatcagccggccttttatatgggtcttcactctgactagaatttagtctctgtgtcagcacagtgtaatctctattgctattgccccttacgactctcaccctctccccactttttttaaaaattttaaccagaaaataaagatagttaaatcctaagatagagattaagtcatggtttaaatgaggaacaatcagtaaatcagattctgtcctcttctctgcataccgtgaatttatagttaaggatccctttgctgtgagggtagaaaacctcaccaactgcaccagtgaggaagaagactgcgtggattcatggggagcctcacagcagccacgcagcaggctctgggtggggctgccgttaaggcacgttctttccttactggtgctgataacaacagggaaccgtgcagtgtgcattttaagacctggcctggaataaatacgttttgtctttccctccctgattgtgttatttgatgtttttaaatctgttaagcccctttggaggtcacatcttattgggaaatgggtagtttgagaggtgggtccaggaactttttttttttgagatggagtctcgctctgtcgcccaggctggagtgcagtggtgcgatctcttctcactgtaagctctgcctcctgggttcacgccattctcctgcctcagcctcccgagtagctgggattacaggcgcccgccatcattcccggctaattattttttttgtattttaagtagagacagggtttcaccgtgttagccaggatggtctcgatctcctgaccttgtgatccacccgcctcggcctcccaaagtgctgggattacaggcgtgagccaccatgcccggcccaggacagtactttgtaatttttttctgtcttatgtcagaatatctccatattctgttaactctctctcagtaaccacttaat

SEQ ID NO: 12643 - DNA, 1234 bp, Homo sapiens
cactccgactgcttctccagccatgcgggagtgttgccatactgatctggggtctgtgggggaccaggaagggcacagctgtggccattccttttgtggcattctgggcctggcccctgaggctatgagcattagggcaatacacaggcctggtccagatgaagcagagctgtgcccatgaaccctgcctgccgcttgccacccactggagcacgccccttcccctggccaggcctcagtttccccatgatatcagtgagagtggggccccagttcgccatgcagcctggcactaagcatgcaccctgtcttctttctgctcgtggccgcagctggacatcgtggagttcatcccctctctcctctactttggctacacggccctcatggtcttgtccttctggctgctaacgggtaccatcggcttctatgcagcctacatgtttgttcgcaagatctatgctgctgtgaagatagactgattggagtggaccacggccaagcttgctccgtcctcggacaggaagccaccctgcgtgggggactgcaggcacgcaaaataaaataactcctgctcgtttggaatgtaactcctggcacagtgttcctggatcctggggctgcgtggggggcgggagggcctgtagataatcttgcgtttttcgtcatcttattccagttctgtgggggatgagtttttttgtgggttgctttttcttcagtgctaagaaagttccctccaacaggaactctctgacctgtttattcaggtgtatttctggtttggatttttttttccttctttgttttaacaaatggatccaggatggataaatccaccgagataagggttttggtcactgtctccacctcagttcctcagggctgttggccaccctatgactaactggaagaggacacgccagagcttcagtgaggtttccgagcctctccctgcccatcctcaccactgaggccacgacaaagcacagctccagctcggacagcaccctcagtgccagccagcctctgccagacctctctttccctcttctccccagcctcctccagggctgcccaaggcagggtttccagccaggcctcggggtcatcttttcaccaggagcaaacccaagtcttagttgctacaagaaaatcccctggaagtactgggggccaggttccccagacagcaggaattgcccctgttcagagcagccggagtttgctggac

SEQ ID NO: 12644 - DNA, 1112 bp, Homo sapiens
tctggggtcatactcacttctttagccagccccatcccctccaccccacacctgagttcttgcctcctccttttggggacacccaaaacactgcttgtgagaaggaagatggaaggtaagttctgtcgttctttccccaatccccaggaatggacaagaagccaacttagaaagaagggtctcacgtggctggcctggctcctccgtagacccctgttcttttcaacctctgcccacccgtgcatgtcatcacaaacatttgctcttaagttacaagagaccacatccacccagggattagggttcaagtagcagctgctaacccttgcaccagcccttgtgggactcccaacacaagacaaagctcaggatgctggtgatgctaggaagatgtccctcccctcactgccccacattctcccagtggctctaccagcctcacccatcaaaccagtgaatttctcaatcttgcctcacagtgactgcagcgccaagcggcatccaccaagcatcaagttggagaaaagggaacccaagcagtagagagcgatattggagtcttttgttcattcaaatcttggatttttttttttccctaagagattctctttttagggggaatgggaaacggacacctcataaagggttcaaagatcatcaatttttctgactttttaaatcattatcattattatttttaattaaaaaaatgcctgtatgcctttttttggtcggattgtaaataaatataccattgtcctactgttttgtcttgaatctcatgcaggggttggaggtctgaggtgagacaccttccccgagtgggttgagttgcacagtttcccccgaagctcattctcgtgtcacacttcagggctcaagccactgttgttccctgcctggtacaagtccattgcctagcccctccatactaaattgcagtcatttgctcttctgatcccacaagcaggaaatgacaatcaagtgtgttttggtagcagcaagatctggttttggattcccagcttcagtcttttactgtcagctcatctcactctatgaaacccagttcttcaattgtaagcaacagaaacatcggtcaaactggtttt

SEQ ID NO: 12645 - DNA, 1103 bp, Homo sapiens
gcactttgggaggccgaggtgggtggaccacctgaggttaggacttcaagaccagcctggccaacatggtgaaaccccatctgtactaaaaatacaaaaatttgcctggtgtggtggtgcatgcctctagtcctagctactcgggaggctgaggcacgagaatcacttgaacctgggaggcggaggttgcagtgagtcgagataacactactgcattccagcctgggtgacagagtgagactccccctcaaaaaaaaaaaaaaaaaaaaaaaaaacagaaagaaagaaaaagaaaactgcagataaccctatacattaatactggtatctcgaggtgactcttctgaccaagggtggttaagtgacacatagaacttttctaagagaagacagacaagttgacaggcatgccttgtactcagctgtgttcatgtggtggtctgtggaaagaaaagaagactcatttggaaatgaagctgtccctttccaagcagtctctggtgcttttcttctctcaaaatggatccgataaatatttgaatagagcagattgtagaatgtcgtgctgtcaccagaaagctgctgttttgggttctgcattgagccaaatatgtagaggacctaccaagcccactgagggactaggttttcatgtctctagtcatacctagaatgttctgagccgtctgagggccttcatgccggcagcagctagcaaagccagaaagcaagtctaacaggatctaagatgaccatcaggagaaggagtttgagactgtgtatgcaacccccaatagacccccttttactctgatctggagaatgtatctggcttcatattttcaagtcacatgtctctcagacccctggattcagaacccaaggccacaaatcataggcatgaagcactttcttaagactgacctaacgctggattatttcccgtccaatgcctgcatgctgcttgaattgctccacccacacctccatgaccaagggcgccagagtgctgcaactggggcgtgggccgctctctgcttttcctgtctgactctgacaagtcctccctcactgaatgtagaatcgttgccaagtttctgaga

SEQ ID NO: 12646 - DNA, 1179 bp, Homo sapiens
tcaatctccccacttccagcagagaaaaaacaaatgaaatactgttctttttgtgtacttactagaaaatgtttaactggaaaaaaagttctgcttgttttattggcacagcaccattgattctgtgattctttgtcatagtattctgtggcagtttctgagtatgatatgtagattgaaatatagaggctaggaaacttttaatagtaaaattttactaaaaatttattaacttattaaaatataacttgaaaaaattgtgaggtttttctaaatttcttggaaatttgatttatattgtcaaaaagcactgaagaagtgttagttatggatttcgggtatcacataatgtttattccagagttttctgagtgtgatttatgtgaatttcatttggttattcttttactattttcacagtgaaattgtcatgagattttttcttctgtatttcttgcttagcttcttctcatttaagaatgagttggagggattaggtctttaagtaggcagatggattgtataaccctcatccattcttttgtggttttacagtgggacttcccctctcgcatgcctcaatgctatgctacattccaattcaagaggaggagaggggttgttttataaactgcctggccgaatcagccttttcacgctcaaggtaagtgatatgaactctcttttggtgcagtgattcttggacttttaatgtgcataaaaatcacctggtaggtctggaataggggccatgaatttgcatttctcatatgcagtcaggtgacactgatgtttttcttttttttagacatagtctcgctgtgtcacccaggctggagtgcaatggggcgagatctcggctcactgcaatctctgcctcccatgttcaagtgattctcccacctcaacctcccaagtagctgggactacaggcacatgccaccatgctcggctaatttttttattttttttaatagagacggggtttcaccatgttggccaggctggtctcgaaatcctgacctcaggtgatccacctacctcggcctcccaaagtgctgggattacaggcatgagccaccgcacctggccagatgctgttggttctaaatggcactttgaggtgttctaatatgaatcagatattagaaattatttagtcatagcagctcttgtttg

SEQ ID NO: 12647 - DNA, 1203 bp, Homo sapiens
agagacgtgttgttttaaaactgggagattcagctgtccataagacagacattaatatcccgaatgcacttactagaagaggtttatttctccctaggtgaatttactcatgagatgcaagtcaggatacgacaggaaatggagaaggaaaagaaggtggaacaatggaaagaaaagttctttgaagactactatggacagaagtaaggcagttggagctatgagtcctggtctggggttttgaggggatagaggtagatggtctcaaaatagcatatacttatgtgttggacaagaatgtggagattgcagtgacacttgggtcatttatcttaatgccattcatagtgaagctaacagaagtttttccatggttagattgtgcaccacacagatttattttgttctgagatatctgtgtttctgggtccatattattcatagaaataagagacatgtccactctggcctgaaactgatggctgtgattttgatttgcaggctgggtttgaccaaagaagagtcattgcagcagaacgtgggccaggaggaggctgaaatcaaaagtggcttgtgtgtcccaggagaatcagtgcgtatacagcgtggtccagccacccgacagcgagatgggcattttaagaaacgctctcggccagatctccgaaccagagccagaaggaatctgtacaaaaaacaggagtcagaacaagcaggggttgctaaggatgcaaaatctgtggcctcagatgttcccctctacaaggatggggaggctaagactgacccagcagggctgagcagtccccatctgccaggcacatcctctgcagcacccgacctggagggtcccgaattcccagttgagtctgtggcttctcggatccaggctgagccagacaacttggcacgtgcctctgcatctccagacagaattcctagcctgcctcaggaaactgtggatcaggaacccaaggatcagaagaggaaatcctttgagcaggcggcctctgcatcctttcccgaaaagaagccccggcttgaagatcgtcagtcctttcgtaacacaattgaaagtgttcacaccgaaaagccacagcccactaaagaggagcccaaagtcccgcccatccgggtaggagactgtttgattcctggctgccctggagccaggttttctttgagggtcatgagattatagag

SEQ ID NO: 12648 - DNA, 3688 bp, Homo sapiens
gcagttgctgcagggtagcttgcccctagagaaggttcttccaccagcccacgatgacagcatgtcagaatccccacaagtaccacttacaaaagaccagagccatggctcgctacgcatgggatctttacatggtcttggaaaaaacagtggcatggttgatggaagcagccccagttctttaagggctttgaaggagcctcttctgccagatagctgtgaaacaggcactggtcttgccaggattgaggccacccaggctcctggagcaccccaaaagaattgcaaggcagtcccaagttttgactccctccatccagtgacaaatcccattacatcctctaggaaactggaagaaatggattccaaagagcagttctcttcctttagttgtgaagatcagaaggaagtccgtgctatgtcacaggacagtaattcaaatgctgctccaggaaagagcccaggagatcttactacctcgagaacacctcgtttctcatctccaaatgtgatctcctttggtccagagcagacaggtcgggccctgggtgatcagagcaatgttacaggccaagggaagaagctttttggctctgggaatgtggctgcaacccttcagcgccccaggcctgcggacccgatgcctcttcctgctgagatccctccagtttttcccagtgggaagttgggaccaagcacaaactccatgtctggtggggtacagactccaagggaagactgggctccaaagccacatgcctttgttggcagcgtcaagaatgagaagacttttgtggggggtcctcttaaggcaaatgccgagaacaggaaagctactgggcatagtcccctggaactggtgggtcacttggaagggatgccctttgtcatggacttgcccttctggaaattaccccgagagccagggaaggggctcagtgagcctctggagccttcttctctcccctcccaactcagcatcaagcaggcattttatgggaagctttctaaactccaactgagttccaccagctttaattattcctctagctctcccacctttcccaaaggccttgctggaagtgtggtgcagctgagccacaaagcaaactttggtgcgagccacagtgcatcactttccttgcaaatgttcactgacagcagcacggtggaaagcatctcgctccagtgtgcgtgcagcctgaaagccatgatcatgtgccaaggctgcggtgcgttctgtcacgatgactgtattggaccctcaaagctctgtgtattgtgccttgtggtgagataataaattatggccatgggaaacattgtatatttagtgtgtgtattttgataatgattgatcttaaatctgtatacagaatatcattgatataatactctttaggcaggagcactcttgccttcccccaaaatttacactgctaaagccctctgtcacttggcgacccttctggtcttgctggaggggtttcctgggtataacccattgggctgcccaaggccagccagcctgagctctcctgcaagacagagcctgatgtggcacggagtggggttgcggggggtggggggactgcctgactcccagagggacttgaaactgaagcaagaaggttgcattctccaccaagggagttaacctacctgaactaagtagaaatgccagtcttccactaccccctccctgccatcttttcttctgctactttggggagttgatggccaggaaagaagccagcacagggttaaagtaactcctggcattgcccaccagggggctggtgcacctgctgacctcagggtcacagttgagtcatttgccagttgacggagcaagtttgaccttggttctgttgctgaagcaaatttggaacttttctgtctcagtgtgatccactaacccacaggatcatttggaaccttgaatagctctgcttggacaatggggttggggaatagggttgtctttcctatgaaaatgccatctgtagaccttgtgagtcagccgtccagatgtttgcaggtgaattcctctgcttgacatcctccctgtcactttggaccctatgggagtgggcatctccacgcacctgtgtatgtgaaagtcattttacatttcaaagcagtgtgtgtttcttatttttatatttttaactctttattcttggatgtataaagtgaactttttggcttctgtaagtatgctctatgcacctctaatgttttatcatgtatttatatgttgtacacagtactggctgattctgtaaatggatgtattgtacagagaacatgaacgtctcttcctaattttacatcttcagcatcattgcattaaagtggtgtaatctccttctctacatctgttgtcagagccactgagtgctgtgctgctcgacgtgagggtgaaatgattgacttgtgacctgccaggttgcccgatgccctgttgggtcaccggctggacctgctgcagcctgcagagccacagtcagcctgcccacatgccaccgagcaaacgcatcttgcttttcacatctctcctcctacagccttaatggctgcttgctgccatatgtgacaaatcaccaccaccagtgttaagtgcttctggattcatgggtgagttccctgggcagcccccaggaaggccttccagatctggctccagggtcaccacctgtcacagcaatacctgggaccatgctctcctgggactgtgaggctccttttgacgtacttttgacatcaggcaggtttgggaagaaacaaagccatgcctgctcctgcctctctcccaacatgtttccagcaagtagatgcccctgtgtgtgttttcccttgccttgtttcctgccttatatcttgtatttcgacttattacagagttgagggttcttgcttaatttagatcaagtataaaatttgtatgacttcaagtctcattttatctgaaaggtttttttctcatttaatctgatgtggcattttcgtcatctgaagcatgagtgacaagttgggaatgatgtggtgatttagaatgcagtattggccaagtccaagttgtcaacttaagcgtctgtttaccaaagaccgggaacaggggcccaaacatgtccagtcctcttcttccctctgctggaacctttggggacactcaagggtacagtttgacactgatctggtccatgaggctgcccagagaaagcactgcttctgtatgtctcttgtggtattggaacaataaacccgtacaacctgcagttgtggtctcagtcatctgtggctgcctcgctggtgtgggaaggtcagctggagtgctgagctggaagggaaggagtagacgccagctctcctcaccttggctctggagctactcttcttatacttggagctcttcttttgggaggttagtccaaaaggaatgacttggcagcttcactggtctttagccattcatgacttggcggacttcaccacatagactgcagtcagcgttctactgagagcaatgagaatgtttccccttgggagtgcgagtcacaaactgtgacatccctctgcagcaactcatccaaacagcttcactgaggttgaggttgccaagtggcttcctaatggttagtggtcttctgtgggagggtgactagctctaaccttggaaaacctt

SEQ ID NO: 12649 - DNA, 2476 bp, Homo sapiens
aggtaagtaagtccagactgggtgtccaggagctggaacccagagagcgtcctgtccctaaccagccactgcagccctccagctctggccctcagctgcttgacaggacggactgctgggagatggcagccggttggcagggcccttgccctcacaccccgctgcccaggagccaggtctgaacttctgtgcacaggcctggcccctcagactcactcctgccaagaggggccacttcttcagggtgagccccggctatcaggcagccgtgagctccagggcgggctgcagctcccatccccttgcgccatgtttggagtaaagggatcagtggaagtggaggagccacttgggttctcctaagaccagcccttccggaggggccggtcctggaagaaacccataatccctggagtgtgaaaaagggcaaaaagaaaaagctggcctggtttccttcctccctgattgattgattgataggcacttcctcttgctcagtgcaatacctaccagtgctgctaaaccagggactcgcccagacctcagcaggcccccagggcctctccgtgcaacactccgtagccatgacagcagctctctgctgcccgcccctgcccagagctggcagaagccctctgttgcctttcctccctcagagcagagaggccccaggggagccagggccgagtggatcctaggatggccacggagagccactcgctcccagaacaggcaccccttcccaaaccagcttttctgcagccaattgcctgttgcagctgtggccactgcctcccggcactgtggcagactccccccaaggagggatggggggggcaccagtgaggatgccccatcctgcctcaggtccagaactctgaaaggtagggtgcccaccccgtgcttacttccggcccctagaggttgggggtggtcgttatctctcaagtggcctccaataccccatccagccacaccacctctgccttccatctgaccaatccccaggcctctggtcagggccaggacacctgagactcacccttagcacagcacaacctccagtgcccaaggcctctcccacaccccagccatccacacatctggccccacctgctcagtactactcaacatttgaattcgtgtaaatatttatttttgtgtgtgaacaatactacaaagtaatcagtaagatcttttgcaaaaatgttaccccaggcaattatttgtgaaaatcttaatgttaaaacctggcagagacaatcgccaccctagaattcctggtatcagttacttaacgtgtcacttctcctcccagaggcagtacccaagctagacatgaaccgtttgcatttcttggcagacaggagtgagaaagactggggaaggggctccctccccctacccacacaaggattagatctaaagatcagcataagctacagtttgaagtcatgtttttctgagttcaagctgttggaactgaccaccctccagcctgccttagtactgcggcaagagcgtaggttcaatgtgttttcaagagaaaggaaagaatatgttgttaaagtccattgggcctcccaggcccctccaggacaatggatttcatcatgtcgaccccacctcttgggtgggctcctcctttccagtgaaactacacctgaagccctagagatggcagaatcaggagcaagtttctgcatggaaacaggattccatttagctggctcagtcagggaacttgttttgcttttgttttaaaagatgcagcttcaaccccttccccctactcccgacttggagggcaccaaagagctggttctgatgaactaagctcactgctgtctcaccctcaccagagggactgccttctcccaaaaggagctcccaaagcccttgtcccacagccatttaaaaatcttctgaagggcctcagggcacaaagtgatcatttgggatcctaagttaaaaaggaaatgcaagagtaggatactccaattccagagtctttgcaggaggctaatcccacaagaagggtagcatcagagaagtgggcattggtcttagtggtggatcatcaggtagacaagtgatagtgtgtgtaacccatctgaaattcattttaccgtcaccactcttacaaaggacagtttattcccaaggacagtgctgacggggagggggacaggcagggagttaggagggttttcgaggatttcaaacaggtggaacccatccatccctattcccaagggccacttacaactctaagggtggttacaggattaactaccagttcattttcaaaatgctgctttgaactcagagggttgatacttttaatttgtaattttttgtaaaactttttacaaaatagtaaagtatttcaccagaataccagtttcaatccgtccatggtctgatttttatataatttagtggtgctttagaaactttgtttttgttgtttctg

SEQ ID NO: 12650 - DNA, 1173 bp, Homo sapiens
aagggggtgataaaacccgtaccccaaggggtagctgggaagatggcataaaaccaagcctgcccggtgggccacagcataggggctgctgctccatcttggggtctctcagagcaaagatcccaaagccaggcagctgtgaagctcccaagggtggctccgaggctctctgtggggtgatagggaagcctgggctgaggggagagaagaagggaggcagctcagagggctcaggctgggaggctccatggaggatggatgttctctggaggttgaggttgagacaggagcaggctaggggtgaaaggctttatgttgattcgaggcccctgcaggtcagcagagcagtgggggtctggagccaggggctgggtccaggttctgccgcttactgctgtgcagtcttgggtaagttacttcccctctctgagcctcagtttcctcatctgtaaaatgggatgacaatagctatggattcagttatatcctccttctatgctattgtatagaagtatctataccaaggtgtggacagtcaagccctcaatgaaaggaagctgtgatcgggattgtgactgagatggaatcagtaaccctagaagctgtgatgaagccaggtgaagcagtgccaccgagtgggtctctggagctcagactggccggggtttcagtggatctctgtgactcatgagctgaatgaccttgaagcaagttgctgcccctctctgagccacagttttctcatctgtaaaatggacccaggccaggcacagtatttcatgcctgtaatcccagcattttgggaggccgaagtgtgaggattacttgagcccaggagtttgagaccagccctggcaatatagtgagactgtgtctctataataactaaaaaaacttagctgggcatggtggcgccatgcctgtggtcccagctacacttgagcctgggaggttaaggctgcagtgagccgtggttgtgccactgcactccatccagcctgggtgacagcgagaccctgtctaaaaaaaaaaaaaaaagaaaaggatgcgatagtatgacctatctctcagagctgccttggggagctgaagagagactccatgtcaagtgctcagcatcggaaacaagaactgctctctgcttatgcctgtggcgtggccagtggcagtgag

SEQ ID NO: 12651 - DNA, 2056 bp, Homo sapiens
aggctttgtgatacctgatgaagggggcccacaggaggagcaagaagagtattaacagcctggaccagcagagcaacatcggaattcttcactccaaatcatgtgcttaactgtaaaatactcccttttgttatccttagaggactcactggtttcttttcataagcaaaaagtacctcttcttaaagtgcactttgcagacgtttcactccttttccaataagtttgagttaggagcttttaccttgtagcagagcagtattaacacctagttggttcacctggaaaacagagaggctgaccgtggggctcaccatgcggatgcgggtcacactgaatgctggagagatgttatgtaatatgctgaggtggcgacctcagtggagaaatgtaaagactgaattgaattttaagctaatgtgaaatcagagaatgttgtaataagtaaatgccttaagagtatttaaaatatgcttccacatttcaaaatataaaatgtaacatgacaagagattttgcgtttgacattgtgtctgggaaggaagggccagaccttggaacctttggaacctgctgtcaacaggtcttacagggctgcttgaaccctcataggcctaggctttggtctaaaaggaacatttaaaaagttgccctgtaaagttatttggtgtcattgaccaattgcatcccagctaaaaagcaagaggcatcgttgcctggataatagaggatgtgtttcagccctgagatgttacagttgaagagcttggttttcattgagcatttctctatttttccagttatccccgaaatttctatgtattatattttttggggaagtgaggtgtgcccagttttttaatctaacaactacttttggggacttgcccacatctctgggatttgaatggggattgtatcccattttactgtcttttaggtttacatttaccacgtttctcttctctgctccccttgcccactggggactcctctttggctccttgaagtttgctgcttagagttggaagtgcagcaggcaggtgatcatgctgcaagttctttctggacctctggcaaagggagtggtcagtgaaggccatcgttaccttgggatctgccaggctggggtgttttcggtatctgctgttcacagctctccactgtaatccgaatactttgccagtgcactaatctctttggagataaaattcattagtgtgttactaaatgttaattttcttttgcggaaaatacagtaccgtgtctgaattaattattaatatttaaaatacttcattccttaactctccctcatttgctttgcccacagcctattcagttcctttgtttggcaggattctgcaaaatgtgtctcacccactactgagattgttcagcccctgatgtatttgtattgatttgtttctggtggtagcttgtcctgaaatgtgtgtagaaagcaagtattttatgataaaaatgttgtgtagtgcatgctctgtgtggaattcagaggaaaacccagattcagtgattaacaatgccaaaaaatgcaagtaactagccattgttcaaatgacagtggtgctatttctcttttgtggccttttagacttttgttgccctaaaattccattttattgggaacccattttccacctggtctttcttgacagggtttttttctactttaaacagtttctaaataaaattctgtatttcaagagtatcatgtcttctgaaatttgtcttgccctgggtatatgctgttaggttcaagtgatgggaaaccagtgcttctttcttcagtgaggactgatcttttcacatcctttactgatttttcagatgtgcttatttcttcttcttcttcttttttttttttttttttttgagatggagtcttggtctgtcgcccaggctggagtgcagtggcatgatctcggctcactgcaacctctgcctcccaggttcaaacagttctctgcctcagcctcccaagtagctgggattataggcacccaccaccacgcccggctaatttttgtgtatt

SEQ ID NO: 12652 - DNA, 1215 bp, Homo sapiens
cagctcctgtaatccaggccgtggcaggagaattgcttgaacctaggaggcggaggttgcagtgagccgagatcacgccattgcactccaacctgggcaacagagcaagactccgtctctaaataaataaacaaacaaacaaacaaggcttctagttgcagtaggagggacgaattgagagcaagggtttaaggactaaatgcagggtgcagtacagtgtcagtgtcagtgtgcagtgctcaggaaatatttgttgaaggggaagagtatgcttcttcagtccaaggtggaagcatgaaggaaactgtaagcacattgatctagaccacagtttcaggtacagaggggagcgttaactaaagctcagagcggggaaagcacagggtgcttacaaaatggcaaatgctgtcatttaggccagaatcctactcacactgctgctgtatatcctcttcatctgtgtttaggattttgaaatgcatttttgttggattattgccccactagaaaaaacagttcagatctgttgcagtttcacatttgaaactactttcattctggaatccttatccttagaccttcctaataatttctgtggtcacactggacctgatctcttcctgtgctaaacaaaagcacacaatcacaaaactgtgtaggcataaatgagaggcatatgggagtggtgtaaaaggaactggaagagtcttaatatgcctgggtgggcgagctaaactaatagctcccagcagtttttctgaatcagacattgtggagccaggagtctagcatttggaattccactgcctgtgcaaagggtctgtcttttatcctccaaaccaccatttgttaactggttaatgacccagtggacccgttgacaacaaaggagggaaagctggtaaagatcaagttaaaaggaaaaagaaaagttcaaaggtaggaaagtaagaacaagaagggtttaatcatatcttcacctactctttattttttaacaatttattgtggggaattttgaacatacacaaagtagatggagtaatgtagtgacctcccatgaacctatcccctcagccccaataagctgcagttaccagacttaatgaaaggaaaccagaactctggtgaggcttaggtttggtttccagacctctctaggccttgtcacctttggccttatcccatcaaacacctcttttccccatttttagc

SEQ ID NO: 12653 - DNA, 1089 bp, Homo sapiens
caggctggaggcggcaggcggcaggcagcaggctgtggaggaggcccctcggtcagggagcggcctgcctcacccctgaatagctccttcggccccatctccatcctcagcagatgacactgattggcctcacggggacttgggtaagcaacaggcggcattcaggactcttctcaaccctgctgttcagacttgataagatctcagagtccacaggaaagaagtcactgttgcaataaaagcacccgtagtagcaaaaacataaaacaaataaaacttcccccacatcacagatgattttggacaagattttccaaccttgctggctactttagtttgggacctgttttttttctcatttgattttgcttgtgcagaaaatagtttccagcacatggattgatctgagagagaatgaggctcagttgtggatagtctgttttctctgagcatgttggccaactagtatcgtcaaattattgagtggatcatctcttggaaatgcagaacttctgccaccacttggctatttgcacagtcatcttgttctgtgtccttttatctctcagaccacacacatctggaacgctgtgggcatcttctgcccatgggctccatttggcacctgctgagccacagttgtcctgctggatgtgctgtgcaggttggtaggacttgcccccactgtcaaggcctggtctcatctgaaaagccctcctggacctcaaagaattcttcagacctcatagttacaggtcattatatctactatgttgatttatcatcaggcacacaacttctgtttccttctcttgtgttatctgatagcgtccctccttgagctcatcagaaaggttttatgaaatgtgaaccattttgggaaaagctgatcaatttttcttcctagcttcccattttcaaatgggacatcactcatatccctttcagaatgttaggaactgcctcccacattcttccctgtctttttgggttttgttttttgttgttgtggtggttttttaacacaaagtctcactctgttgcccaggctggagtgcagtggcatgatcttggctcactgcaacctct

SEQ ID NO: 12654 - DNA, 1098 bp, Homo sapiens
acaggtcacagagccattacaacagcttactagtttttcatggatttgttggattaacaccttaagcaggttttttattgttattttgtttgtttgtttgttttgagacgggagtttctctcttgtctcccaggctggagtgcaatcgcgcaatctcggctcacggtaacctctgcctcccaggttcaagcgagtctcctgcctcagccttctgagtagctgggattacaggcatgcgccaccacgcccaactaattttgtatttttagtagagacggggtttctccttgttggtcaggctggtctcaaaccccggacctcaggtgatccccccaccttggcctcccaaagtgccaggattacaggcatgagccactgtgtccggtcttgagcaggtttttaaaatctccagtggccataaaactagccagggtagctcatgcttttactggttggaataaggagccaaaaccaacaaaataatatttattagggctcgatgcccatttctgtggctaaggcttaggtttggtgtgcagagcctggcctgctcttgtgggctgtggttgctgtgacagtttcgttttctgaatctttgtaatgctcttccaccctgctcgtgctgcccagaggctgatctgcaaacctgggcagtattccacactgaagctcagtttgcaaaccttctgctgtgttaattctggtcagtttcacacagaagtcacgagggcctctgcccaggaccttctattcacatttcaagaatccctttctgaaattctccaactctctggtcaggaggaggagcaccattggggcggggtaggcagctagaggcgcaggagcgaatccaggttccttgcgtggttcccagcctctgctgacagcacctcagctaccaggtggggagtggaaattcagcctgcttagaggactgacctctacagttcatatttgcagtgacataaaaggcaaagaggagctggcatggtggtacagaaggtatcagtcaagcgcaggctcttcagaaacctagaaactaaaaagagatgcaacatgtgactggccatcagccagacatgtctagggtgagaccag

SEQ ID NO: 12655 - DNA, 1134 bp, Homo sapiens
cttggctgctgcccgctctctgcagcgtggatttcctttgcccatttgggccagaaggtcaccaggagttcatcactgcttagtgtcaacttgacatcttcagcttccagacagaaaacccatgctttactttgtacagccctgtcccagagttagtaagcctcggcttgtcacctgcttgcaaagggtatagacatcattctgggtagttctagaggatatcgcaacaagtgcgtttgaaggttcagcacagctggaattgtacggtagtgagctcttcaaaatgaaaacagaatgaccggatggccatctgtcctggaaactgtagaattgaataaatcactgaaaatagaacacttcttggaggctttcttcagaactgaactagaaacaaggtttccaggctcccaggtcagtagaccaaaccaacttccttagatttttttttttaagctgtttgcagaaaactgggtggtagcgtgtctgaaccaaacggaagaatagccagcggagcatggactgttccagcacgggccagatggccagctgtcgagagcagccctgcccagattgcggtgggggctgtgccagcggctccgcagggcccttccaactctggagtgtctgtagttcttgtgaaaccaaaacgttgactacctgcctctttcctcgggcatcgacgtgctcatttccaaagatgatggtgcaggtgaccttttccatcgtgagctaagagaaggttaggaggcctgaggggcgggccttgtgtcccctcctccccctccacagcccctgaggtggagcttccctcacagaccccatctggtcgagcctacggctgcccagtgtacactcagtgatgcttataccaaatagggcatgtgcgctggtgtctgttggggacagccccatccctaccttggagtcggcagagaagcagcaataagcattaggcgaatgattgaaagggctgctgcgccaagaggccttcagtccccttaacgtggctttccaacttcctgacgaggctacaaaggctccgctcacaaaagaaagccaataatgtaaataaatagaaaacgaagcctccacgcgtggtttttaaagggggatgatgaatgtgacaccacccac

SEQ ID NO: 12656 - DNA, 2116 bp, Homo sapiens
ctcccttaagagcaaacaaggcccgatcgatgttttcctgtgccctgaggagaccgtaggtgggatcagccctgggaagaccccatcccaggaggtcacttctgaggaggagaacagggccactgactctgccaccatagtgtcaccaccaccatcatctcccccctcatccctcaccacagatcccagccagtctctactcagcctggagcaaggtgggtgatgggtaggtgggtggggtggggcagggcccctcttctggggggtgggcaggcacgacagcccctgccttcctccctgctggggcatccccggcctgtgatgctccccgtctccccagaaccgctgttgtcccggatgggcagcctgcgggctcccgtggacgaggaccgcctgtccccgctggtggcggccgactcgctcctggagcatgtgcgggaggacttctccggcctcctccctgaggagttcatcagcctttccccaccccacgaggccctcgactaccacttcggcctcgaggagggcgagggcatcagagacctcttcgactgtgactttggggacctcacccccctggatttctgacagggcttggagggaccagggtttccagagatgctcaccttgtctctgcagccctggagccccctgtccctggccgtcctcccagcctgtttggaaacatttaatttatacccctctcctctgtctccagaagcttctagctctggggtctggctaccgctaggaggctgagcaagccaggaagggaaggagtctgtgtggtgtgtatgtgcatgcagcctacacccacacgtgtgtaccgggggtgaatgtgtgtgagcatgtgtgtgtgcatgtaccggggaatgaaggtgaacatacacctctgtgtgtgcactgcagacacgccccagtgtgtccacatgtgtgtgcatgagtccatgtgtgcgcgtgggggggctctaactgcactttcggcccttttgctctgggggtcccacaaggcccagggcagtgcctgctcccagaatctggtgctctgaccaggccaggtggggaggctttggctggctgggcgtgtaggacggtgagagcacttctgtcttaaaggttttttctgattgaagctttaatggagcgttatttatttatcgaggcctctttggtgagcctggggaatcagcaaaggggaggaggggtgtggggttgataccccaactccctctacccttgagcaagggcaggggtccctgagctgttcttctgccccatactgaaggaactgaggcctgggtgatttatttattgggaaagtgagggagggagacagactgactgacagccatgggtggtcagatggtggggtgggccctctccagggggccagttcagggccccagctgccccccaggatggatatgagatgggagaggtgagtgggggaccttcactgatgtgggcaggaggggtggtgaaggcctcccccagcccagaccctgtggtccctcctgcagtgtctgaagcgcctgcctccccactgctctgccccaccctccaatctgcactttgatttgcttcctaacagctctgttccctcctgctttggttttaataaatattttgatgacgtttgggccgggttttgggactctgttgggaacatttcggggcgggagaggccaaggttgctggggaaatgcccattctccacttcccttctccctgtccgtgcccgatttgatttgagcctcataactcgaagaaaggtcagcttcctcgctgttttggtcctaactcaaaagcagatccagtaaaggtttttgttgtagaaagccaagaatgctattcagtgctgcccgaagtgcagagtaatgagtggcctctcctttccccagccccagaggccactctgctcagtttgctgtcttccttccagacgtttctggacattagtaaacatgtaacaaatacagtgggctggttctgtgtcaggtatttaacagttctggggacacgggtgttacctcctttcatggtgctctcagggtctgaaagaggagatctgcataaatgagaaaatcgggaaaggcgttctggaatgggtggtgct

SEQ ID NO: 12657 - DNA, 1190 bp, Homo sapiens
cggtgggcgcggaaactgagctggtggtacctggacacgctgaggggctgggctccaacctggctctggcggagctgcaggctggggccgagggcccatgtgccatgctcgctgtgcccgtctacatccaggcctccgagtgacggacctgaggtgtctgtttcctgggcaggcctgatgctcctgtttgggtccagggcccctgggggcagaccggtgatccttaccagtggaagcgagccatcgagccattggcagaaatcctgctgaatgtcattcagaaacctcagcccatggtcgccctcctgtgcccctctcctgccggaaagccctgcaacattctagggttgggggcagggccatccacggtttctgggcagagccatggtggcaggagagagatggctgaagcctgagcagcccagagtcccgctggtctaggctggtggtcggggcccctgggagaggagacagggcattcctccccactctgtctccaggctgcctctgggtagcctctagtctgctgttcttcaggaggcctgccataaactcttcggagtttacgtgttgcaccttttcacagacggttccccacagcatcctcagacagctctgtgatgtagcttttaggaggcactcaggtgtcacggctagactgcagctatgagacagatctggcttcaaatccaagagttgccatgcacttgctgtgtgaccttgggcaagtcacttcacttctctgagccccgtgttcctcatctgtacaatggggcttacgatactactacctcatagggttgtcctggggatccagtatgatgaagtgcgccaggggcttggcatggtgcccggcacgcagaaagtgctcaataaatgtttttgtcataacgtgtccgggtggcctgggccaagctgtggcagtttccttctttgcccctaggtggcagcactccccctctgaagcttgtggtggctgaggggtcccaggcccctcacacagggagccctggagagatgataagggaagcaaggctgggcacggcagctcatgcctgtaatcccagcactttgggaggccaaggtgggctgatcacctgagatcaggagtttgagaccagtctggccaacatggcaaaacctcgtctctagtaaaaatacaaaaattaaccgggtgtggtggtgcacac

SEQ ID NO: 12658 - DNA, 1450 bp, Homo sapiens
tggagaggagtctggccacagggcagggctgtttgacagacaccatggagcacaggcagccctcatttccggccagaacatgttgaacgcaccagtcatcctaaatagccttttctgtcttcacacagccaagaagaaagaagaggaggacgacgacatgaaggaattggagaactgggctggatccatgtaatggggtccagcgctggctgggcccagacagactgtggtggcctgcgcagcgagcaggcgtgtgcgtgtgtggggcaggcaggatgtggtgcaggcaggttccatcgctttcgactctcactccaaagcagtagggccgcgttgctgctcactctctgcatagcatggtctgcacctgggagatgggcggggggaggggggcgggcggggtgggaagtgcctgctgtttataatgttgaatttctgtaaaataaactgtatttgcaaatccaacattgagcttctggactacgctgactccactgctgaatcctcaatggaaagggtcgactggttgcagttgaaatgacctgaaatgtagcctctgtccttgtaagtcagttgacttgccgcacatctctttgtgtacttgtacggtactggcagaaaagtcatttttcaaaagccataggcttttccttgcccttagctgtaataatgcatctgattttgatttcctccagagctgtgtttctgtccatcacctgtgtattggccctgtgtttaccactctggcccactcctcacccccttgctcccctggtcttctggagtttgtgacattgatttgaaatggatggtgttctcttgagagcaagtgagattgttagaattaagttccaactatacagttttctaacatagctataaggtccttgttgctgtttgtgataactgatagataactcattggaaacgtgcatacatttatattcagatgaaattatggtttgcactgtctattaaatatctcgattaattttcatactttgctgttgtgtttaatctatcatttgcctcgggagctgaccctttccagaccagcaaggtgtacagtggagtctggaaacatggaagacttaaccatgacatgtgtcaacagtttgaaccaaagagcagagcttgtctcaccagaagtctgttcaagtcctagattggccctcaccttgcctggggactctctgggtacagttcagggtgagttggttcttgggtacttcagggtcttccctatttcttctctgccagtgtccatgggcagtgccagcaggagccttactgttggaagccatggtgctcccatcagacaaggctcatcaggaacattgaagaaatggcctttcccatggggaggaagtgtagggcactgactgagaatctaggacacagaggtcacctcaggactgctgagactcaacatatgactctggcccagccc

SEQ ID NO: 12659 - DNA, 1128 bp, Homo sapiens
tgttaattgtaattatctaatattctgtgggatctctgtcttcctgtctgtgaaacaagggaattggactagataatcttgagtgatatttctacctttttacagttttgtggaagtggcttgagaatttatctctggaaggagaaagggctttgctaaagtattgagagtatctcagagggttaaattctgggttcacaaaagatacctttcagtatataaacagatggatattgctttttagagtggacagattgctgaaaaattgcttgtgagatgaatttatcaaattgtatgctgagttccattataaacttggagctgtagcctcatgggacaaacttggagtccaagactataaaaaaattacattaaaatatgtagcaaactgtttaaaatcacataataaaggaaaaataaaaaacattttaagattttcacacaatggtaataatggaaaaacactagaccagaaacttgcatttcctaagagctttagcttatggagtagatgcctctactgaggttacctggcccttgaagtgccatctgtagagactgaatagctctgttatttgtcaaggtaagactcattgctttattccaagtaaatattctcttttagaatgccaggtttggaagcttaatgttattggccagattttcttcattccagaggcatttatctggtatttagctgtctcctgtttattttattaaggattttaataagcttagttaacggtactgcttacatggtgtctcttgatctatttgtctagtttcctttgaaattctttgtgttagtgaaagcaagcccagcagtagatttaaaagggtcatttccataacttcatttatctagatttgggtttttttggtaagagatatgaccacactatactgagaaatcgaatgttgtttcctttttttttgagacggagtctcgctctgttgctcaggctggagtgcagtggcatgatctccgctcactgcaagctctgcctcccgggttcatgccattctcctgcctcagcctcctgagtagctgggactgcaggtgcccaccaccacgcccggctaatttttttgtatttttagtagagacggggtttcacagtgttcgcc

SEQ ID NO: 12660 - DNA, 1118 bp, Homo sapiens
tcctgaatgggataacatttgagatgagcattaaaggagtagactcaaaagaattagagtcaagcagatcagggggtcagatcccagccctgccattcactaacattgtggtctctctgaatgtgagatttctcccttgtaaaatgttgtggttctgcatatcatgtgagtaacaaatgagggaatgtatgtaaagcacctggcatgaggtcagcagccaatatgtggcaactcttggtaatatgacaagaaaacaagatgcaggaacaggtaggctggatgctataagggttaaggaaggtaagaggcaattcatttatccaggatatgggccgtgggcagtccttgagcccagcccagggacccagcttcaccgaggctctttttcttcaggtgggcaccatgtccttgaagcttcaggcaagcaatgtaaccaacaagaatgaccccaagtccatcaactctcgagtcttcattggaaacctcaacacagctctggtgaagaaatcagatgtggagaccatcttctctaagtatggccgtgtggccggctgttctgtgcacaagggctatgcctttgttcagtactccaatgagcgccatgcccgggcagctgtgctgggagagaatgggcgggtgctggccgggcagaccctgggtaagcctctcttcactatattctcctagtattctctagaatagctgctatcactatccagttctcaacccccttctctctttctctcaccgctaccactgctctgagattttataaatttataagctatgtttaagttttaaatagttataaaattaatccctatagggaagaattttagaagcctctggaaaacacttctgacctgtctctgctttctcagagcttcttagtgacaggctttacagttccagttaaaatgcagattctccagagaaagagaacagagtggcctagaacagcctgttacaccgggtacagatgacttaggttagaaccctttctgagagcgagcaggagggcctgagagcacaaggacagtgtgaatacgcttggttttggtgtcatgtccatgtgatatgactatgctagtggtctctcttgaagtatgtacagtgtt

SEQ ID NO: 12661 - DNA, 1812 bp, Homo sapiens
gaggaatatgtcacttgtcacacatgccgatcaccggacacaatcctgcagaaggacacacgactctatttcctacagtgcgaaacttgtcattctagatgttctgttgccagtatcaaaaccggcttccaggctgtcacgggcaagcgagcacagctccgtgccaaagctaactaatttgctaatcactgattttgcaaagcttgttgtggagatgtggctggacaggtttgccatcagagtggatataccgttgtattaaaaacaagataaaaaagctgccaagatttttggcgagtggttggtctgaagtccttgcaagacgctgatgctcaagctgttgacatactcattgcctactttaacacctgtcagagaaacgtgatatggggtaaggaggtgcttttttaaaatcgttcatagacttctgtaaaatgcaagataaattaaagttattataacagtgattctttcaatttggtttgtccttcagttttcttttctataaatgtgcttggtgaaatcagcaagaaaccaaccatataaaacagtgtgtgccgggctctgactgagaaactgaacaatggcaggcgcttcatctgggcagccatttttcttctctgcttctcttgagatacatagttaaagtagacacggcctcccacgcgagtgtggtgggaccttgagacttaggaggattgcctgttttcagtgtccagggaatgactccatagatttgaattcttttccgtatgtggggatggttgctactacctcaccgccaagtcctcccccagctgttaccacatgagggaatacaaggtgctaggtaccctccttcctcgttggccactaagaggtcttagaaacatagcctgtaaatgtgtcttgtaactggcacactaaaaaagatcctagttgagcatctctcttggtgaggaagcgatgtgtgtgcggttcaggaaactcctccaagaggaggaggagtccaaacagggatgccagaggaagctttccgttttcctagccaacttgtgttctgggtttgaaaaagacccaccacaaatgctttttctattttctgatttaaaagtcgcttttgaatatgaccatgagaaaccaagaaatgctgcttgtgtggtgctctgcttcctgaggatttggctggaaggggattctccgctggcacatgggagaaggccatcttctgtgtcggtgctgtgatctgccttgttctcacttgctgaggataagggcatacacgctgctcctcgctttcttgttgcccgacttcgtactaagcagctcaggagcagtcactcagacccaaatgtcttgactgtgttgtttttaatcactgtgacccttaaagtacaggccaagtgttgtcaaacaccttggctaaaacagtggagggtgatgggtaaagcagtagagggccctcaacccacacactggctgaaactgccaccaactgccacgatgaacccaactgctgtttatgcccccattttcctttttttgtatctacacccacacgattcccaatgttggatatttctacatgaataaagcaaggatcagtgcctcttatgtaattaacgctccattgcttttgtgtatgtatgtgtgtttgggttattctttacttagcgggaccctttaggagaaggaatgatactcttcagtttggtgacaggttgacaaatagactggtgatttcaacccgtttttaacttcattcttgaagcagattctcaggactgatgcagcccctgtaagagtccagttgagataactgactaaattgga

SEQ ID NO: 12662 - DNA, 1189 bp, Homo sapiens
ctgatggtggaacagatgcagagaggtcacacagccagtgcacagcaattcctggtgcgcacccgtggggcagcctgcccagagtgcagcagtcattgtagtactactcactgtccccacctgaatttgtggactgctgagggcatgcagccctctaggaattaggagggcagtggtgaattagctaatttagggccagggtagtctggagtttgctagtttgggctttcctgaatcttacttttccatgtatcatgtactttgccatagaaacaacagaatgagtggttgttcattcatttcactttggacaaggagttgctgagcatctataatgaaccaaatgctggttggggatgaacctctgccctcaaggagctcccagacttgtagtaatgcatgtgtatatttaatcagaagtgaagtatttgctgttaagcaacatgactcaaaggggaactttatacccctgcagttactaagcgtattcatgaataccactttatttttatagctgctgaatcgagtgttcaacatcatgagggaaaagaatccagatatggttgctggggagaaaaggaaatttgtcatgaaacctccacaagtcgtccgagtaggaaccaagaaaacttcttttgtcaactttacagatatctgtaaactgtaagttggttaatggagtaccttcatcccaaatgccagattctcattgcagttttaagaatgttaaatgtccttattgtcgactttattatagatggaaagaacacacaggtgtaggggttgagggagttcaccgttcaagcctgtcattttcttcaattcataagtctcagggctgttttattttattaaagataacggtcttgctttgtcgcccaggctggaatgcagtggagtggtcatggctcactgcagcctcaatctcctgggcttcagcagttctcctgcttcagcctcctaagtagctgagactacaggtgcacaccaccatgcccgaccaatttaaaaaaatttttttttttttttgtagaaacgtgggtcttgctgtgttgcccaggagggcttgttttattagtgcattcagaggtgagagaaatcaactcatgctgacccactgaggatggatcctaactagatgtagtgaagagtgaggaggctcaatgtagttctcaggagccttgggagc

SEQ ID NO: 12663 - DNA, 1250 bp, Homo sapiens
gagtgcagtggtgcgatcttggctcactgcaattcttaagactattgtctgctccagttgtgggtagaagcagctggctctgcttggccagcgtcctttgctcacaagaggctcctgggaaccccacacctgtgccctagtcatgccacatgggaggagtgtgggctggtggtcagtagccctcagttctggtgtctattctggaatttcatttagagtggcccaagtgcgtcttagctcctctctgggcatctgtaagtgatgataatggtcatggctgcctcacagggtttctatgaggaagaatgagatggggtatggaggatttagagtcatgtctggcagaaagcaagtaccccacacatggtagctgctcgtagtcattttttggccagactttgcctgagattcccccacacagaggctgctagtgctccagtcctttcagtgcagagcaaaccctggatcctgccgtgtggatcctgctgagggggaggcgttgtggggtatcaagccctggtcactcagggttgatgcctcagtccttggcgcccaggcagaaggggatgggaaaggaaagaatgatttcctgatatctatatctggggcggggggctgtacatggcttctgtctcacttaatccatactattgtgagccctatttacagaggagaagactgaggctcagagaggtgaagtgatttgcccaaggtcacacagctggcaagtggcagagccagggtttgaactcagatctatctggctccaagttgtgtcctgaccactgctgagttttcagaggggccggaggtggctggggatgggagttgggaaggaggtagttttggctctgccagagttgttccctggagcaggtaccagttgggaagtccaggccctgatgtgccactcaccctccagtgtatgcctggaagggcgaaacggacgaggagtacctgtggtgcattgagcagaccctgtacttcaaggacgggcccctcaacatgattctggacgacgggggcgacctcaccaacctcatccacaccaagtacccgcagcttctgccaggtgagcagggcggggcaggtgggctgggtgctggtggcctgggtggggcctgtttgcccacatgatggccgcaggcctggcaggactcccatcacctcaagcagcaggatctggaagatgggaggatggcaggctctggcattcatgctggggcctcctgacttctgagggtgcgagg

SEQ ID NO: 12664 - DNA, 1177 bp, Homo sapiens
ttttactggtcagacaagctcaccccacctcccctggggcagagaggccaagagcattcgttatacggatgagttcctccaggtggaaagaaacatcaggagtggggaagcatttttacatctaaaaggagatcaaggaactgtcaaatccaaaatgttagatagtatttataagtgttgaatcaccgagagtgatgactgagagaggaagatggagaaccagcagctaacatctttagggagtctttagggagtgaggagtggcctggaggttggtaggtgtcagcagaaaggcagggtagtgggaagtatcatgtgagctatttttcaaagggacgcttctttatgttgtaatttttgtgtccctgtgtgattaaatgtgttctcccacaagtcagaaaggtgcaggtaggcagggaccgtgtctttcttgagtactctggcttcataaatacttgttgcatgagtgagagaatgcggtgacagagtgctaagccctagtgtgttgagtccacacgtggatcggggtccatgcagtgaccgcccctcttggttggtgggatgaggggactcacggaactcccacctgtttcctcccgtagccgacatcggcctggctgcctggggacgcaaggccctggacattgctgagaacgagatgccgggcctgatgcgtatgcgggagcggtactcggcctccaagccactgaagggcgcccgcatcgctggctgcctgcacatgaccgtggagacggccgtcctcattgagaccctcgtcaccctgggtgctgaggtgaggcccacagctgtatcaccccagagtccttgccctccctgggttcagccagggaagaagacgactgtgccagggtggggaccttccaggtgtggagctgaccgcgggcctggaggggttcctccctctcactcggtttcctccgtttcccagtgctgccaccccttgtggtgagtgttctgcagattttctccctggctgggaaggtcactgttggctaccctcaaggcatcctcctgatggatgctctggcaggaaaaattcaacacccatgtcctacttagtctcttaagggccagcttgccttggcccttcgggggtcacaggcctaccctggacccatcatggctgctggatgatggcagctctgattggttcagc

SEQ ID NO: 12665 - DNA, 2968 bp, Homo sapiens
aaaggatgttgagcatttttttaatgtgcttattggtcatttgtatgtctttggagaaatctctatcctttgttcatttttaaatattgttgagttttaagttttttatatattttggataccagtcctttatcagatatatgatttacaaatattttttcccatttttgggttatttcactttcttgatggtatcctttgaagcacagtagtatatttttgtgcttctatagtagtgtataaagtagtatactacactactcatttgattctttgcatatttccttttctcaaactaacaattcttgcttttagttttaatcgcctggacctgccaccatacaagagctatgagcaactgaaggaaaagctgttgtttgccatagaagaaacagaaggatttggacaagagtaacttctgagaacttgcaccatgaatgggcaagaacttatttgcaatgtttgtccttctctgcctgttgcacatcttgtaaaattggacaatggctctttagagagttatctgagtgtaagtaaattaatgttctcatttagatttatctcccagtgatttctactcagcgtttccagaaatcaggtctgcaaatgactagtcagaaccttgcttaacatgagattttaacacaacaatgaaatttgccttgtcttattccactagtttattcctttaacaacaatattttatgtgtgtcaaaagtctcacttgggagtagtgtttttttcttttagacattctgcagacatgcagggaagtcctttggtaactgcaatatacaagattttcctattaagcctcttggtaagaggcatttgttaaaagtgcaagcttactcctgcttctggggatgtgagcaaaattcgggcttgtgttctccctctcattttagtctgacttgactattgtttttcctttctggcgcatgaatccatacatcattcctggaagtgaggcaagactcttgcatctctacaaagtagttttgtcaatttgaattcagggaaaagttggtcacagcctgcaaatgacttcatttggaagtctgattgtttcagttgcctgacaaatactacactttacaaacaatgttaacactgtgattccttcattgttttaagaagttaacctagggccgggcatggtggctcatacctgtaatcctagcactctgggaggccgaggcaggaggatccctttagcccaggagttaaagaccagcctgggcaacatagggagaccctgtcttttttttgggcagcgtggtgggggataaataaataaaaggaaaaaaaacttagcctagaattagaattaatttaattgaattcatctaaagatgtctctggtgatttttatatgttccgctatataattgatgctttatagttttatcataatccaacaacttcagttatatttaattattgttaaggagtttaagactagaaagactagagtgctttctagtccaaatagaggtcagtgaaacagcttttgacatcagattttcatttgagagggagagctgtggtactggctaaaaagaaaggaagataacatccagtaaccacaggaatatattctctgtgaattaaaagtcttcaaagttatcatttctctgacatatgttggagtagtcatttccattctttacattgtcatgaactggattgataaccctcatctgcaatattttcacccctaaaatttttaacagggtttcctttttttctcacgactatttaagtttagattgctccattattaactgattaatgcactttgaagttctctggaattaattattttaacttggcctagcttcgactgtcaaggtggctgttataaatttgacttcattggcagtggatgaagcctaagccagctgagtctctatcatagctgaaccctgaggacagcctcatagctcatgtatcagggacttttgccacatttcagaggcatagcatgaacaagtaatattaagccaagaataagcagcagaaccctgttccatatggaaaaaagaaaaacaattttttgtccctaatgttcttccttttacatcctggaacaacaataaaaacatttttttaaacttgtctactgtaagatactgccatcataaagcagagacttacatgagtgaaagggttgcctcatcaagcagctcagtgtaaatggggaggctaggctctccccagccctatggtttttttatttcatgtaccccaggaaatactgtgtggtttctaaaagccctggttgttaaaagtagggactctgcctttttgttggtagggagaaaaaacgctattgctttgtcttacagagcgaatgtctgccaactacccgttcattatataagtctgaacttggtaatatatggctaatgaagattaagccctctataaagacttcctgttgaggtgaattctcatactgaaatgtagttacctacaatatttactagagatttatgaaattaaattaagagataatgtaagaaaatacatttttttggttctatataatgcttcatgattcatttagggacctagaaatattgtgtgaaaatatataaatatcacccaaaaggctttctgccctatatttttaaaatacagaatagttatatttgaagtagccctggccctagttctatagggcttggctatttaatatttttatggaagaagtgtttagttctggaaaaggtaaatgcttgtatatatttttgcagcctgggatctccctactccattttttcctttaatttaagtggccacatgtatatgtcttccctgctgtgttaggaaaatgggggctggatatcccaagaatcagaggttatataaaaatactgcaaatagaccgcagacataaatatctaccaaatgctatcttaaattttggtccaaactgaacatatggaaatagatttattgt

SEQ ID NO: 12666 - DNA, 2411 bp, Homo sapiens
tgcaaattgttcctatccaggttcagggccttcagggggcctcttttcattttctcccacaggcctctctttctttctaggttgctggggagaaatgggtaccctatgatccccctccccttctcctccagtaaatacctggaagagggaacctgaatccctgggggagacagaaggggcaggggccaccagcctccccttcttgtggtgagactgaattttgggctcagacaccagcaacagcctcttgggatgccctgagttgcttcccatttcctctttctagccgtccttttctagtgtgtgctcactcttcctaggaacttttaagacttcttggtacctatgaacataggtcctcccctcaccccaactctaggtttccaggcctcacagccaagctgaagcttggagaaaactctgcattcccatgagggcaaaggcagctgccctccctgaccctatagccccaggcctcatggggggtatgtggggaagggatggggtatccccatggatgctgggatgaggacagaggaagacctgatggggtctcctattccagggaataagccaaattaacactaaaaacggatcaaagctcccacgccagtccactagggccccagtagttgacagccttgctcctctcccaagttctccttcagaacctagttgcttttattcttccagctaccacttgggcacttcacagccagcctagggtcttcggcacctccaagagctgaatctccctccaacccttcttgcctactcctcactgccagctgggacctaggctcagtcctgtgtggtgcccatgatccttctggtgggggaagagtttaagttatagggcatttggctcaaattttaaaaggccttttgtttacctatatttctggaggctcctgtattctagaacccaatctctcacctgcttggttgcaaggctcatatttttttgtacctttcctatagattctgtagcatttgagtgtggcaatattttaattgtgtatagatttctaagaaccaacactactcagtctcctgctagtctgactcctgaagcatcagcccttgtcatactgtattgactgtgtacgtgcctttcaccttgagcatgcttcaggatttttttttaaaccacagaacttgaatacatgagggaaccagagttcaaagtcctatgcaaccttaggagggggttagagagtctgttttgattgatgttttctgaggccctagaggagtttgtatcaatttgtgagtattaatgtcagtactaccagcactttgccaaaactgtcagagggacccgtttctagagtgagtcccagttacatcaaacagtgacttccagttattccccagtaagtctgagtggttccttcaagctgggtgtctttccagcctttgccagtctagccccagcagggcaccgtgtatgaatgcagtttggtgctgttttagagtatgcctgctccccagccccctgcctggaaccctctgagcaacttgctctgacctataatgtcttaggtgcaacacggaccccaccagagctcttggatacccccctagatccatgtggctttatgtgaggggactgaatgcagacacaccatagcccccttctactactttccctctcgccctgccacctagttccacatggaaccaacaagttgagtgcatccctgttgggtgttttgtgttgagactggctgaaatgaggagactttgaccatgtgacgtgtcaacagactcaaggagacaaccacctcaactgggtcatgtggcatgcctgtgtatgtgtgtaacagaattctgattgttagactgtaatgctattcctctatgggagaaaaaaattaatataaagaaaaacaaataaaaatatatttaaagcacatgatcctttctgcctgagttgagcttaagtatgagaagcatcttgtaatcttaagcacagtagtggcataggatattatgataaagctggccttggttctggtgtgtgtgtcatatgggagaggaagaggggagataagcttactgggaacagagccagacaatggggtctgactcataaatgactactgttagaggatccttacaatgcaagacacatacatgaagacagctgaaatagagatgagaataacagcatgacagaatgaccaaactcatccttgtggtctcaggcactgggttagagcaagggcaagtagccactggaggggaaaggatgaagtctaatcctgggggagatgcagcagaaggctgaagcccaggctgagacaaggccagggccccaagcatcagagtctcctcaagttgcaggtagggtggggcagaagcagctggctttggagactacacacattttgaagaaggacagccag

SEQ ID NO: 12667 - DNA, 1176 bp, Homo sapiens
attcatcctcaataattcaggttatgaaaggatcacagccaagcacaattcctgcagccccactgacaaccaactctggcctgatgcctccctctgttgcagttgttggccctttacacatacctcagaacataaaattttcttctgctcctgtaccgcctaatgccctctccagtagtcctgctccaaacatccagacaggtcgacctttggtccttagctcacgagccacccctgttcagcttccttcccctccttgtacgtcttctccagttgtcccttctcatccccctgtgcagcaagtgaaagaattgaatccagatgaggctagccctcaggtgaacacctcagcagatcagaacactcttccctcttcacagtcaaccacaatggtttctccccttttgaccaatagtccagggtcctctggcaaccggcgaagcccagtctcgtctagtaagggcaaaggaaaagtggacaaaattggccaaattttgttgaccaaggcatgtaagaaagttacaggctctcttgagaaaggggaagaacaatatggtgcagatggagagactgaaggccaagggctagacaccacagctccggggctcatgggaacagagcagttatccacagagctggacagtaaaaccccaacgcccccagcacccactctgctaaaaatgacctctagccctgtgggcccgggcactgcctcagcaggacccagcttacctggcggtgctctccccaccagtgtacgctcgatagtaaccactctggtaccctccgagctcatctccgccgtaccgaccacaaaaagcaatcatggtggcatagcatctgagtcacttgcgggtggcctagtggaggagaaggtgggatcccatccagaacttctacccagcataggtatgtacttggggcttcatcatctctttgtgtcagttttttgatgacctaatcccacaagagaaagcatgactccttttttacttggaggaaagagaatgggctaaatggcaatagcagtagttttatttattgaaagtacgttggaaaatatgcttttaaatcccatgttaagtttgcattcattaaagagagctaagggccaggtgcggtggctcacgcctgtaatcccagcactttgggaggccgaggtgagtggatcagttg

SEQ ID NO: 12668 - DNA, 1190 bp, Homo sapiens
ggactggggggcgttatggggtcccaggcgggtgggtgggagttaaggcctgtgctggccacccactctgtggctcccaggaaggactccgagctgagccagctgagcctgcgggtggaagacgagcagctcttgggggcccagatgcagaagaagatcaaggagctgcaggtgcgtggggatcgggtgggtgaggcctggggtcagaggcccacagaggtgacagctgccccacgtgcccaccccaggctcgggcggaggagctggaagaggagctggaggcagagcgggcagcccgggcccgcgtggagaagcagcgtgcagaggcggcgcgggagctggaggagctgagcgagcggctggaggaggcaggcggcgcatccgcggggcagcgcgagggctgccgcaagcgggaggcggagctggggaggctgcggcgggagctggaggaggcggcgctgcggcacgaggccacagtggcggcactgcggcgcaagcaggcggagggcgcggcggagctgggggagcaggtggacagcctgcagcgggtgcggcagaagctggagaaggagaagagtgagctgcgcatggaggtggacgacctggctgccaacgtggagactctgacccgcgccaaggtgtccgtgccttcctcaccccatacccaccctgactttaaaccaatcccgatcccagcagccaatactgttcccacaccagcctccacccagtaccttatcctgagccctgacctcttcacctggtacacaaccctcatttctcagcctcctaccagtcctgaccttaagccgtgactcccaagccctgttccctgactccaggtcatttctgatccagcatctacttccagcctcagacccttgaaccagcagtagttgtgaccctagcccttgactcctgaactctgacttaatacctgtcctctcttcctgtcctgaaccccagcaccctagccttaacccctgacctttctaccacataatcctgacagctgacctctgaccattgtccccaggtgactccgcagctaccatcccaactctcaccctgacccactgccctgggactggcccagccctgtcagttctgacacctgttaagcccagcagtagaatctctttccctgactttgaacttggggctctgctctccctttgattcctgggccc

SEQ ID NO: 12669 - DNA, 1512 bp, Homo sapiens
tcccagtctgctccacctcctggtgaggtctgtcaggcctggtcctgtccttggagccaccagcatcctcagacaagaatctagacagtgttgccagttccatccccaggatgcttgctcaaagccaatgcatggtctgagctccatgccaggccctggtgggggcagccacgttgacaccttcaccctgtccctcctcacccagcacatcctttactgcattgtggacagcgagtgtaagtcaagggatgtgctccagagttactttgacctcctgggggagctgatgaagttcaacgttgatgcattcaagagattcaataaatatatcaacaccgatgcaaaggtaaagttaacccagggctctgtggagtgtgctgggttgtccagaagttcacctggagtcctggtctgccaggctttaggcacaggttttacgttagagacgacgggggagtctgggcagtctttggcaaacattcattggaacctgctctgtctggctttgtgctagaccctgggaatgcagggatgaaaaccggggctgcttgtgggtagggagtgagggtgggaatgggtggcttgtgcgcctgccgtgacgcagcatggtgggtgccacggtgggagccgctgtagggagggactgggcctggtgtgttaggctcaccgagtgtgtgtgacagaaacccagctcaggctagctgaagtaaaattaaaagtaaaaattaaaggaatccagcacccttgagcgtaaaaccactggagagagtgtcggatctgtgctgaattccggggagtgcctcttagtacctgggtggtgaggggaggtccctcagcttatctgagcctctgtcttcctatctgaagcagtggggctggtagaggtcgctgatgccccttgtagtgactatccccccgggccatggccatacctggccagcagcccactgcctgctgtgagcttggtttctgtatagttccaggtattcctgaagcagatcaacagctccctggtggactccaacatgctggtgcgctgtgtcactctgtccctggaccgatttgaaaaccaggtggatatgaaaggtacatgaaaggcaggctgtcaaggcaagtcatgcagggtaagaatgctggcatcagacaccctgtctccagcagggagacaagaatgactgagggagctgcaccagatgcccacgtggccggcctcaaggtggcggcttccagggcaattggctttgctgccttgttcaacactttaataaggtgaaaatccattgttgctagcaagatgcaaagaaaaccagaaaaagaccttcctcttctgggctggtattgcctggcacgatgagttggccccctcgtcctcagtgtgctgtgcgtggcatcgcaggtgccctgtggtgcagcaggcatctgaaccctcctggacttgctaacgcacttccatgtgtatgcgcacgcgtttcctttttttcctaggagagggcttgtggcatccagcagatt

SEQ ID NO: 12670 - DNA, 1215 bp, Homo sapiens
tggaatcaatggatttctcaacctactgcccctctaaagcaagagtggacagcgtggctattcccaggggccggcaggaacttcagacaggcaaagccgactgcttactgagcagctggaggattcttccctccacaaggaggtgtgctcccatttttcttgaaagacattctgcgctcatttattttttaaccttcgatggagaatgtacaaggaaaattactctctgctgtaaggaaaacagtgcaggaagggggtgactagcagctgacccttgaccttggcattggggaggtgatgtggggaccttagtgaacaagaatttcagtgagctcagctccagccagctgcgtgtgcacaggaaactgggcccactgttgcataacttctgattttttctgccaagcaaaggcagaaattaagatttatgtgaaaggtcctgattttaaatgttggtttaaatattttaaaaaccttgcatttgagctaacagaacatgcctggagacagctgtggccccagggcacctccatcatatgcacccatcctctgtgagaggttttccggctgaaagccatagaagggctccaggaagcatgttaaccttctgaaaaatggcaccacatatgttatggaactgtgctgttttccctgaggaagtgagtctctggctttcatcagactcttcagtctgagtactctgtgggatatcaggatgaatgcaaacagccatggcccctgctctcatgaagggcagagtctgaaaacagagacagttgttcatccaaggattccaccgttgagcattagtgataagtggagatggtattcaggaggagaggaacggggtctgtgagagacatttgacagggtccaggactggccagaggacactcaggaactctcccctgcagaagtggcttgccagccaagacctgaagtgtcagcttgtagtgaattgagtgaacaggcatgtgagagggtgtgtgttctagccagaagcccctgaacgagggaagaccattgtggccagctgatgggagtgatgtgggcttggctctgggctgggctgcacaggacgttgtgggtcacagtcacagggtgttgtgggtcacagtcacaggcctggattttatatacagatggtccacttagaatttttcaacttcacaatggtacagaagtagaattttgaattttgatcttttcctgggc

SEQ ID NO: 12671 - DNA, 1167 bp, Homo sapiens
ccagcctagcaccattgccaccagcatgcgggattccctcattgacaggtacctggggcctctcctttcttctgctcagggttgggggttaacttgcattttgagagtatggggaaaagatgtcatctagaatgggagcctaccagtttgttctggtagcttctcgagtgtgagagcatatctgtacactgctgagcagataagagccagcatattcaaaaaatatttcttgagcatctgctaatcctcatctttgtggtttttcagggctaggatactagagcagtagctgcttgagcagcttgtcagagctggtcccgggatgagggctgaggcaggcacctcacttgagagtgaggtgggctctgtgaaacagctactgaccgtgcgctttcctttctcttcagcctcacctgagtcaccttccaagttgttccatgggctcctggctctggactgtggccaaccttctccacattccgcccaatctgtaccggatgctggcagggaggtggcagagagctcactgggactgaggggctgggcacccaacccttttccacctgtgcttatcgcctggatctatcattactgcaaaaacctgctctgttgtgctggctggcaggccctgtggctgctggctgagggttctgctgtcctgtgccaccccattaaagtgcagttccctccgggccattctgaatgtgatgtttggggccctcagcctgtgtacaatccctgcactctccagttgttccagcattctgggaagatagggtgggatgaacacaacacacacccaacccagttcaccacctccacacacgccattcccttctcctctaccatcaggatgtgaggcttcatcctggggcaagaaacactctccactacagttctccttttttcttttttctttttgaggcagtgtctccctctgtcacccaggctggagtgttgtgacgcaaggatggctcactgtagccttgacctgttgggctcaagcgatcctctcgcctcgtttatttttttgtagaaacgaagtcactgtgttgcccaggctggtttatactcctgaactcaagcgacccaccgcctcggcctcccaaagtgttgggattacaggcgtgagccacggcgcccggtctagttctcacagttttcacc

SEQ ID NO: 12672 - DNA, 1219 bp, Homo sapiens
ctcccggaagtctccctggacggaagtggaaacggaaacctttttagggagtccaaggtacagtcgccgcgtgcggagcttgttactggttacttggtaagctggtgtgaggggaacctgggagggtcagctccggtcctgggtcgggaggggtgggggccagaggattcagggccggaggttctggtgggggcccagtgggcgggacccgaggacggaggggccgggaggccgagaggggcggggtcgcggcggggcctgagggacggaggccgggatacttgggaaaggatccgccggccttgaactcccgcctccgccgcccctaggcctcatggcggtccgagcttcgttcgagaacaactgtgagatcggctgctttgccaagctcaccaacacctactgtctggtagcgatcggaggctcagagaacttctacaggtgcggcgggagccccggggcttacggtggcggggaggcgtgcgcaggagtcaagagctccggcagtgggagggtgccggcccctctgccccgccaccaccgagtccatgtccctacagtgtgttcgagggcgagctctccgataccatccccgtggtgcacgcgtctatcgccggctgccgcatcatcgggcgcatgtgtgtgggtaaggcaggtggaggacgccgagggagggagtggtctccaagcaccattaattacacccccggagggaacccggagtgacctagggattcccagggtatcatctgttatctctgggcactatagaatctctcaggccaagcgtcaggagatcggggcaaccctctagcaaaggctgctggataatagtaataacaaataatgtaaagtgctttcactcctgttctcattccttcgtcacaaagacactagaaggtaggagttactggcctaacttgactgatgaggaagttgagacttgacctaagtgactcagtaagttccacacctagttcctagtgttggagaaggatttttctcttttttttttttttttgaggccagatttttgctctttcgcccaggctggagtgcagtggcaagatcacagctgtctgcatcctcaacttcttaggctcaagtgatcctcccacctcagcctaccaggtagctagggccacaggcacgtgccaccacacctggctaatttttacatttttggtagagacgcggcctccctgtgttgcccagcctg

SEQ ID NO: 12673 - DNA, 1182 bp, Homo sapiens
attttaatagattgtatgtaacccagtatatctgaaatattatttcaacatgaaagcagtattaaaaattgagatattttatattctttttcttcaactaaatctttgaaatcttaaacttgtgccacatctcagctttgactagctgtatttaaaatgctcaatagccacaggggagccactgtattggacagcacagttctatacccagttttacggatataaaactggtgttgggcaaattactttccgtctttaggactcctgctttcatcagtaaaatgaaggattcagacttgtttgtcttctaacaaaaaaatgtggttccctccaggtatgagggagccttcagaggtgccctaaataatctgtatctcgatctgggtggtgcttgtgtgggtgtatgtataatacataaaaatttatcaggcagtacacttaagatttatacacttaatagtatctttgttatatctcagtaaaagtttaaaaaaaaaaagttcacttccagtttgatttggtgccctttgctaaactcactcttagatgaggagaccttcagtggaaatgtgtgatgtgaaaaatgcaaacagccaagactttttttgtcttcttcccacccaggatgtgtctagtccgaatgaagcaggaaggccggagtgggaagtacatgtgtcgtatcatagttcattttatgtgggaggatgttcagcagcgcggcagagtcatgggggtaagtgagtgctgtcagatgcttgtcctggacaattccagagaagggtttgagtttggagttttatctgttgtaaaatggccctgcttttagatttctgtgaaatgctgcctaatatcaagtggcagttccgctaaagtcactttttctgcctctgtggaaactaatactccacagatactttatgtgtttgtacacattatagtgatttgtcagtgtgaagtcatcctgtatggagatgggattgtaaagcccaaatcgtggtgataggagggatggatttggtgaatggagggaatcaaatgataatccagttaaggatactatacctttgacaccagttcaatatttgaaccagtccttctataaattagttctgatgggaggccctggtatggggcctgcactgtcttcaggaactgaaactcaagctccttgatcactggcaa

SEQ ID NO: 12674 - DNA, 1233 bp, Homo sapiens
tctcgggaacaggagaaagctctgttggccctccagcagcagtgtgctgagcaggcacaggagcatgaggtggagaccagggccctgcaggacagctggctgcaggcccaggcagtgctcaaggaacgggaccaggagctggaagctctgcgggcagaaagtcagtcctcccggcatcaggaggaggctgcccgggcccgggctgaggctctgcaggaggcccttggcaaggctcatgctgccctgcaggggaaagagcagcatctcctcgagcaggcagaattgagccgcagtctggaggccagcactgcaaccctgcaagcctccctggatgcctgccaggcacacagtcggcagctggaggaggctctgaggatacaagaaggtgagatccaggaccaggatctccgataccaggaggatgtgcagcagctgcagcaggcacttgcccagagggatgaagagctgagacatcagcaggaacgggagcagctgctggagaagtctctggcccagagggtccaagagaatatgatccaagagaagcagaatctggggcaagagagagaagaggaggagataaggggccttcatcagagtgtaagggagctacagctgactctagcccaaaaggaacaggagattctggagctgagggagacccagcaaaggaacaacctggaagccttaccccacagccacaaaacctccccaatggaggaacaatctctaaaacttgattctttagagcccaggctgcagcgggagctggagcggctacaggcagccctgagacagacagaagccagggagattgagtggagggagaaggcccaggacttggcactctccctagcgcagaccaaggccagtgtcagcagtctgcaggaggtagccatgttcctacaagcctctgtcctggagcgggactcagaacagcaaaggctgcaggtaagtcactccatggggagtaagggccaggggacacacccctgtctggctgagctcagggactgcccaccaccctgggccctgtggcacctcaggggtatgagaaagctgagatcatgagcacctcaacatcggtgggattcaggctactgtgctagtcgggagatacagagaggataagacccccacagtccctgccctcacagagttcacagtctagtgggtaaacaacgataatgcagtgtggttggtgcctaatgggggaagtttagtatgccccag

SEQ ID NO: 12675 - DNA, 1209 bp, Homo sapiens
acagcaggtttactcattttcctcagctgcagccttagagagcccaaccccagccaccagaaactcagccctcctcattgcatatcccgggccaacagcacttcagctagtccagagagcccctcctgactgcattctgccctgctcggcacagctcagtctgtccctgccctgagaaggaggcccaacattggggtgggggttggggtggctagtggccctgccttctgagggacttagatctgtgtactcccagaccagtgccacagactggcccgggagtggggctcatggggctctgcttaggatccctggtgtatgggggttgtgtggtgcttgccagctcctgaggagcctaggagcttgatcacagcttgatctcttagacctttttacaatgttgagtttataggcttagggtccatggtctttcctggagccagtgtcccttttttgggtaagaggcttggggaagactccccaaactactcgtctaggtgaggtatccctgccaacagacacaggcttgcagcctgacagggaggcgctgtttatggtggctgagcactagatctccatcccttgtcctttattgaaagttctcaagggcaggcaccgtgtcttcctctctgcatccttagctcacagcccagggctagcacaaagcagatacatggtgtacttctgttaaattaaaacatgcctcagagaagcaaatgccatccaggccttttggatgttttgtgtcaggtctccatggcgttgcccattatgctggtgtggggcctctccttgctgcagggcctgctgccccatagacgtccagtctgagttcagatgcttctggcccatagcccttgcccaggcccctaagattgtgatgaggttctgcaaggaaacttgcagaaaccccagagtgggaaggcctatgccaacaagagtgctgtttgtcttccttaggatgggagaggacagaagaactcagatgccaagtgtgtggctgaactgcagaaagaggtatgttctggattttctaagcccatattccctcccttgcactcaggccctttgtgcacctccagcagggagaggggaagttcctcccttcagagaacttcagtctccatgggaggcaaaaatagtcccagtcccaaccccatctctcatatgcctagggtgggagtggggaagaaagcatgatcctggccc

SEQ ID NO: 12676 - DNA, 1168 bp, Homo sapiens
ctgagggagcggattcgaggccattctgaccctcgccccttgtcctgcagtgaccattgtcagtggccttctcatgctgctactgttcctgtccgagctgcagtattacctcaccacggaggtaaggggcggggcttagtgcgtgggcggggcttggcattctaggagtaggacctttaggggtgggagtggggaaggagaggtttggggctaagtcttactgaggtagcgctgccccaggtgcatcctgagctctacgtggacaagtcgcggggagataaactgaagatcaacatcgatgtactttttccgcacatgccttgtgcctgtgagtacctcaccatgggtgggactggagagacccagggttctcatgtgggctgccagattcacacctccacccttaggttctggactggaccccaggacaacctccttctcctcatcccgttctgccccaagacaggcccagtatccccttcccctccaaaacccacatccccttgtccctagggtcccagtaccttagcctgattttcctgcttccagatctgagtattgatgccatggatgtggccggagaacagcagctggatgtggaacacaacctgttcaagcaacgactagataaagatggcatccccgtgagctcagaggctgagcggcatggtaaccaggggagggggccgggtctcagatcccaaagctggatgtacccaagcctatctgctagcaagtgaactgtggcaggcatagtgatacattaaacaactaagagctagagaagtcaagtgacttgcctagggtcccccagctagtaagagtcagagtgagctaaaatcctctatacatatcgagtcaggtaatctacctggctattattctcagaggtcctcaatacctgcagatggtagtttgaataccagaggtttgaagataggtcttatgtgctcttgccttggtagaactgtctagatggacccaggcttctttgagtgtttgctttcccagcccattggcttaattcagcccttaatgctcttcccctttggaatgcaggtggtttaatgagaatttaggttctcaagtcagattgcctgggttcacatctagctttgtctcctgcagtctgtgagcttcagctagaaagtggtaataaaacagtagt

SEQ ID NO: 12677 - DNA, 1435 bp, Homo sapiens
aagtgggccatcgggatttggagggggccctcagaattttggaaatggccctggtagcttaggcggtcccccggggtttggaagtggccctcctggtcttggaagtgcccctgggcatttgggtgggccaccagcttttgggcctggccccggccccggccccggccctggcccaatccatattggtggtccccctggctttgcatctagttctggaaaaccaggaccgacagtaattaaagtgcaaaacatgccctttactgtgtctattgatgagattttagatttcttttatggctatcaagtaatcccaggctcagtgtgtttaaaatacaatgaaaaaggtatgcccacaggtgaagccatggtggcctttgagtctcgggatgaagccacagctgctgtcattgacttaaatgacaggcctataggttcaagaaaagtaaaacttgtattagggtagccattcacatcattttttatagggtagatcttcatattgctgtgattaatgcatccagattgttttcctagtatttccaggttagaacctgtggattgtttcaattgcatatagcttggtttccataacatagagcattggttgactgtttacagaagactcactcaccaggataaacattgctgtatgttacagtaaagctatctggagagaacacataaatgattttggcataccattagagaaaccatttgtaaaactcaaatgaccacataaagcttatcaaggagtctagattggttttgttttataccatatgggatgaagaaaatagaaatgtcagtagaactcattgagggtgctcttgccagctgctgaaaatagaagttggctactctcagaatttggtttaaagctggacagatttgctttgttatagggtaaagctttgtctaaagtcctcattttcttttaaaattgaataaaatttctgtatacagattcattgtatgtacctttattgcttcttaagggtccttgctgtatagacagtcctgcttcagaagttgctgctttgtttgtctaattgactcatttgtaaatgagcagaactgttttgttggtttttttccctaaatataaaagtccacacttcgtttgtgctataacctcaaactttgatttctaatgtcacacttaaaactgtgtggaataagacttttgccataaaaataaactatggagtcctttatctaccagagcctttttggtttgaccgccacgatttaggttagtcagtttaaaaattgttcatgttgtttggatggtatcgaaaaccagaaaccacttttaataatgtgtttaagatacttgatttgaagtccttttcatatggactaattgtagtatcaatttcctcctgtcccgattatgtgaaattttggcctttaaacaaagaggggcccattcata

SEQ ID NO: 12678 - DNA, 1485 bp, Homo sapiens
acagctcctccaaatatgggggcttcctttgggagcccaacgtttagctcaactgttccaagcacagcctctccaatgaacacagtcccgccgccaccaattcctccaattccagcgatgccatctctgccaccaatgccatccattcccccaattccagttcctcctccagtacctacattgcctcctgtgcctcctgtgcccccgattcccccagttccttctgtgccacccatgaccccactgccacccatgtcgggcatgccgcccttgaatccgccacctgtggcacctctacctgctggaatgaatggctctggagcacctatgaatttgaacaataatctgaatcctatgtttcttggtccgttgaatcctgttaaccctatccagatgaactctcagagcagtgtgaagccactccccatcaaccctgatgatctgtatgtcagtgtgcatggaatgcccttttctgcaatggaaaatgatgtcagagatttttttcatgggctccgtgttgatgcagtgcatttgttgaaagatcatgtaggtcgaaataatgggaatggattggttaagtttctctcccctcaagatacatttgaagctttgaaacgaaacagaatgctgatgattcaacgctatgtggaagttagccctgccacagaaagacagtgggtagctgctggaggccatatcacttttaagcaaaatatgggaccttctggacaaactcatccccctcctcagacacttcccaggtcaaaatcgcccagtgggcagaaaagatcaaggtcaagatcaccacatgaggctggtttttgtgtttacttgaaagggctaccatttgaagcagaaaacaaacatgtcattgatttttttaaaaagctggatattgtggaagatagtatttatatagcttatggacccaatgggaaagcaactggcgaaggctttgtagagttcagaaatgaggctgactataaggctgctctgtgtcgtcataaacagtacatgggcaatcgctttattcaagttcatccaattactaagaaaggtatgctagaaaagatagatatgattcgaaaaagactgcagaacttcagctatgaccagagggaaatgatactaaatccagagggggatgtcaactctgccaaagtctgtgcccacataacaaatattccattcagcattacaaagatggatgttcttcagttcctagaaggaatcccagtggatgaaaatgctgtacatgttcttgttgataacaatgggcaaggtctaggacaggcattggttcagtttaaaaatgaagatgatgcacgtaagtctgaacgcttacaccgtaaaaaacttaatgggagagaagcttttgttcatgtagttaccctagaagatatgagagagattgagaaaaatccccctgcccaaggaaaaaagggattaaagatgcctgtgccaggtaatcctgcagttccagga

SEQ ID NO: 12679 - DNA, 1485 bp, Homo sapiens; identical to SEQ ID NO: 12678

SEQ ID NO: 12680 - DNA, 1209 bp, Homo sapiens
ttggggagagctctcaggagagctgacaaggacttacagggagctggagagctcaggataccttaaccacctgtgttagggtctaccagggcaagaggcagaggacagacagggacagaaggaggcaagccattgctcagagccttggggccaatgttgtcgacttcctatctaagccctcactcatttaatgcctcttctctttggcagccctctctgggagatggttcaggatggcattgacctcaagagcatcaagtggacccaacactagaagaatagggccctgactttgtgctggtctggcccctcctgcctcaccaacccgtgcacaaccagacaccttgttacacctagtggatgctctagattggtatagaccagttgacttcagcatcagtccacctctatgacagaaacacaagaaaactgtctttccctagcttcagttccttgggtgtggagcactccccatttcttctcgggtcttaaagtgtgtggacattttcatcccgaagccatagagacatttgctgtcatattgctgctgggcacatctgtgctcttggtgaggagagcaagaggaaccagaagaagtctctttggtcagggaccatgatgctctacatggacatttgagtcttcgtcttctgctgctgctcggctggaccagcttctttaacagcaagcataatccacttcaatgtaatattttctgtagctccaaaggctatctcttcatattgactgcagacagactgaatggacagtttcttagagggcttgtctcctttctacccttgtcctctttcctttcctttgacctaatggagctagaaatatgtctgtgactccaccagttattctaataatttgttttcttgaaaattgttaatttcaagactggagaaataaactcaccttctatttactctgtgactttatgagaggttgagggaaaagtggaagctgtacttgggaattgtggagaagaccgccactccatctgatttgcataaatgactcagtgggcttttgtatctcttcatttaagaattatttgaatgcctgccaggagccagatttgttctgggtattaggaatacactggttaacaggaccaaaaaagaccctgccctcactgagttttaaattttagtggagagatggaaaataattaaacaaataaacaatgttatagattgtgat

SEQ ID NO: 12681 - DNA, 1218 bp, Homo sapiens
ttagataaaaataaagaggcaaggatctactgtcatttgtatgcaatttcctgttaccttgaaaaaataaaaatgttaacaggaatgcagtgtgctcattctccctaaatagtaaatcccactgtatacaaaactgttctcttgttctgccttttaaaatgttcatgtagaaaattaatgaactataggaatagctctaggagaacaaatgtgctttctgtaaaaaggcagaccagggatgtaatgtttttaatgtttcagaagcctaactttttacacagtggttacatttcacatttcactaatgttgatatttggctgatggttgagcagtttctgaaatacacatttagtgtatggaaatacaagacagctaaagggctgtttggttagcatctcatcttgcattctgatcaattggcaagaaagggagatttcaaaattatatttcttgatggtatcttttcaattaatgtatctgtaaaagtttctttgtaaatactatgtgttctggtgtgtcttaaaattccaaacaaaatgatccctgcatttcctgaagatgtttaaacgtgagagtctggtaggcaaagcagtctgagaaagaaataggaaatgcagaaataggttttgtctggttgcatataatctttgctctttttaagctctgtgagctctgaaatatatttttgggttacttcagtgtgtttgacaagacagcttgatatttctatcaaacaaatgactttcatattgcaacaatctttgtaagaaccactcaaataaaagtctcttaaaaaggccacaggagatcttcatttttcaaatgttttaaagttacagaaatttgagaacagaattagcttcttttagtctcaattcagtacttgcctcttgggaaaatgttccgagtctgcggaaacttgccctcacgttgtcccccatgaattcctttattctattagagtctagccctgtgtattttagaagaatgtatcaaaactgaggggtttaccaaaaagaaaaggaaacagcctggccttaaaacctgggcattcttggtctcctgcattgtctgggcatatttatgaagaaattttcaccatttacaatacatacttaacaaaatggcttaacttcaaactggtttccaaaattgatttatatattaatatattaaataaggtgcatatattactgtattaaggggttttgagcttt

SEQ ID NO: 12682 - DNA, 1191 bp, Homo sapiens
tatatgtaatttatatcaagttatgtatttatttgcttgtgtatgaagtatttatgttttatatatgaggattatattgactattttgtccctgggcacatttttgttagaaaagtactaaattctacctcaggtggtctgcctgcctcggcctctccaagtgttgagattacaggtgtgagccactgcacccagccagttttcacattttctaaccacaatccccatgttctcaaatataaagctgtcattacttgtaatatcttttatttaaactaccacatcaacaagcctaatttgcgttagctagcgtcgtcatcatgtatgttgtgtttgctacttacagcttgcagtttctaccttagtattcagaagtaattattgaatatgctaaaaatataaatatatttttaagtatagtttgtattttaaaaattaaagcactgtctcctgtccttgcctcccctatcatgtagttttctgactcagaatgtgccaaaaaggctttggaacaacttaatggatttgaactagcaggaagaccaatgaaagttggtcatgttactgaacgtactgatgcttcgagtgctagttcatttttggacagtgatgaactggaaaggactggaattgatttgggaacaactggtcgtcttcagttaatggcaagacttgcagagggtaagtgtttcttgctattacgaatgatttactgtgggtattgtagtggaaaagaaaggtagccatgtaaactaagaaagggaaaaagattttatcttattttgtagttggcgttatccttggtcacactgcatattattttatagatgatgtgccttgtattaatgtatggaaatctatattatgtgttttgaatgccacagtataagttgcaagatttcttttcctttatgtagtgtttatatgtcatacttaggaataaatttagttgcagctattataatgttacaagtttttctttttgtaatttcttattttttgatgcagggtctggctctgttgcccaatttggagtgcagttgtgcgatcctggctcaccgcaacctctgcctctttggctgaagccatcctcccaccctaatctctaaatagctgggactaacagttgcaaacaaccaccaccacgcctggctaatttctgtggtggttttttttttttttttttttttt

SEQ ID NO: 12683 - DNA, 1175 bp, Homo sapiens
cacggtgaaaccccatctctactaaaaatacaaaaaattagtcgggcgtggtggcaggtgcctataatcctagctactcaggaggctgaggtaggagaatctcttgaacccgggaggcagaggttgcagtgagccgacatagcaccactgcactccagcctgggtgacagagagagactccgtctcaaaaaaaaaaaaaagaaaccagattggtctttgccaggagctggagggaaggaggaatgtggggtgactacttaatggctataaggtttcctgttggggtaataagaatttaccagaactagatccacctagttaagagttccaggtagtggtagcgatagatgctctggatcgagttgtaaagcccaaaatgaaaagagtcaagagattccttgagaagagagaaccaaaactcaatgaaaatattaaaaatgcaatgctgattaaagggggaaatgcaaacgcaacagtgacacaagtacttaaagatgtgtgtgcactgaaaaaaccatacggtgtactgtataaaaagaaaaatgttacaagaccttttgaggatcagacatcactggaattactttcaaagaagtcagattgttctttattcatgtttggctcctataataagaagcggccaaataatctagtaataggtcatatgtatgactaccatgtgctggatatgattgaattaggtattgagaattttgtctctctaaaagacattaagaacagtaaatgtcctgagggaacaaaacccatgctaatatttgctggtgatgatttcaatgtaacagaagattacagaagactaaaaagtcttcttactgatttcttcagaggccccacagtatcaaatatctgcctggctggattagaatatgttctgcacttcactgcactgaatgggaagatttactttcgaagatataagttgctgttgaagaaatctggttgcagaacaccacggattgaattggaagagataggaccctcattgaatctggttctgaggaggacacacctggcatccgatgacctttatacattatctatgaaaatgccaaaagctctcaagccaaagaagaagaaaaatatctccaatgatacttttggtacaacttatggaaggattcatatgtagaacgaagataagcaaactacaaacc

SEQ ID NO: 12684 - DNA, 2084 bp, Homo sapiens
cctgaagggtgtttagtagtcagcgttttcagaattgttttgttactatactttaacattttacatttcctgtttgtattattttgtgagagcaaggtgatcatgctgcttaaggtccaggtacaacctatttgtaccttttgagacaatatttgtgttacttttgcaggttacggttccacatgtaattgctatattttgttttgtttttccttactaggcaaagttaaaatgttccatgctttgaggagtgacccatttcactactttgttttcttatcactaaaggcaaaaatcaaagcacagttgtccattaacacttataagttaattatgggtttatgagtctgtaatgttatatgctgcaaacatttactatgtaaacgtgaagtagccaataatatctcaatagtagtaacagtatctttagcgacctttggaatagttaagcacaggtcattgtggacatgaattcaggcctctgtactaaaatctatttcagggaatgttctgtctagtgatttgctcaccatttgatatataatgaattataggacaagtataagctgatctgctatagctgtccatcagagagaatacacgtggctataacatctataacaaaacgacgattcctctacaagaggctgtttctcactgctaacgttggtgtttctggcgtgggaagaaatgcacaggcgtgcatggcatgcacgttcagacagctgcattgtaagagttctgtcatgcagtctgaaaagggaagaaacaggatggctttctgtagccacacctgtgaggcgtgatgattgttgtattattagattactgatttttcttttctgaaaatacatttgagttttaatcacatctgtggaagctgtaacttttaaggtagtcaatttcatgtcttgttcaacgatgtaagcagaaactgaattgccctaattttgccaactggccattattgggattattgtttaaatttttggtaaaggaagtaatctcctttcattcattgtgacttttgttcttagggaagcagagaagactccccaagttcttataacctcattgtgcttccctaatttaaagccatgttgaggggctccattcccaattcctgggtcaaggtgaattaaccctatgttggagcactggaaaccgttatttgcaaacattgctgttaccatttagaaatatgtgcactatcagctgggtgcagtggctcacgtctgtaatcccagcactttgggaggccgaggcaggtggatcacctgaggtcaggagttcgagaccagcctggccaacagggtgaaaccccgtctctactaaaagtacaaaaattagctgggcgtggtggcggacgcctgtaatctcagctacttgggaggctgaagcaggagaggtgctggaacctgggaggcggaggttgaagtgagccgagattgcgctattgcactccagctcgggcgacaactgcaagactccatctcaaaaaaataaaaataaaagaaaagaaagaaatatgtgcactacctaagttttgtctttagaaaaactatccacctataaaaaattaccttgacaaaaatagttccggtttgactaatcattttgtttctttaagtggtaagtgtatgcaaggtggatccttgatgagccaacattgcactgtggatacatatctatgtttacgcgctattagaacagaaggcgctgtatatagaaatgttgctttgaagcaatatttgcaaaacacgcagacttctgtatctgtatttggaaaaaataaaacaggttcttgttgctatgtttcagttacgtattgttgagttacagtcatgcatcatataacgtttctgtcaaccatggaccccatatacagggtggtcccataagattataatggagctgaaaaattcccatcacctagtgatgtcctgatggtcctactgcataggcctaggctaatgcgtggatttgtcttagtgtttaacaaaaatctaaaaagtaaaatatatataaaaaatttaaactagaaaaaaactcatagaataaggatataaagaaaatatatttgt

SEQ ID NO: 12685 - DNA, 1280 bp, Homo sapiens
tgttcgggtcaccaccggccgggcgccactcgaacgagccccggccagccgtcaccctaatcattcccgaaggaggggccatcagagctacagctcatcagggtcaatcagaaggggcgcccgcacgcaaaggtcacctgcaaaccgaagcggcgcacggataaggtccgggacttgaagtctatctccaaacattcaggctcctcctccgactcctcctcgaactggcgctcagaggcgccaccattcggaaggagcccaggccacgcgcagctcgccctcccgcaccgcgagggcagcagccgcctcatgcgactcgagaacgctagagggcgccgcttccgggagcccgcaagcggcttccgggtgctcgcgcgccgacctggacgcagagaagccagagactttcgcttccggctgccgcaggcgcttcgctggtgcaggtaagctccgcacactctcggccggtcccgagtccgactccctcaagggtgacgcgagctctgccctttaaccggaaacgtctccctgctcaccccacccccgcgcagacgcagtgctgagcacacagctaccggacaaagagtgacgcccggagctggagttatggcggctacggagccgatcttggcggccactgggagtcccgcggcggtgccaccggagaaactggaaggagccggttcgagctcagcccctgagcgtaactgtgtgggctcctcgctgccagaggcctcaccgcctgcccctgagccttccagtcccaacgccgcggtccctgaagccatccctacgccccgagctgcggcctccgcggccctggagctgcctctcgggcccgcacccgtgagcgtagcgcctcaggccgaagctgaagcgcgctccacaccaggccccgccggctctagactcggtcccgagacgttccgccagcgtttccggcagttccgctaccaggatgcggcgggtccccgggaggctttccggcagctgcgggagctgtcccgccagtggctgcggcctgacatccgcaccaaggagcagatcgtggagatgctggtgcaagagcagctgctcgccatcctgcccgaggcggctcgggcccggcggatccgccgccgcacggatgtgcgcatcactggctgagcggtggagctgcgggcggccagggccgggcgctctgtgcggactggggccatgatcgggcccgggggcctgagcctgggaccccaccccgtgttaatgaaaaatgagttttggcagcgcctgtggtctggtgt

SEQ ID NO: 12686 - DNA, 1631 bp, Homo sapiens
gttcagatggtctaaccattgttctatatgtgcattttagttaatattgtgtattaaaggataagtcttaatgctcaaagtatgttaaaaatagatgtagtaaatcagtccctttgtgaatgtccttttgttagtttttaggaaggcctgtcctctgggagtgacctttattagtccaccccttggagctagacatcctgtacttagtcacggggatggtggaagagggagaagaggaagggtgaagggaagggctctttgctagtatctccatatctagacgatggttttagatgataaccacaggtctacaagagcgtttttagtaaagtgcctgtgttcattgtggacaaagttattattttgcaacatctaagctttacgaatggggtgacaacttatgataaaaactagagctagtgaattagcctatttgtaaatacctttgttataattgataggatacatcttggacatggaattgttaagccacctctgagcagtgtatgtcaggacttgttcattaggttggcagcagaggggcagaaggaattatacaggtagagatgtatgcagatgtgtccatatatgtccatatttacattttgatagccattgatgtatgcatctcttggctgtactataagaacacattaattcaatggaaatacactttgctaatattttaatggtatagatctgctaatgaattctcttaaaaacatactgtattctgttgctgtgtgtttcattttaaattgagcattaagggaatgcagcatttaaatcagaactctgccaatgcttttatctagaggcgtgttgccatttttgtcttatatgaaatttctgtcccaagaaaggcaggattacatctttttttttttttttagcagtttgagttggtgtagtgtattcttggttatcagaatactcatatagctttgggattttgaattggtaaatattcatgatgtgtgaaaaatcatgatacatactgtacagtctcagtcccataaaattggatgttgtgcctacacacaggatctagaagaatatgtcaaactataaactgcttgtgattgtgaatgactttgttctttgcttgtgtttttcaatttcctataatgcacatactaacttttaaaaaataaaggttattttaaaagcctgtattaagccctcgttgcttgtagaatagagttagtatacgctacagaagcacaggttcatgctccttcatgcttgggctctgaggtatctggaatttctcatctttgactcctccctccattgcctgggtgttagccactgccacccaggtgctctgctgttcaggataaccttgcactttacaggttctgtggtttgctcaagccattccttctgcctgtaatgccctttccacagtttcacttggcaaaatcattcttcagagcccaacttaaattcagtatctccacaaagtcttgcctgtaagaacctgacactcccgagtgccagaactgaacgtcagaagatacggccttttttttgagatggcgtctcactatgtcactcaggctggagtgtggtggtgccatctttgctcactgcaacctctgcctcccaagtagctgggattacaagca

SEQ ID NO: 12687 - DNA, 1825 bp, Homo sapiens
tttgaccatctctaagcattacacgtgcctgtacttgtccactggattgaaggcagagaaggaagggaggagggaatgattcaaggccaaaatggccacatttagaagatacctcagatgataaccattgttatgtgtgtgcaattttatttaacagtgctgtgtatgtggtggacaagttatatgaaatatctagtctttctagatatttggaagtgcttgatgtatttaaaagtggtagtagaataacactttgtaaatagcttttaaaaactgatgggaaatgctgtttggaagtggaattgttgaaccacctgggaggtgggagggaagaaattgcaaatggtgttttgccattgtttattagaaaatttcagcttaatccattgtgtatatgttacatgcatttcatttaactttgctatactgtatatattgtatatataacggacaaattagtcccgattttataatatctagtctctagatattaaagaggttgccaatgtatgacagaagtagagttagtaaactaacacattttgtacactttgttaaaatttgtagaaaggctgtcttctgaaaaggacttttggaagtgagataacatcagctctaagtgacacgtgcctatatccatcaggttggtggtggagaggagttggaaggaatgaagggttctagaccagaatgttcgtatttagaagacactatcagatataaccattgttacatgtgtgtagtttattcaaccctactgtgtatatagcggacaaacttaagtccttatttgaaacatctagtctttctagatgtttagaagtgcacaaagtatgttaaaagtagaggtagtaaataacacattttgtagctatccttttgatatgaaatattgtcttggaaattgatcaattctctgagcagtacccattttgatatttgtgctggttcagggggaaggaggagcacaaagtgcaaagggctttctaccagtgtccagtgtgtttatgaggaggcacattgaccattgtcccttatgtctgcattttcatttactgtgctgtgtatatagtgtatataagcggacataggagtcctaatttacgtctagtcgatgttaaaaaggttgccagtatatgacaaaagtagaattagtaaactactacattgagtacactttgtgttaaaattcatagggaagacttcttaaaaacaagtgaaattgttaaaaccccccctaagcattacagatggcttatagctgtccacggggttggtagaggtgggaaagggaagggttctaggccagaatgttcctatttagaagacactcaaattacagtctgtgttatgtatgtataccatttattcaatgctactgtgtatataatggaaaacttaagtccagtttgaaacatctagtctttctaggtgtttaaaagtgtacaacggcctgtcgcagtggcgcatgcctgtaatcccagcactttgggaggccgaggcaggcggatcacgaggtcaagagatcaggaccatcttggccaacatggtgaaaccccatctttactaaaaatacaaaaattagctggtcgtggtggtgcccacctgtagccccagttactcgagaggctgaggcaggagaatcgcttgaacttgggaggcggaagttgcagtgagccaagatcgcaccactgcactccagcctggcgacagagcgaggctccgtttcaaaaaaaaaagtgcacaatgtaggttaacagtagagggcttaagtaacacccctctaagcatttgttttcagtacttcctaggagtggttgcattt

SEQ ID NO: 12688 - DNA, 1832 bp, Homo sapiens
gtagagacggtatttctccatattggccaggctgatttcgaactcctgacctcaagtgatctgctcgccttggccttcgaaaatgctgggattacaggcatgagccaccttgcccagcagtgtttttttttttgttttttttaattaaaaccataataacatagtaccaagatttgggaaaacaggaagcagaaaaaaattactcctgaatatgattgggagcttggagtgtttcctttcaccagttttcctttgctctttcttgcacagtcataatttctaccgcatcatcagtactgtcctgcatttttctcttaatgttgtatcggaagctgccttccgtgtcgttactgaggattctattaaatacacgatcaactcatcccttttcctgctcatggatattccggctgtttctagtttttgctattatgaataacagtgcaatgaacattgcataaaatgttcttcctgtatttcagatgatgatgtctcttggggtgaagacccaggaagagaatgctgggtaaaaggctgtggctgccttagaggctctcagtaaacttgccaaactgctatgccaacctttaacccccagcatccagggtgaatggcaggaactgttttttatttttctctctctctctatttgatttttaaaaatttctctctctctctctctctctctctctctttttttccccgagacagagttttgctcttgttgcccaggctggagtacagtggcatgatctcggctcactgtaacctctgcctctgggttcaagggattctcctgtctcagcctcctgagtagctgggattacaggagcccgccaccacacccggctaatttttttttttttttttgagacagaattttgctcttgttgcccaggctggagtgcaatggctcaatcttggctcactgcagcctctgcctcctgggttcaagtgattctcctgcctcagcctcccgagtagctggggttacaggcatgtgccaccacgcccagctaattttgtatttttagtagagatggggtttctctatgttggtcaggctggtcttgaactcctggcctctggtgatccgcccgcctcggcctcccaaagtgctgggatttcaggcatgagccaccgcgcctggctaatttttgtatttttagtaaagatggggtttcaccatgttggccaggctagtctcaaattcctgacgtcaggtgatccacccaccttggcctcccaaagtgctgagattacaggtgtgagccaccacacccagcctgttttttatttctcttaggtctgaagagcctgttccttgtgtgtagggactgctcccaactgtcctctgtccatgcattcattcatcctaaggcgggaggcagaatagggctgtggtgtcaggctgcctgggttcaaaccagcctcccctcttaaccaccttgtgtccacttcctcagctgtaaagtgaacatcatgacagggagctacctcacagggtccctgtgaggctttctgtgcatgaaagcatggaagacacttgaaatactacggtaagccaggatgacaatggtcaggcctagagagaggaaggggctgatctctcaccacctagtgatgcaggggcagagctgaggccagaatcaggcttcctgcctccagtgctctctttccctgatgccaggctactgctgtggatggtgtggtttatggcgtaggtggccctctgttcaagaatatgtgggaggggtggagggcctggatggatctataaggtggggtctctccctttcctcccagagccgtcaccttctttctggggtgct

SEQ ID NO: 12689 - DNA, 1161 bp, Homo sapiens
ggtgtttcgacttgacgtgagccgggatgctctaggaatctttgcaggattttagtctgctgaggagcatgacagaactgtgttttgggaaggtccttttggcaaccgtatgatccacaggagagggtggacgtgatcttacaggagaaaccttaactgtggggacttggagggctggggagggatcaagattggcactcattaaggtgtccctctggtagtgggtggttcgccaggttggagaaggaggagcttggagtgggtaaggccacagggtcaggaattctgtttcaggcctggtgagtttgagaagggctggtctccctttagtcatctggaagattgggtagcatcttttttgcacatctggcctgtttttcctttgaattatttcttttgaataaatccccatcagagcttcctctataatagcagtaaattgggactaagtgtccaacaataggaagatgattgggaaagctttggaacatccactggataaaataatacgcagtggtgaacacccacagaaaaactgcttgcagtggatggagctgtgcaattgcaaagctcttttgcatccttgattcattttgtgcttatgactgctctgcgacagaggtggggccggggctagatcctttctgtgtttgaagagaatgacgctagactccagtctccttgaaggcagagttgagttcacattttattcattgtttcgtcgcagcatgttgctcagtggtttgcaaatacttgtccgatgaaagaatgagtgaactaatcaagaggggaagtgacttgatcaaggtcactcaagttgtaagacatagtgcctgccatattcttgctattccctacttgccacattcttctcactaaccactcactatcttcgaggggaataggacagagaggttcccagtgaggacctggcacttgcatagaacagggtttaagtcttctttctgtttttactagctgtgaggcaattggcaagttaattaatctttcaaagccccagtttgcccagctgtaatgtggatagtccaagtacctggttttagggttgtcatcaagattgaataagttaaggcatgtaaacatcttggcatggtaactagtacatagtgaagtatccatgaacattagtggagatgatga

SEQ ID NO: 12690 - DNA, 1096 bp, Homo sapiens
ctcaggcctggtgttctcatctgtgcagtgagatcataagcatcccctgagagtccacgtgaagtgactgtggggctaagtagagatggctgcagtggaggccaccatgaccacagggcctagggcattgcttctggggcaaacccagcctgggatccatggagaaatcccaggctggagaggctctggaaccccggtattcctcccagcccagggctctgctctgctgccccgaggtttcaaaggcgggaaacccagcacgtgagcccgaattctgcagggaacgagggagcttcaggtcccggagatgggggttctcgccatctgctcattttctgcggtggccccactgagtcctgtgccccatccccaggtgcccggcggcggcggcgagtggagcaccacgctgctgtccccacgcgagacggatgccgcggccgagggccctatcccgtgccggcgcatgcgcagcggcagctacatcaaggccatgggcgacgaggacagcgacgagtccggcggcagccccaagccctcacccaagaccgcggcgcggcgccagagctatctgagggccacgcagcagtcgctgggagagcagagcaacccccgcaggtaggcgcgcagctccacccttacggtcccgcccagaggcaagccccgcccactacgagtcttgctccctgggaggagccctgcattaaaataagccccgcctgcgtgggagccacgccccctttgagccacgcccactcatgagtcctgcttcttgagagaaccccttcattgaaataaggcccgcccggcgcggtggctcacgcctgtaatcccagcactttgggaggtcgaggcgggtggatcacttgaggtcaggatttcaagaccagaatagccaacatggggaaaccccgtctctattaaaaatacaaaaattagctgggttggcggcaggcgcctgtaatcccagctactcgggaggctgagacaggagaatcgcttgaacccgggaggcggagattgcagtgagccgagatcgcgccactgcactccagcctgggcgactgagcgagactccgtctcaaaaaaaaaaaaaaga

SEQ ID NO: 12691 - DNA, 1146 bp, Homo sapiens
atccacccacctcggcctctcaaaacgttggaattacaggtgtgagcctccgcgcccggccagtgttgctatttcttaaggcacagtgagggaggtggctctccgactgaaacagtgggaaaggagagggtcacatggactgtcaacagagaagtggctttgagaaggcaatgtgtccctgatcctgacctagctgcttggaattctcttcccagctgcttctgccttgggagaaagaagcagaggaaaggagggaaggatttgaggctgggtgggtgggagtctttgagctgtttttatcatagcatacagatgagttgcccaatttagctgtgtggtttgacaagttacttgctggctgggagagggagtgggatcttaaccagccctcagcccttccactaatgagccttttccctagcttggcagtaccagcaaagggagttaagggagtctgcctttctctggggtcagcttcatccattcatgggggccttgagcccggccccactgtctttgctgtaaagcctgagccatggcttccaggttgtctgtggccccagggcacctgttcctcttgaggagtgtagaccgcctctcctttgccccctcaggcacctgggagccagcaggcatgaggcccgtgttaggcctcaggaccaagttcagcctggcctccaagacacatgcagggggctagcttcttgaggttgctgtgtcctccgcatccctcgggaaatggagtcacagccactcctgagtatttgaagctctgtttggccagcttataacctttacaataaaaaacaaaatgcaggccgggcacggtggctcacgcctgtaatcccagcactttgggaggccaaggtgggcggatcacgaggtcaagagttcaagaccagcctgaccaacatggtgaaaccccatctctactaaaaaaaaaaaaaaaaaaaaatacaaaaattagccaggcatggtggtgcatgcctgtaatcccagctactcaggaggctgaggcctgggaagtggaggatgcagtgagccaagatcgcaccactgcactccagcctgggcgacagaacaagactctgtctcaaaaaaaaaaaaaatgcagaaacaaattcattctgacctgataaatacagt

SEQ ID NO: 12692 - DNA, 1138 bp, Homo sapiens
gctctcacctctcctgctctccctaacccacttctccttgctggatttctaataaccaagctgggtttgggttgcgggtggtggcccaggcatgggaggctgggcaggggcgggcgggtggacagatgagcatttgctctgtgagaccagtcacccacgggggccatggctgggccaggacatggcgtcagctgccctgatgctggtggtcttcctggccccactgcagtaaacaggcaaccttatgaccttgtcctcgtgtgtgtgtgcgtgtgggcttgggcgggatggggcaagggctgagccaagaatgagatgggggctgtgggacccgcttcaggcgcatggtgagcagatgatgcatccgtttctctgtctcccgtgtgtccgggtcaaggcggcctctggtctctggccctcttggtgactcactccttcctgtccccaccccatccaccccctacccacagaagcagcgtcccctctcacagtatgtcctcccgacgggacacagactcggatacccaggatgccaatgactcaagctgtaagtcatctgagaggagcctcccggactgtacccctcaccccaactccatcagcatcgatgccggtccccggcaggcccccaagattgcccagatcaagcgcaacctctcctatggagacaacagcgaccctgccctagaggcgtcctcgctgcccccacccgacccctggctcgagacctcctccagctccccagcagagccggcacagccaggggcctgccgccgagacggctactggttcctaaagctactgcaggcagaaacagagcggctggaaggctggtgctgccagatggacaaggagaccaaagagaacaacctctctgaagaaggtgggtgccacatggatggtccttgggcaagggtagaaggtgttggcagctggtttcagctggtggccagcagcttccgaacttctgagtgggggtctcttaggttctcttcttgggctagtttttgagctcccttcttactttcttcgcattcttccatccatccacctatttaaccaaacctctttccagaaagggttgctggtgatagctgtttgttgtgcaggctgtgaggccacccacacctgggtttga

SEQ ID NO: 12693 - DNA, 1105 bp, Homo sapiens
cttttttgggtccctcccagctttaggttatgaagattttactcacaaaaaaaatcaacaaaaatcacgaaactagaaaactttttttttcctcttgctggccgtggtggactagatagatggacgtcggcaactcccggcccagcctccatactgcggtctttttactcgttctatctgatgagaactcacactagcttgtttacaagatgacgacagtccaagggcagccttgggcacctgccatgtccctcctttccccagctatccccgctctgaccttgattttcattcttatgtttttctcttttcccttcagagctcacacagtggtcaccattgtggcaagcggctttctgggtctcagccctctctgcggttgagggcccagaggacagagagatggacatgcgtcccctccctccccccgccaagtgctcacacacaacctcacgcgcacacacacacacgcagatggaggcgcctcactgggaggtgccccgccagccctgggcagtgtcaggcaggactcactcaccgctgagcagatgagggaagttttagtcttggcgggtggaaatgagacgaagccacagttatcacactccagactcctgcccttttattttctccagccccttcttccttcagcaaaatctaggactcccgagtggcttccagggggccgtcagtcctcagccgcgcctgtgtccggtgcccgaggggcgggcggcggtgtctgtatgtatgtgtacatatgcacatagaccttagagtgtatagttaacaaacgcccatctgctcacccatgcccacccagcgccgccgccgctggctctcggggcacctggcaggaggcgggtgtgtgaatagcatatatttttacatgtactatatctaggtgtgtgtacaagtgtgtgtaaaaatatataccttgtgtgtaagcagccctttttttttttggtctccacccccctccccccgccccgcactcctaagggcccatctgcccagcctctgagttttctgttctattttttttttaaccccaattatccttctctctctcctgcccccgcatcccactcccagggtgtcacgagcc

SEQ ID NO: 12694 - DNA, 1751 bp, Homo sapiens
tggtgtccactgctgcggaggaactgccttcagagaaggtggggctggaaaagggttagaagcctcctagctgggattgtctttgtttcacctttctttaaattagaattacagaagcccctgcccagtgaacagataacgattggtcttatgctcctccctttcccccattttttcttttgctgttttgttttttgttttttgtttgtttgtttgtttttttgagacagagtcatgctctgtcacccgggctggagtgcagtggtgcgatctcagctcactgtaacctccgcctcccgggttcaagcaattatttgcctcagcctcccgagtagctgggattataggcacccgccaccatgtctggcttttagtagagacggggtttcaccatcttggccaggctggtcttggaactcctgacctcgtgagccaccacgcccagcctcttttgctgtttcattgctgacagtgttcaacaatatgccccatctttatatatcctaagaaacactaatcctaggttattgctagccaaaatatttttgtcctgagtagtgtcactgggccaaaagatagatcaggacgacagcctttagttttcctgaaatcaccaggtcaggcacaaggagaaaaggttcctggatactgactaacttgggtgggtggatctagccaggagaaagacagtaacatgtgttctgtactttctgggaagatccctgaagccatcacagaggctccccaacttctgagtcgcccatctgttgctgtgggagtgtgaacggatcgctgaaggagagggagctttgctctctctaggtgggcaagtttcctgggctctctgtgttgcctccctctggcttcttcctcccgtgccctctccccgtgtgccccagggggatcagggatcctcaccctcctgaggcccagtggggaagaatgaacatggcttcatccaggttaactgatgctgccatttgcccagcctcttccatcccagccctgtcagtgagcccaggtctggtgcaactgctgcaggatgcctgtagtagggaactctggaagtgtattgggctgaggtgggattttccctccccacagtgcactgagcaatggagggtggtgagggagccatgctgctgaattctggttggcatttccccattatgtaaaatggggtgttgggtagggcagactctgcttgggtttggttgtaagataaacctggaggagaagcacagttgtcccattgaattatttgagcaaaaactactgtaaataacttttttgtcttttgtcaaataaaatttttttttgtttttttaagcagaaacagggttcttgattgatccaccagggctcagggcccaggcttgaagacaaagcagtcactggcttcttattttgctttacatcttttactctccctctagtagccagctgtgagttctgtgcacgctgtacccccattccctttcaccagctccattctgtatcccattcaactcagggtaaagggggcatttgcatctcacattgggccagtcttccctggaatcaacagttaagctctggggttgctaagtggtgaggatgtaaccttgaggaactggcaactttgtcctccccctctctcggtaagaaacaagcatgactgcagtgtgaacccggcacagagagaagcagctatgagatggaagctccagtcatgtctgaaaccaggaccacctgtaaacttctctattatg

SEQ ID NO: 12695 - DNA, 1420 bp, Homo sapiens
cagctgacaagttatagtattttcacattggtagtcgcagcacctgctagcagtgtaatatgctttacttgaatcatttccacatctgcacctcaattccctgggcctggggttgccatttggtaggggaggagcttatcaggagttcctttgcaagtgcaggagggcagtcctgggttctgttagtgacagcgtgatttcagtgaaataatttagaccccccaagcagactgtgcaacggatagcccctggagagtgccccgtgtttacattctcatctggcatttttgttttgtggaatcggcctgtgttaagccaggtgacctatgaacagtgcttgtctcctcactaggtcatttggatcatcttttacactgccatccattatgactgatggtgtacagctcccaagtgctccctatccagtccaaaggaccctcttgattacagcacaggaacttgatcgttggggaaccccagccccttggaacttggaagacccgtgtttcctggaccgcgaatcagtgtgttgggcatcagtgttttctgcaagggttgtgacctgaaactttttaaaaaccacccacctttggggaagcatttctgaatttatccatcaccaaccatttcttcttggataccatcaagtaacagctattatttgccaagtggagctgtcatttaatttgatgcacctctggattcagatgaaacattaaattgtcttcctcgattctccatcgggtgtagagtttttaaactatcaatggcatttcaagtcttctgaaacagcatggctgtatgtgcgtggtccatagcacagtacatgcagcatctaataagagtttccattgtagaatgttttcacatacttgaataaatcaaatctttaattgagaacctgttgatgatacctgataaagcctttcccaccccacctgtagcttgggaaccagtaggagcactggagggggtgcctcccaccccatccctctttcttcctctccctgatcccttagcggatccagcagacctctttctgtttatggaggcagcagggaaatcaagggctggatttggtgtaggctgtggtctccgtcttggcattgtggagagagggcttagcaccttctgatgcccctgcccagcactgaggtgcctggcctcactgcagtgtgctagacttaagaggtgttattttttattcggccacaagatggcaaggccagtgtgctagggaatggtaagccacaaaatgaaatagagatctgagagctaggctgggtgccgtggctcacacctgtaatcccagcactttgggaggccaaggtgggtggatcacctgaggtcaggagttcgacaccagcctggccaatgtggtgaaaccccatgtctactaaaaatacaaaaaaattagcca

SEQ ID NO: 12696 - DNA, 1420 bp, Homo sapiens; identical to SEQ ID NO: 12695

SEQ ID NO: 12697 - DNA, 1349 bp, Homo sapiens
ggcttaaccggggcttcatcttctagtccccttggttctctgttacagtaccatctgccagcatgactcggctcgcccgatcacgaacccactcaacctcgagtagcctcggctctggagaaagtcccttcagccggtctgtcaccagcaatcagtcagatggaactcaagaatcctgtgagtcccctgatgtcctggacagacaccagaccatggaggtgtcctgctaagcagatgctcctcccctggaccattgcaagtccatccttcaaatgaccactccataatataacatttcatccagtaaactggcctctactatctttaactcatgcatggccactgaacctctctctagtagcctggatttatcattctctctgcctgcccacccccttttttgtatagcccaagaaccacttccatgccatactgtaacattccaacatctttagctgatcagatctctccatatcctctcttgccagctttttcccgtgctcccccaactatgtatcagataagattctttgatcccgactctgtgtgtgcgagcacgcgtgtctgtgtttgtgtgtgcatagttctgtggttttagacacgctttcttgtagtgcttctgcaaaaaacaaaaaagggacttattttgcattctcaatggtgtttttaagggaattaggcagaacagatttctaggttgggtaggccactgcattctcttttgtttgcaaattggtcaacaaaatttgcaaagtgatttcaggagagagcagctttgaggaatgtggaaaatcataattgccgtctggaccattgattgattgtgaccagtagcagaagggtgcctgttacatagagaggctccttctgtccaaatgaatttctgtatactcttctataaataaaagggaggaatatattctgctggaagcccatgaaccatcgctgaggttctgatacaacatagagttttttccaaggagtgaatgtggtttaattactggactctcttagcacaggaaggtggaaacaaaatgccaggcctctgctctgaagagcaaaactgctgtcgctgcagtatctgataccagacatccacatatccacaagaagtgcctcttaggtctgtgacagagagtgtgtctccattcctcagttcccagaaaggggagaggtttggcctaaaaagcatgtagatgggggagaaatgggtggggggagaggaacagccattaacacagtatcatgtttaacaagtatagccttgatttcagtagatgtaatggaagccaaattaaattgatacagaacccatttctcagagtctttttttttttttgagacagagt

SEQ ID NO: 12698 - DNA, 1539 bp, Homo sapiens
gtgtgtcacaatgtccctacattaagttttcaataaatgttacgttatttcaattgaaatttattttttggcctcttttctctgcaggaaagagaagcatgcaacaattagatccctcaccagctcgaaaactgttgaagcttcagctacagaacccacctgccatacatggatctggatctggatcttgtcagtgactttatgagagtttctgccacaaggtgcccaagaggagaggaatgggaagagtgccccagcacgtggtgactgcgtgatttctgctcgttgcctttgaagataactggcaggactgactgtagaacactttgacttttttcaaaaagtgatggaatttgtacatccaaatgaatattgtatagacaattttcccaggaatgtgcaaaatgcttgaaagttcaaacttcttttttgaaatgatcttcagatccagtggcccattcttttatctttatcctgtgaaggtgtttttcaggttttgaaacaatccaaaaatcatttaggaccaagtctaaggaaacattttagtggccaagttggattccgattgtaaaggaatgatactaattttctagcatggctctgaaggtgattttaggtagaagagttttgaggctgggcgcaatggctcacgcctgtaatcctagcattttgggtgactgaggcgggtggattgcttgagcccagaagttgaagaccagcctgagaaataaggtgaaaccctgtctacaaaaaatacaaaaagttagctgggtgtggtggcgtgtgcctgtagtgctagctactcagaaggctgaggtgggaggattgtttgagcccaggaggttgaggctgcagtgagttctaattgcgccactgcactccagcctgagcgacagagtgagacactgtcttaaaaaaaattaaaaattgtaaaaaaatgaaaaaaaaagttttgagcattatttgcatcattgggatacatatgtcacttcacaagatgttcaatttgaaggaaataccactcattctctatgtcctgttgtctgtagtgtgcttcagtttttcatattgagttgacctaaatcctggattcatgacaagaaaggagtaagtactactattcattgttctatttgtttataatctgtattataaaattgcacataattaaaagctttcccttgtcttcatctatgttttgagtgtataaacaaaaagggagtgccgggtgcggtggctcacacctataatcccagcactttgggaggccaaggcgggcagattgcctgagctcaggagttcacgaccagcttgggaaacatggtgaaaccctgtctctactaaaaatacaaaaaattagccgggcgtggcggtgtgcacttgtagttccagataggagggtgaggcaggagaattgcttgaacccgggaggcggaggttgcagtgagccgagatcgtgcccttgtactccagcctgggcgacagagtgagactgtctcaaaaaaaaaaaagagggagggctgggcatggtggctcaca

SEQ ID NO: 12699 - DNA, 1203 bp, Homo sapiens
gcccttctgagatttagcactttctttttaacaactatacagtggatatgtgccataatttctttaactcaagacctgttgatccggtttcatcttgcttttttaagcaagcacattgccttttttttttttttttttttttttttaaagaaacagtcttgctctgttgcccacgctggagggcaatggtatgatcacagctcgctgtagcctcaaattgtagatggaattacaggcacatgccactgtgcccatagactgctctatgttatctcccttttggttcttcttgaaagagggatgaacagaggtcacacatgtgataggacagtttgggctgactcaaaaggtttgtgcacaaggcacacattcagaaaatcacttcgcacttacctactcattcatcctttcagcaaacattcattaaacggcagcagtgcccccagctggggctgggtctgggttgcagaggtgaatctaccagggtcccagccctcaggtgggtggttcaagcctcttagggagcgcagaggcctggggtgggtgtttctggcacccctcgggcccctccccatggtgatctttggtttgttctgcctgtgcctctgggtgcagccacctgacttcagggacctgccggaatgggagcccaggatccgagaggctttccgcactggtgacttggactctaagcccgaccccagccggagcttcaggccttaccgagctgaagacaatgattcctatgcctctgaggtgggtctaggcctgagcaagcatgggattgggtaggaggagagtgactgagccctgtcaaaagcagagtggtccatatatcacttagctggtgaggatatgggtttggggcattccatttggttccaggcttcttggcagccaaggccagaagggaaataaggaagtttgggacattctcatggcctgatccaaggaaacttataaactcatctgcataaattattttttcttctgtactaaattccactgggaatttaacaatttatgtaatttaatggaactactcatgtatgtagcaggaaggcagcagtctctatagccaggcagtttgggtttcaattgtggatccactctattctggctgtgagatcttggataagtcattttacctctctgattctcagttttctcacatgtaaaatgaaggtgcctcacagggttgtt

SEQ ID NO: 12700 - DNA, 1171 bp, Homo sapiens
tcagcatccctcttgcccttccctccctcctctccccacgctgcagctggagcgctgagctcatctgcgggcctggggcctgagctggatggacacctctggccaccaccctgagccccatgtgctggggtcgttctggggggttttgggaagttatcagaatgctgctttccctggcatcgtcttggagggcttgatggacccgagtggggagggggcgggcgctgcctaggagggtacctctgggacttccccaacttgctctgccagctccgtggtccatgccctgacttgcccctaccgcttggtgcctcattttccccttctgttaaatgtggcttttgaccagctgaatcctcagggcttttgagctcctgtggttttatggagcagaggggtattggtggggtggggtggggggtcatgaataaaaccacaggcctcagtgcccccccccaacccccagctctccctctctgctggtcctcaccgttgacaggacctacagaacctcggtggggcctttgcccagcatgaggagggcaaggtcacggggcggagagctgctgtgccacgtttgctgtgtggccttgggtaagttccttcacatctctgagcttgtttcctcatggaaaatggagataaaatgagtccctccctctagaggtttttgtgaggataaaatgaaataattcaagtgaagagagtattaaatactaggtctggaaataaacatgtattggttgtggttttctttttctttttttttttaaggcagggtctcactctgtcacccaggctggagtgcagtggtgtgatctcagcaacctctgcctcctgggttccagcaattctcctacctcagcctcccaagtagctgggattacaggcatgcgccaccatgtccagctaattttcgtatttttagtagagatggggtttctctgtgttggccaggctggtctctaactcctgacctcaggtgatctacccacgtcggcctcccaaagtgctgggattacaggtgtgagccaccatgcctggtctggttgtggttttcttattgctgagaagaactcacacagcaagtataagttcttctgagcaatacatcagtaggactactagtagtagtaggctagtaggactggttggtagtagtagtagacta

SEQ ID NO: 12701 - DNA, 1233 bp, Homo sapiens
gctgcgtgtcctggccttctttccccgggacctttttttttttttttttggagacgaagtctcactctgtcgcccaagctggagtgcagtggcgtgatcttggctcactgcaacctccgtctcctgggttcaagtgattctcctgcctcagcctcccgagtagctgggactacaggcatgtgccatcatgcctggctaatttttgtatttttagtagagacggggtttcatcatgttggccaggctggtctcgaactcctgacctcaggtgatccacccgcctcagcctcccaaagtgctgggattacaggtgtgagccaccatgcccggcctcatcaggacctttgatgcaacttcctgaaaactggaccctagcttcttcgcaaggatgctaagctagattgagctctggggtgggagacaggtgcccagagtcccccctcccactcagtgctatcccctccagggactgtgggattgtcccctgtccttctcaaggcctttctgtccctgggtatgaagggattgagtctttggtttccctcccctgctgctgtgcccagagtgtttgcatttgggctgagaagtggagctctgcggagttttttgcatatccttttttggggtccaagtgtgatgatctcatctggagccttgacagactcctgggggaccggcagaagggacggcagatggctgccctggcctcttgggtggggctggcatgccgcccctgtggccactgccggcccactccacagagcagcccttccggggctggggtgagtggcccgggcccgggcaggagacgagtggcccagagccagggtggcagatgggaggcagcccaggcctcggcctgagggagggaccatggtggccagggcagtatgggagcaggcgggccaggcggaggctcccgttcctctgtagtgtggttgctgcctcgcagagtgaaggttctgggcctctcagctcagctctgtcattcttctgggttggtctgcccgtcggagggcttgttgggcccctggaacctggggaggaggtggtacatttgggtaaggtttggaatctggcagggctgtggcctgggtgttgctgggctgggacttgagccccaccactggggtctgaagcacccatgggcattagcttcacagaatcaaggaattagattcaaacacaggagcgctgactagaagtagttttctgtaggggagtagaacaggg

SEQ ID NO: 12702 - DNA, 1191 bp, Homo sapiens
tccaactcgcctccgagaagcatccaaaagcagagtccagctttttaaagatgacccaatgtgaatgtctgtagtcagttgtttacaaactccctctcctgcacaattcatttagaggcttcaatcatagaattctgcaaattaatgacaactcatgctttaattttgtattttgaatgtacacgcatgctgaagctaagtaacttttaatcaaagaaataagatggtattaggcaaatcttactatactatgaaaagcattaccttgcctatttttaatattattaaagcctttctccttcagtagtctattttcttagaataacaactcttttatctattctgaactctattttttttcttttttaagagacaaggttttgctctgttgcccagcttggactcgaactttcctgggctcaagcgaccctcctgcctcagccccccaagtagctgggactaaagtcatgtgccaccacacccagcttactctgaacttttatgacagatgattgttttttgtttttaatgtagaaatgagacaagggtacaaattggaactagaaattgacattgtcattgacaaacatggctaaaaacaaaacatcaaatcctgcccccgtgaagagttccctgtcacctcaagtttgaggatagtcctctaagagtgacctaagcataagtgaaagacacctcccctcacccttctagccccctacaaggtgccaggttggggtaaagagttggagatgatggccaggagtggcctccaacacgctggtgagaggcctgattaggttttggggaagatctgagagctctggcctcttcgtgagtggaacataaagccgcctcttgttgggagatcctaccccagtgacagaggaatcccccaaactaggctgtgccctggctccgtggcggctccagacccgggtagtgcctttgtcccctgaatactcactcccccggtccagagggccttcccactgcccagcctggagaaggcctcccctgacctgctctctcagtatcctggagagctggccagaggccatcacaggcatcatcctcagagctcctcagacctgggactttgtttttgctggttcagtgcattttgtgtatttaagagcaaacactagccaggcgtggcggcgtgtgcctgtagtcccagctacttgggaggct

SEQ ID NO: 12703 - DNA, 1181 bp, Homo sapiens
agggagagctgcttaaggaagaggtgcttgagctgaattctgaaagtaaaaattaagccaagttgaggtaaaaacatggaaaaatgctgagcaggaaagaacctggcttcttagaggacagagaagaagccagagagcaacagatagcgggaagcgcgagggaggagatctggttgagaggctggcaaggtgtgaggattcaggattgggtttgtccttagaggcagaggacttacagacatctttcagatgggaatagtaggataaggcctgtgctttagatgcttggaggctgctgggaggactgtccttccaccagttgaagagcaggctccctgccttcccaaggcttctcctcaggttaaacccctggattccctcgcccttccccatgtgatttggttcccagatcttggtgtgcatcatcattgggactgtgtatagcaccttggaagagtgtagagtgtactgaatggttgtttccccccaaggttcaagcactgtcttcctgttggccctgacaatcatagccagcacctgggctctgacgcccactcactacctcaccaagcatgacgtggagagactaaaagcctcgctggatcgccctttcacaaatttggaatctgccttctactccatcgtgggactcagcagccttggtgctcaggtgccagatgcaaaggtaaggctgcttttgtcctggtggtcagggtggttcaggagaaccttcatcccctcactatattcctttggggtagttcaaaactaactcttgctcatttgaggataaccaaggttaatccaatataagaaatatttggccaggcgtggtgactcacgcctgtaatgccagcactttgggaggtctaggcaggtggatcacgaggtcaggagttcgagaccagcctggccagtgcagtgaaaccctgactctgctaaaaatagaaaaaattagctgggtgtggtggtgcatgcctgtaatcccagctactcaggaggctgaggcaggagaatcgtgtgaacccaggaggcagaggttgcagtgagctgagatcccgccattgcactccagcccaggcaacagtgtgagactcagtctcaaaaaaagaagtttatttcagtttgacagatctgtttttgtttttgtttttttgcctaatgtatgttaaggatcatac

SEQ ID NO: 12704 - DNA, 1219 bp, Homo sapiens
cctttttttaattatgagagtccattattgtgagtgggaattccattcctgtgattttttttttccttaagaaagtatagtttatgtttctcctaagtttttacttttcaagggttttaaataacctttttgtacagtttttgcttttcttctggtaggtcttgattttttcctttccatctgcctttaacacgtaaaaatgttcaaagtgtacccccacacgaggtttctggaagtcattttgttgaacataggagaaccatataagtagaaaggtaacttgtcagcatcttttcacatgggagtgttgtaccgaagttttgcaaacatttcatcctggtgtctggggattagagggggatgagcatgtgcgaggcggaggtgactttggcagctgctccgcattctgtctttgccatgcctgccacaaattgccaagacctgttctaaaactctgtgtctgccaattctttcttagatctctatttcaaatgagaccaaagatctgcttctggcagctgtcagtgaggactcatctgttacccagatctaccatgcagttgcagctctaagtggctttggccttcccttggcatcccaagaagcactcagtgcccttactgctcgtctcagcaaggaggagactgtgctggcgtgagttgtcatctcgagcatttctcaggcttcatttgtctcgggtcctatccgaagagggctcattcattggttcagcaaatactttctgggcaagtacttgcagtaaatacttccgtgtgccaggtgctctgcaaggcaccgcagacatgattgcatgaaggcaagtaaggtccgtgtcctcgtggagctcacatggacacagtcttctgcaagcctcgcagacagaaggcaagcgctgagccagagcatgagcacaccaccacctagagatccagttgccttgtgcggttggagggctagagcaagggcagataactgagaaggagccacgtgcatgtcttgttgaggcttggctagggcaggatgacatgttggcagtggaggctctgcaaagtgggggctctcaggatccctggaagttgtgaaagacagcatctggtgggtgaggtggttgctcagagggtggagtattctaggaatcagactctactactctgcaaaaggcttaggtgaaggagaagcacctttcctatttgttataaatggaaatattgtaacttca

SEQ ID NO: 12705 - DNA, 1125 bp, Homo sapiens
tgatggtgttctcactggatgcttcacaggcacgttggttgcctagtcatgttgcctaggagagcagtatgtctctctttgtcttttggagcattaagaaattctgggaaacgctgtgctttgtaggttgtattcaaatggatggccatggactccatctgtgtcatgatgcttcctgggtgcacagcagcctggcccactggctttccacccaaagcagctggcgtgttctgtgccatgactcctgggcttgggcctgcatacaaggggccaaggaaggagccctcccaaaactgcagaagatagtgctctcctcaaatgtctgtttgatatactttactctgcctaagcaccatttttgagaaagtatgaagtgactgagatggtcttcagatttagagtgagagatgtcacgaagctgtctgcagtggggttgacagtggttcgtgcatctcatttctgctgttacttgacatccagcatatttctgttttgttatggcaggaccttgttgctcgcctggatgaactcgggggcgtgtatctccagtttgaagaaggactggaaacaacagcgttatttgtggctgccacctacaagctcatggatcatgtggggactgagccatccattaaggaggtacctatctaacaattttcaggcatgaaacccaaaggggtcatcagctgtatctgctaaggatggcttttatcagagaggaatgttcagacagtaccttgggatgctgtcactcagtgtcctgggttagggattaagaatgagaaatagaaagatgtaatgcctgtcttcaggaaatgggttgctagtgaggtagacgtgtaaacaaaccatgcttgctttaaatggggtatgtacatgtcacgaggtagtatcaaggaagccacgtgtattactcctgtttcatctccctttcttcccagtacccttttctgcttgtcgcctgaatgctttccactctggtggctcattcagatccttctctgggctcacaattgcttctcctcccttcccccttatgctcagcaacggctaaatcttagctaatctttgctgatggacatagttcactgagaggcatgtgtgtctatcacacatccgccaaga

SEQ ID NO: 12706 - DNA, 1203 bp, Homo sapiens
tgtccaggaaaaaaatatagcattaaaaaaagacaaagctgaaagtacccttctttcttttgtgtctcctacctgccttgtctcgattttgctcacgtgtgctgctggcatcaatcctgtaattatttctccttgcggttctgccagcccggctctcctgtgtgcctgcagaggccacacgtgagctcctctggtgcctgactttgttggagttgagagccttaggtccttgaagtgaaagcccagaggtacaagcatctgtacacagcatttccccagatcctgctggaagtttattctgcacttttctcagtccaggctttatcagtccaatttgcccccaggttgcagacagttctccacatctgtctgtccacaacagaagtgttactatgggagagggtggttgaggcaatgaagtgaagtatatattttctgcctgttctcagagatatactgatcctctctgaagactaactctatatgcctctttcagggtgacatacccagccaaagccaagggcacattcatcgcagacagccaccagaacttcgccttgttcttccagctggtagatgtgaacactggtgctgaactcactcctcaccaggtcaggaagacacctagacagttctcttaacctgaaatgtgaatggatactagagtttacaatgtggtctataacatggactagagagaattccacgttcctgctttcaggttttgaccgaaccctgacagtccatcaggttctcccacatgacactctcacccttctactggttgtagtcctttacctgggatacacccttctttctaaaaagttagctggtattgaggagaggtacttaaggcagatttgcacttaattaaggtcattccttcctccctccctccctcagatggactcttgctctgtcacccaggatggagtgcagtggtgtgatctcagctcactgcaacctctgcctcctaggttcaagcgattctcctacctcagcctcccaagtagctgggatacaggcatgcattaccatgcccagctaatttttgtatttttagcagagacagggtttcaccatgttggccaggctgttctcatctcctgacctcaggtgatccgcctgcctcagcctcccaaagtggtgggattataagcatggcactagactcgaggctttttctttctgatttaaaaaagg

SEQ ID NO: 12707 - DNA, 1222 bp, Homo sapiens
ttttctgccttaaagttgaagaaatcaaagcacaaggaagttaagtaacttgctcagctaataagtagtggaagcaaatctgtcttccaagccgaggctctctccatgacactgggctgctctgcttgattagaactctgccttaccatcaatacccaagcctcctctactaaatctttagctggaggcacaaggaaattgaaaatgggcctcttacagttccacctcatttcctttcttttcaccctctggtgaagcagttaattgggcagcaaagtgaccaaaaggctggcgggaaaaagaaattgcagcaatagcaaagggcttaaatcatctgcaaactgggcagtcagcctccaactagtcgagaattggctggacccgtaagttaaatttccttccttgtaccagcaaaaagttatctctgagctgggaactagggtggcatggccactccttctactctctggggcaggtctggcagatcccagagctctcactgtgacaaagcgctaataaccgtctgctgcccggtggattcaatgttaggcccagggagaatcttgaaattatcagatgaaagattgtattattcttccatctagacatttgtccgactccataaccagaagactggccaggaagtggtgtttgttgccgagccagacaacaagaacgtgtacaagtttgaactggatacctctgaaagaaagattgaatttgactctgcctctggcacctacactctctacttaatcattggagatgccactttgaagaacccaatcctctggaatgtggtatgtgcctgaatgtaccccgacccaggtgagagtggctgtgccccaggcactggtggctctttttcaggggcatggggctcttcaccttcgccttgcctgtgcctcctataaataagcttgggaggtgaggcactgtgtgcagtctccataaatagtcctggggtcatgcacggggcttggcaacatggtacgtgcttaataaatattaagtgagtgaaggaagtataaactttgtgagtgctagtatctgtgaatttctataaacattatacaggaaggccgttttcatattatagcaggcactattggggttacgtagatgtgaaagttaaggccctggcctttgagatatggcatagctcatgggagggatgagatctgaattctgataacaattcaggatgatgtagaaaagtgaa

SEQ ID NO: 12708 - DNA, 1100 bp, Homo sapiens
ctgagtcccatttttgagaatctttctgtgttaggttagatgctgagtgtgacttggcaagaacacggccacacggcaggaatgtgcaggtttctgtaatgaatggtcaggatgtcatgttctaagctacagaagggccaagtgttggttggcagagctggagtctgggagattgatgatgagcattatttaaactttgctctttgttcatctaattgaaatttacactgtgtttttggccttgcactgtgagaggtgtgcctggaattacctcatctccttatgttgtcacataccactttcttagttattattgagtttgttttgttatttgtatttaagttgtcatcagcttaattatgaactagctgtctcacattcttttgtaaaatgagatggggcatacataaatagacttgggagataaatgattattcccttataaatgggatcttagagcgggagagtaccttagtctctctgttgtcaccagttaggaactgtaactgtgaactgaaaccttcagtaattctgtgtttgtctccattttctttcagaacagcacattagttccagaagaaagatggaaattctgaaaactgaatgtcaagaaaaggagtcaagaacaattcacagtatgagaagaaaaatggaaaaaaaaaactttatttaaaaaagaaaaaagtccagattgtagttatacttttgcttgtttttcagtttccccaacacacagcagatacctggtgagctcagatagtctctttctctgacactgtgtaagaagctgtgaatattcctaacttacccagatgttgcttttgaaaagttgaaatgtgtaattgttttggaataaagagggtaacaataggaacaaaggcctgattgagagcttattctcatacttttgggtggtggggtccttgggtatatgacatgaggacttagttggaaatgctgttgatgccagcatatttctccaggcctttcttggtccttcttgccccttgctcctaacagaactgagaactgcctggaaaggccagcttccttttttcttctccagcagtgagcaccagctgtctgcataggagccctgt

SEQ ID NO: 12709 - DNA, 1561 bp, Homo sapiens
ttgatccatctaagcaggactctcctttttatcacctcacaggaggctgaaccgtctgagcccagaagtgctgaggtgacgaggaagcccaaggctgctgttccttctgtgaacaagaggcccaagaaagagactaagaagaagcggtagaagaggaggcctgaggagctgggcgggcagggagagggtcttggggacagccctcctgggaatctacattgtgttcccccgcattccaggctcagggtctgaggaggctgtgacgccctatgaccgcagagatctagacagtcgtaacagtccccaggctccagctgggcaatccaccacttcctcttccttctgcttctgtgacggtttagagtcaagggggctgaaacacactgtgagcatagactgtattaggtttgttcagaagccgggtcagctcacagagtcacattttcttgcttagtcatgtgtccctccttgagttgccccctccttgtgggtttacactacatttgggagtcattgtctaatgctgacaagcacaccctctcccattatttgtgcactacagatctcctcctgatcagtcacctttgttgctgctgtgtagacagagccaggcctcacctgtttgtttaggccaagatgccatggacatgcagcgttagtgatcccactagctgtgacagccaggcccagaaaatgcctggcgtgagagccagcagacagccaggccagggtaggcagtgcctgcttctgctccatcaggtgcaggggatttggctgaaggcgtgcatatttcctgggcacaaacttcctgagcctctgaaatgggaggctcgtcaatttcagaccaacctcttttcaacccatcatagcacgttcaaggtgtgccttttacttctacctgtacatcccccatcccttcaattctttcattccctgaccagtgagagggttcctgggggaagtatggtgaataaactgacatgcatgcttcagaacctgcctgtgttgtcttttgctgagggagaggggaagcctagggccctgccccggggatgagggaaaggcttgacccccagagaagtgggacagtgggggtgaggatggccagaataggatggcttcggtaagagcagttctgcaggctgagccattctggaagaagttttcaggaaggatccggctaagtgcttcgtgtggcccttagtcactggaaacacttgtgaatggccgtgggtgtgttagagtttccactgggtccaggccccactcattccccaggttccttctgaggaagatgctgcttgtcttcaaagtggcttgagaaaaaccaagtgcaatacagtaaaaggccttacgtggcattggccaggtctagtcacttgccctgaatcagctgctgaggaaaagccctgacctcttggtaactcggatttgcccagctcatttacagcctgccagacagctttcccaaatgccaggactgatgaggatcttaagagatgagcgactatcatctctgttttggagatgggaaactgaagtccagactactttgagaatg

SEQ ID NO: 12710 - DNA, 1280 bp, Homo sapiens
attggtcccattttccggttgtaagtactaagacccaggaagggaaagccacttgcctagggtctcccagttgccaagtgacagggccaggccttggctgtaggctctggactcctagtccagcagagccactgaaaaaggccaccacttccctgctctgggccttttgccggagcttcatttcctgcctcggtgtgtgtccccacatctctatctcccttcggattcccacaaccctttccttcccctccatggcccccaccccttatctccgtgggaaacccctctggcttccccttgagctcctgggggccacttcctctggggagcctcagtttcttcatgcctgaagtaggatagtgagtcatggttcccaggatgtcccaagaggacagaaataaagtgcttagcacacattagggactcaatcagtggaggcgggggagggccaggcacctgctcaagtcctgcctcctctggcagctgatgccctgtcctgtgattcagtttctgaagctgtgaaatgggcctagggcttgtacctggtaaggctaacaagaggatggtatgaggctgtaccttaggtccccacctggtggctggctccgtgtcgctgttcctgggggagggagacccagtagaggcctcccctgtgttcaaggcctcattccctgctgtttgtccaaagccaagtcacttagtctctctaaacctcagcctctgcacacctcccttgtgaggattaaatcagctaatgtattccccgtggctcaaatctactgggtgcttagaaaattttatatttttctttccccattctcctccctgttggggactcagatattatctagtttagggaagcttctgggctttcatccccctggcctagagtgctgtgttgagaagcattctgaggctcagtgttggcttcatgggaaagagtgctgtgatagattagtcatgtctgccatgggcacaggataagagagtattgtatgtgtgccatgagtttgtcattcttgatctattctgaccttctcctttcacagatcggggggattgaggctagaaagacccagggcaaatcatctacgctgggagaaaaatgcagagctcttgtcttcgatccaggactctccccagccagccagcctcctccttcccacagtacagcctggtaaggctgagtcagggatagatgaccggggaggatctcagagctgggagccagacctccatctccctactccttgctctgggtccttgggcaagtgactttc

SEQ ID NO: 12711 - DNA, 1141 bp, Homo sapiens
ctgtgggacctcgggcctcagttgtcgtctctgtaaaggtcatttagtcgcttagcagacgtgttcatgcttgctgtaggcagtggtcaacaagcctttttttttttcatttaatcctcatcacgaccaggagtgacgaggattggctgttattcccattggacggatgagaaaactgaggctcagagaggggacttgggcagcaggcaggacctggcactcatctgtgtctgggtccgctggggcctctttccctggtcacctcgctttcctggctgcatcggatctcgtgcctcccctttgacctttgccttctgccctctgctctgtgccctgtgctccctactcccgcagagcactgctcctgctttcgatgccaacagcatttactgtgaactgacctcacttgcctgaagaagtgtggggagggtggggaaggggtggttggctctccagccccagagtgctctgtggccctgggagggcatgggtggcacctgagccaggctcccacggttccgcctgcagatcgcctcaggcatggcgtacgtggagcggatgaactacgtccaccgggaccttcgtgcagccaacatcctggtgggagagaacctggtgtgcaaagtggcggactttgggctggctcggctcattgaagacaatgagtacacggcgcggcaaggtgggcaggggctgtgtggtatgtcgcgcttggcctgggacaggtcacgtcccgctctgagccccagttttttcctcagctgtcattcctcatggtgcttatctaacagagcggtcatgacaggaggtcagagctgccctgacctttctcgttcctgcaggtgccaaattccccatcaagtggacggctccagaagctgccctctatggccgcttcaccatcaagtcggacgtgtggtccttcgggatcctgctgactgagctcaccacaaagggacgggtgccctaccctggtaagaaggtcctcatggcctgtctgtggtccctgaatccctctgccctggtggccttgggcaagtcatgactcctgctgggcctgtttccccacccgtaaaacaaagaagttgagcgtctgatgttaggctctctcgatggtccatgctctcagcttcggggacag

SEQ ID NO: 12712 - DNA, 1156 bp, Homo sapiens
acatggtgagcctagccctgggacatcaggagactgggctctggctctgttcggcctttgggtgtgtggtggattctccctgggcctcagtgtgcccatctgtaaaggggcagctgacagtttgtggcatcttgccaagggtccctgtgtgtgtgtatgtgtgtgcatgtgtgcgtgtctccatgtgcgtccatatttaacatgtaaaaatgtcccccccgctccgtcccccaaacatgttgtacatttcaccatggccccctcatcatagcaataacattcccactgccaggggttcttgagccagccaggccctgccagtggggaaggaggccaagcagtgcctgcctatgaaatttcaacttttcctttcatacgtctttattacccaagtcttctcccgtccattccagtcaaatctgggctcactcaccccagcgagctctcaaatccctctccaactgcctaaggccctttgtgtaaggtgtcttaatactgtcctttttttttttttaacagtgttttgtagatttcagatgactatgcagaggcctgggggacccctggctctgggccgggcctggggctccgaaattccaaggcccagacttgcggggggtgggggggtatccagaattggttgtaaatactttgcatattgtctgattaaacacaaacagacctcagaatctgatcaacagtttattgaacatctactgtgtgctggaaagcgagatggggcggaatgcgagaacaaactaccccttgaggggtctttgggcagcactagtagctggagggcttcaggccaaggcaggggtgacatcagattggagacagctacggcagaatgtggctgtttgtgaacatctgcacctgtgttagggggtgagcacctgggagaaggacaaggcacatcacaggacttccctgagcatgacaagttcaggactcaaatgtccgtggtggatggtagcagtgacattggggagtgggtggggctgtcaagcctgcctagaggagatcacaaatacacgacgagaataccgttgtgtgtgctcttcgtgtgtttcctaggagtgcagggcaggggtgctgggtcgatccacaaaagtcctgaaaacgctgaagaaaaatccaaagacccttcccctcc

SEQ ID NO: 12713 - DNA, 1259 bp, Homo sapiens
cgcgccttggggggtgtttatgaggaggggtggctgggggcgctcctcattcgccaggagaggaaaaaaataatccatctgctctttccataccgacccccgcctcctgagttccatcttagcccccttccagaagattccgccgtgcttgcttttggattttgctttaaaatggaggggtaccacgactctgggtagagtacagggcgagaatgggggtgcaggtctcttagtgtggcgcccttctccccagtccctggcctgcaaatttgagctcagtctccggtgccactccaaagcctaccttggggatggatggaaaaccgaaattagggaggggtcatctgccccatagagcaaaaaacgtggtgcccctttcagaagctttggcataataggcccgtgctcggcgctcttttcctgatactgaatgagttttaagcccaggtcctctgcttcatgagggtgcctgagcgcgtaacccgtctgattctttacatctctcttacggtagcgaggagatgagaatctgcggtggaggtcgctactgtagggagctgagccagagcactgcgctttgggcgcaaaagcagtagtcacccggtatctgtaggagggatacaggaaggattggcgcccttcgtatgcacggaaggaatgagctctacggagaagtggttggaatatgcttggggatagttttctgctggacaggtcgtttcgacctcagtcttccgctcccctcccccaagccctggtaggtcggccttagccagtggggttctttgtacccgttgcgctgtgcggctggatcaccgaacggggttacgctaccgctaccggagggttgtggctaccgcagccccgtttccaagtgaggcgggtcccttttagaccgccagtcttgtgggtccctcgcacagcgcggattttcgggcgggaagaccggaatgcggtttgtgagtgtggtccccgcgcaccggtagccagccgaaagcacctctttccagcaagctgcctggcccagggaccaactggcatttgcccctatgtggatagaaaattaattttcattaaaagctcccagaggtcaggttctatacagtgccagcagcagatggaggtgtaatgatccaaacgagttcagtttggacaaagtagcatagtgactttttttctacattgactttcggagaagttggcagattctggcaaagtgacgctgggctgtttgaaaaaggcaagcttagcctaggctg

SEQ ID NO: 12714 - DNA, 1192 bp, Homo sapiens
cccctcaaaagctccgaagggagggtcagccttcatggagaacacatgttggtatgttcatgattctgtgggtttagtgtggaaaaccacagaaactcccagttttgaggcctgccaagatatggggttcagaagggaggaggtgtgggcattgcctgctgatgagtcacactggggcgagaggagacctgcctcaccttcaggctatggtagcagctatagccacccagcctaagaaagatgaagtctcagattgcacatcctcttcaagtcctgatgagtcctgattgccactgctatggcagtttctagcgtgttagggttcactggcatctcaaaggccctcttcgagagggaaactggagatgaagggtacaaggtgacatgtccaggttccctaggctgattgatggcaaagtcaagaccagaaccgggatctgcacctccccacccctataattctctgataccgaatgaagttttagatgcctttagaggtgctggtgattgggctaagaaacttaagggcttgcttaggggagggaaacatgatcaggcttaagggggcaaggtactttgtgcttcagaagtatttgtgacagctgtgactaagggattcgaagaagtggcaggaagagagatttatggccctccaactccctcccttggtgttgacccagcaacaggtgtgtagtgacagggacacataaagccagagacaaggctgaacaggcggcagggccatttggtgagacagtcagctgaccccgtgtagaaagagccctgactcactggggagtgggagaggaagacaagtccgaggccgagcactgcccaccctgacgtgatggcaggggagagcccagggccacggacctggtaagcattcctaagaatacggaggctggtgctgggaaaagcagaaacccagtattggggagagaggtttctggggtgaggtggggccaggagaccctgcagagtagcaaggccaggcagattgtctttgtagtggtcctggtggatgtggggcctgcagcattaagctgggtgaagaaggcgccacgctgcacctcttatcccatactcattgtctaagccactgtccaccctgcccactactcatttctttggggctcctggatggagacctgaagtaaggctttgtgttctgaaatcacccccttggtcc

SEQ ID NO: 12715 - DNA, 1216 bp, Homo sapiens
tctgttctgaaagatagaatgagggtgatgtgcataagagattgtgcagctgaacagaaggaacaccgagtcggctgcaacttcagggaccctgccttggttcagcccagggacctcggcccagtcactaacctcctgatgcctgcatgtggcagcagctggaccatagtatttgtgtttgctcagctagctagagtttaaagcatacatattttctcaagggatgttaggaagattcaagaaatgatctatgtgaactgctttaagctcttctcttttttttttttttaacaaaaatgggagggaaatcaagatattaatcatattattcatccaacccaagattcctttgaattattccccatgtaatctgtatttatgggtagaagcagccatgccttgggagcagagacctccaaattcataactgtcagaatcacaaaccatgggcaaggaattaacagcagtaattctattttttttttcccccaagcagagacctagatgaaatcgaattaccaagcattctttagctctcttgctgccttggcaatgttcactcaccaggttggaggctgtttctgcaggttttacgtaccctgggaagcaagtgtggtgactttcttcgcagccggttctgcaaagatgtcctgccaaagctggctggctccctagtcacccaggcccccatcagtgccagggctggaccagtttactcgcacacgctggccttcaagttgcagctggctgtcttacagggcctgggccccctctgtgagagactggacctaggtgggtaccaggcagttccacctgaacacacacacttagcatctgtctcacccctgccatcatgccctctgctcagtcgtgcccccctcccctcccctctgtgtacctccttccgtcttattttggcctcatttgtccatttatcttgatgtgttctttggcgggatggagtagagagcccagagcatcttgcctagctgttgcagtttctccagacacagttggtcactgcttgtcccaaatgaagtgtaagggctgatgcttgttttgtttttcttttctgcaggtgagggtgacctgaataaagtggctgatgcctgcttgatttacctcagtgtcaaacagcccgtgaaattacaagaggctgccaggaggtacgtctgcctgatcacccgcatccctttacgtttgttctaaattacag

SEQ ID NO: 12716 - DNA, 1128 bp, Homo sapiens
atacctcagttttaaaaagatgaaacctgaaggtttaaatccaaactcctgaaggttaaaatccgaactcctgaaaatagtccacagattcctattccttcctccctcaagtcttgcctcgagcataattttcttgtgagacccatcctggcttcctcaggatatgacttccacactcaggactgtaagcttaggcctgtcctaatcctgaagagactttattgtaactgtacatgtacttccctcactagacagggggctcagtttcattgcacccctagtgccttgtgcagtggctggcacatagaccccaggtaaatgtctgttgaatgaatgaatgcaagttcacttcatacttgctttgaacttgacatttttactgaacagtttccttcctccagcctgcaggatgtttcctcaatgaggggaaggctgctgcacaatggcagtttttgatactcctgaggaggcctttggtgtcttacgtccagtctgtgttcagctcacaaagacccagacagtggagaatgtggagcatctgcagacacgactacaagctgtgagtgacagtgcccttcaggaacttcagcagtacatcctcttccctctgcgatttaccctgaagaccccaggtcccaaaagagagcgtttgatccaaagtgtggtggaatgcctcacatttgtcctttcttcaacatgtgtgaaagaacaggagcttctccaggaactcttttcagaactctctgcttgtctgtattcacccagctcccaaaaacctgcggctgtgtccgaggagttgaaattggctgtgatccagggacttagcacattaatgcactcagcttatggggacatcattctgactttttatgagccctccattctgccacgtttaggatttgctgtatctttactgttaggccttgcagaacaggagaaatcaaagcaaattaaaattgctgccttaaaatgtttacaggttctactcttgcagtgtgattgtcaggaccatccaaggtcattggatgaacttgaacaaaagcagctgggggatttgtttgcctcttttttacctggaatctcaactgcactgaccaggcttatcacaggagactttaaacaaggtca

SEQ ID NO: 12717 - DNA, 1194 bp, Homo sapiens
cagaattaaaataattatgcagtggttagaactggaatgattcttgacatatacatgtatgtgattgtgtttatacatgtagaggtgttggtgtgttagaattgatgagttgcagtgaatttatttcctgttttaaacatctggttttttaaaatcatttttctatctttaagagttctgatccacttttaatttccagcagaatgtctggcattttaattaacgtcttcttaaaaagcaagctatcacaactgataagatggagttttgataattttctgtctgtaaaaattggccattgacttttggtcctatttgatttcaattatggcatgatccctcccactgcacgaagaatgtagtttgtggtcaagttttgggtatccaggtattacaatatgtaccttatttggttttaaatgtgtaaatcatttagtcagttgttgatttcttttttttttaagtaggtctgtcctaattaaaagcaaaaaatcttaagcttatatatatcttttcatcttttctgggcagagaggcagatgaaggctgtaaaaaacctttagaaagattgctgaacatctggcaagaacgaagtgtgtatggcggcgagttcatacagcagctgaagctgtctatggaggactccaagagccctccccccaaaggtagaaacatcaccacatgtttacagctcttggtctttgcctactttcgaatcaaatatgaaaagctgcagtggggtttgctgtgaaccaccagcgattttatgattcttcagagagacagatgatcatgaatgatggtgagaatttatgtagtgctcacagcgtgtaagcctggttctagtattcatgctattcatcctctcacaccctgacttttgctctctgttctccttggcttgcttctgtctttcagagactttccttgcacaaggaaaggaacaacaaagttgttcagagttgtggtgaactaggaagtagcctggactaagattttgtccttgctctgccattaactacaataggaccttggataagtttcttagctttttaagaacttgatttaattaaatgtagatgtgcttttgaaacatatccttaggattgtcagcatggtgtctgtctaaagttgattgtttgtttgttttggagacagagtctcaccctgtcatccaggctggagtgcagtggc

SEQ ID NO: 12718 - DNA, 1730 bp, Homo sapiens
agagggcaagtcatggttggaaataaccttctagcccctggttctatcccttcttccgcccagccccccagcctcaagaaagaacctcagactctgattctcctcttcagcctctcatcttgagcacagttcagaacagtggcgactggaatctggtttatattcatatttgcaaagactacagactttttctcccacttcatattttcatgcccccctgttggttttccattcttaactgtctccttatacctaagaagttatgaaaatcatgtgtacttctggaagctttcgaaagaatcttgtccctcatgacagcattttatcatgaaagcagcttctcctttctgggctgggcttgttcaagttcggtgtgggcttccactaaggcacttgtcctggagacgttggctttcccagctgcatctgccccaaaaggttgtaggcacagctgtcgtagcgttgccataaagagtttgccaaatctctgatcctccctttccattgcttctcctagtgatgcacgaagattaggtgcatttattttgtaaacagattggagaatctagcaataagattcaaagctaatctggagcataaaggcacagttcagagacagaataacagggatcacaagcatgaattaaaaggaatttatttgcttcaagttcctagatacaaccttcccatgctgcacttctccactgtcggagcacgttccgaaaaacagaatgccttgatccctggtgggtgcgaaggcagttgttagggatggcaggcattggtgggctccaaaagatgaaggccccacacacaggtgtgctgcatttgggatctgtgtgggtgtttcttggaccctttcttctgggagtagggtacacactaacgtttaatccgctgtctgggtgcatgtccacagtacggtggctaaactcgaacatcactgcaaataggacgctgagcaggtccgtctgtcatgtcacgccactgcacaggtccttgtccccacacgacggggagtacttgcgtcagatgttattgaatagctcgtctcgggcaggggaagcggggagttggggatattaattgggggttttaattctattatcatgtcagctgacattatgactatataatgtagttagagacaatttttatcttgcttatagtaaaggttcagcctgccaattgtaaatcattctaatttggcaggcttatttttgacattggaaagggcagaaagcgatttgccccagtagtgtaataggagttatagaccagaggctgaaacccaaactatataaaaaggaattcagtggagggggctttgtaatctccattaatttgtgttgctacttccaggatcaccaaaaattacatgtaattttacatgttaaacacattgaaacataacctatgtttataaagcataacgggcttcccttccagaagctctcctgcttgtcatgaagtgagaacaatgaaaagtcatagcagatactcagtttaactctgtgtagaacctagtagtgtttgagctgttattcagatttgaattcagactgtgtgttgtttgcttatggacactgcctgtcgttctgtcactgttaaattaatgagtctataaggtttttcttccagaggccataggtgacatcactaaaattgcaagataaattgtaatctttgctgctgctgcactccccaacctctcccccaccccccgtggt

SEQ ID NO: 12719 - DNA, 1203 bp, Homo sapiens
tgattcttttgttttgttttcagacggagtctcactctgtcacccaggctggagtgcactggcgtgatctcagctcactgcaacttctgcctcccgggttcaagtgattctcatgcctcagcctccccagtagctgggattacaggtacatgccacctcgcccagctgatttttgtatttcttttttagtagagacagggttttaccatgttggccaggctggtcatgaacttctggcctcaagtgatctgcctgcctcggcctcgcagagtgctggtattacaggagtgagacacggtgctctgccgattcttatgggtatgattaagaagaacatcccaatcacagcctggaatagaacactttcgtgatacaattcacaacctccttctgggaggacatgagcattcctgataaatgctgaagcaattttctgataaactttaacaagattaaaacctctttggggaaattagctacccaaaccatttggatgattatcatacattctttgtcttgtattcagtttaataatgattatccaaccattctcttttcctttgaaatatccataacaaaagggaactactgacttggctttgtgacaagcttaaaataaaacttcaacacatgcttataattaatttttgtgaaaaaatgtaaaacagtcattatagagataggacataaaaatagtagctaacacttattaagtacttgttgcttgtcacatgttatattaaatgcccaaaaactctttataatgaattgggttataatacctctgtttgacttaaaagatgctgatacagtttgaatatttgtcccctccatatctcatggtgaaatgtgatccctaatgttggacatggagcctgctgggaggtgtctgggtcattgggatagatccctcttaagtgacttggtgccctccccatggtaatgagtgagttcttgctgttagttcacgagagagccggttgtttaaaggagcctgcacctcctcctctctctctttgctccctctcttgctatatgatgcgcctgctcttcctttgccttctgccatgatcggaagcttctgaggcctcaccagaagctgagcagatgctggtgccatgcttgtacagtctgaagaactgtgagccaaataaacctcttttttaaaatttaatttaatttttttttttgagacggagtctt

SEQ ID NO: 12720 - DNA, 1123 bp, Homo sapiens
tccaccttggcttcccaaagtgctgggattatggatagtaagtccaggcctggccgacgtgtggatagtatcacacaatccctgacttcctaatccagtgaattctcaacatttcacccagagttgatcttccatctcattctcttatgagggaagcatttgagtagtggttctcaaactgtggtcccagaaccaggtaccatcagtattacttgggaacttgtaagaagtgcaagttcttagccctgtcccaacctactacatcagaagttttggatctggagccagcaatctggcttaacatggtctccaggtgattcgtattcatgctaaagtttgggaaatcaaaccatgttagaaatctttgggaatcagaagcagctgctgcaattctaggctgcaaatctggtcactgacttgtttccaggtctcttagtttgggcccttcctaagctgctgtcagtgcctcccctctcaactcactcactgccctattttgtccctgtattcgaaagtgatcgtgggctgcctttgccctggtcattgatagtgcagggagaggaatcaatgaaagcgcttccccgtgtttgaagggtccactcctatcccttccaaactctggagctttcgtacatgcctttattctcaccagtgatgttacctcctggtacctggttgtcgtgccagacccctgtttacctcattagggatggcaccaggttcaacaggccggagaagagacctggagccagtgaaggaaacagggtttatctggggaacttgagggcagtcagcagtctagtggtggggggctggatgggggcacctcatccacttgtaaaatgcatgcagattatatagcaccttcccccagtaacctccacatggcaaccctcgtttcctaagaagctattgttacatgcatctaccatacactggtgctgtatggttcattgagtgtcccttgtgcctagcatgggactcagaggctcctgtcaaaggacagtgaagcagggacctgccacactgagtttatgtctctgagctagttttggagccacagtagtggttaccccttcctagagctccccccagaagctctctctgcctccccatcacactc

SEQ ID NO: 12721 - DNA, 1111 bp, Homo sapiens
aggatgtccatctggggtaatgtgtaaattgcagtagctatttttcttaacgtttaagcatcattctgtagggggaagaaaaaacagaaaagaaataatagaaaagccaaattctgtattatatatctgtatgtggatacagatatatacaaatgtactctgctgatcaaaaattcagttgaaaaatgcttcttgtaccatctgttaaactgacaatgccactgtaaattaattgtaacctattttcaaagaagatttcagagagccctttttaaaaatattaagacatagttgctaaacaaaagcacttattggattcaagtagctatttaatgacaccaatatttgatctttgtgtccagggtcccatgagcctacgtggcatattgcaaatataataaaaccctccttttctctccccagccattacaacacaagctagcatggagtttcgacggaaagggtcacaaatgtccacagacaccatggtttccaatcctatgtttgatgcaagtgaatttcctgataactatgaagcaggaagagctgaggcttgtgggacactgtgtaggattttttgtagcaagaagactggagaagagattctgccagcttatttatccaggtcttggaatttttgtttgttttttcatttatatagttttgatagtgaagccattgttggttggccgactgaaccgatgagtgatgttggtctgaaatacctacagatgtctgtaagtgatcgacatttgcctgaaatctttcattttacctgtctcatcagatttggtaaagacccttaagaccctttttgttttagaagtgctatttatgtcatcttatttgaatctttttaatatggagagatttcgaaggaccacaattatttgttaacaaatttttagcacagtattcccatgtaggcagtccagaaataagtcagctgtaaatcctgcctccaaggagcttattttctgggcaaagccccaaacaaagccgtgtacacatgtaacaatgatccagcaggaattaggatattgatgggagaggcacagataatgtgctgtgggcattcaggggaagaagcagcgcacatttatttactgta

SEQ ID NO: 12722 - DNA, 2121 bp, Homo sapiens
actggaaagtgactcctacagtcccccccatgtccgccggaaacagaaaatcaccgacattgtcaacaagtaccggaacaagcagctggagccagagttttatacttcacttttccaggaggttggactcaagaactgcagttcttagaccactgaatttctaagactgttgaactccagtttgggaactataacacagcagaacagtttgataggtgatcactgtaaaaataaaaacaaatcactcccaagagcttactgtttaatcaccagaatagaagaaacacattataacccatttgatagaagactttgggctatctagtgaaatgggctcccagacacaatcacactcctgctgataatgatgatatacattttagccataaactttcttttaaaagtgacaattttagttaaacataagccttttgaggagaaaggcttttatgcatctcagttaaacacgtgcattggtagtatcaacaaatttgcaatatagaagttgaagatagttttttacctcactttttaggaggttgtattcaaaattaaaatctcagaatcttacaggacatttaaagactcatgttgatagcatggaggagaaggaaagaagtcacagccttctactcagttgtaggtcttcttgtcatccagctgtcacactgacaaaaagaaaagatgatacatgttttttgctcagataagaagcctgacattaaaagatgtcatatttttttctccacatttcaaaaagttgtccttctcatcactgcacagatctgtctgaaagcctcagtttctgagtgacccaggaacagatcagaaatggagcatggccttgtcctttaatggggatgcaaataaagtttgtggggttaaaagttataagacagcagtgataccccactctctccattattgtccagcggggtgacataatgacaggttaaatatttgtgattcattgattaaatattatttaaagaaatgtaaattcacaataagggttgaaaattatttggtttcatccattgtctcttatttcaggaccaagcagcaaactgcagtagtttgtgaaggattctaatatggggttcaggaatagcctctcaacgctactaattcagatctctcccagagaactactggatttcctcataattgacaaacatgagtgaccacctctttgggtggctactgttagaaatggctgttgtcatgttttctggactttgccagccaacagatccctgccaggttttggaaatacttctattacctcgctgctacttttctgcagggataaaacttttgaggtggccagacccagaacatccaaggattcctgttacagtgctacagtatacactgctcatttatcctattctcatgtgctttcttctttagtaagattattttaagaaaataagtgatatttaaagtccaaagaggaatgatcacagttgtataaggggtgttttcccacttgaactctgatgtcagtcgactgtgggtcagagctacaaccatctgtttggtttgatgttttggtggtttacttacggagtggggatagtgtgagacctaattccctgtgcaaatgtctcttattccagaaatgtgcattttgtcatctataagcaagaaatatgggcatagcagctcttggtttaaagtttgccataacctgttcatgtttgttttaagctcaggtaaagataacctcctctttctatgactccagtttccattcaggttatagtattattcaatagttgattttctttttaagctgggcaataaattgatgtttccagatggtaacatgggagagggcatataggataaagatgagcaaattctaccctaaaaatgttctagtagttcacaggaagaagatgaggtttaataactttcaaggtaattctagattgacattttgaggggaaaatgggctcttgttctagttgaagtgagcagagaaggctataaattaatatgtaacttacagcattccagaggttaaaaataactgatgcagatgtacttcttcagtgtgattcttcagatcaaacttttacttttggcatagttaatttcagaaaaatgtgctgt

SEQ ID NO: 12723 - DNA, 1424 bp, Homo sapiens
tgcattcaggagagccatggtagggctagagttgggtcttgcccagccctgcagtttcatagtcccagccttcctggtgctggggagggaggactgtgaatggctgttctcccctcactgctgagtctcccaggaccccctttggagatgcccatggcatgggcactgcccacaggctcagccagaacctcttggtgtacccgataagctgcaggttatcccttgctctgtgcgccttttatttgtccttaaactacctccttagagctctgaaggggtctcctagttccagattttaatttggggaacagatctgggttctttttaaccctcttctttctcagtctatgagaaacttgccctgaggggcacctgggctaggggcttgggactggaagaccatccccgccttgtgccacaactttggtcatgggatctgctctttgtcattcttagccccctactgtggcccccatagccccataacccagagagggagctggacttcagggagcctgagtgatgctttcccaggagcagggcagctggctggaccagaaagtagagggcccatgggagtgactgcacccttggtggctgctggaaggggagaggttctcagcatcaggccacctccaccccaatgccaggatagatgtattctagagtaggggtggaggcggcccaggaggctgaagacaggtgcacagatgcttcccacgaccttgccatttggggtgggctcttcaacatctcaggctgtggctggaacaggacaggatgatctaaaacacacgtaccattggctgtaaaacagtatgagcccagactgacgctgaaatccctcatgagccaaccttagctacaaggtagggagttctgagggaagccgcgtgctcctcaggagagagctgtttaggttttccgatctttttgctcaggggccaaacactgaaggcacgtactgcccaacccactgagcgcctgaggccattccctccttttccgcatgcctcctgcctcctgggctattcctctccacccagaaggctgggaatcccagctgattccctgacaggagccgacttcacacacaggtgactctcaggcattggctcatgttttcagccagggataaaccatcccttcttggggctttaagtccctggggagctttccctgtaggtctcctgggtgttgagagacaagttggagaccaacctccaatgaatgagccgcggtcattcattaattcactcacgtaatttactgagtagctgcaacatgccagcctctacgttaggttctgcggataaaggaggaataagacagagtcaggagaactgttccttgtggtttccgtcccttggggaccacaggcatcagcagtcccattcaagtcacctgaggcaaagtgtctgcat

SEQ ID NO: 12724 - DNA, 1154 bp, Homo sapiens
tgtataggattcagtaggtctaggagggggcctgggattctgcatttctaaactcccacatgatgccaatgctgctggtctgtgaaccacttgttgaatagcaaagttctagaagaaggtcttattaggcttttcatatgggaaatctgggcttgcctagtatggatatatatttttttattcatattccacccacctaactttgaagaagaaagatgcctatttcttttccccacaattcctttcttccactccctgccctatcccttcctccccttcttgaacagaggctgcttagcttagcagtggcaggagtccctctgaggatttgatttttaaaaaccattgaagaggtgtaaaggaccctgcttgctgaaaggaaaaggaagagtgactgggcctcccccaggtcatccctgtcctgagcaggcacctgggaacaattaactggcatagtctccagagaatgacccaggtaaatatatgctaaagagaaggagaatttgtacaagtagatataaatcagtatgttgtctttgttgttgttgctactatgtgtcaccagacctttatataccatgagaaggcaaaccattattaaagagaattcgctagccctgggtatttatgcttagaacatgaatactatacctcactttttggaaccacttttttctctaggtaaagtcatgaagctgagccccaaagcagaggaagtagctacgttctttgcaaaaatgctcgaccatgaatatactaccaaggaaatatttaggaaaaatttctttaaagactggagaaaggtactgtagcccatgtgttaatatcctagtaccttgcaaaacaatcaagtactaagtaataaattatcattttgcaaaacatttcctgatgtaaaatttgagttgtatggattttgttgtatttaaacttgcgtattttttgtcttcatttactatattatgtagggtttctgtccaacaagagtacttgtatatctttgctattggctctcatgtgatggcaggtaggtgggggttatcagattaggccaaacagaaaacctcaactccagttgcgcacaggaaagtttgtcgctgcaggactgccccgtgtctgctgttgcaaagagaaatgttaatctgatgtccctc

SEQ ID NO: 12725 - DNA, 1165 bp, Homo sapiens
gggtcacagagttggcagcaaggctgtgaaattgatgtgggaatgggggtgattatgtgctttgtgttgacagaagttagtttttgggacatcccatgtgggtttttcccaggaacataaacattttagagaattagagctagaaactttcttctgggaaagccttagaagtcagttgtgcttggcagtgagatgggacaatgtgcattcttaacaggttaaatgtgccaaactctctcttcagtactattcttttttacgtttgcttaaggtcaagttcctgctcttttgttcaaagtcttgctttgtcacccatggtggagtgcagtggcgtgatcttggctcactgcaacctctgcctcctgcgttcaagcaattcttgtgtcttagcctccctattagctagctgggattataggcttgcgccaccttgcctggctatattcaaagtctgtctttactacactgtcccaaagtaatctacatttgggtttgggtctttacagggtgagaaggactggcagaaatacgagactgctcggcggctgaaaaaatgtgtggacaagatccggaaccagtatcgagaagactggaagtccaaagagatgaaagtccggcagagagctgtagccctgtacttcatcgacaaggtgagagcatcttcccatcggcattgtctagtgttgagcttaacaaagggagtttctgctctgccccaggccctgtgccacatactgtatatcacaactcaacatacatatatttgtatgtaaaactgaatcaaaagttgcacaaaacaatgcttagccttactgtgagcagtagattctgatctttttttaactctatttcattcctttagaaagttggttataacttataaaattgtttaaataaaccatgcaggtatcaccattatatagttttaaagaccacgctctagaggagatcaatttcttggtactcacgagaagaaaaaaaagttcatgtttttcccccagtcttgtattttaacataagttctgaattgtctcaaaattcacactagctttttgagtttgattgcccagagtagcagcactccctcatttgctgccttatttaattttttttttccttttctccatccctatttcagaggacagaatagaaagaaaaggagcat

SEQ ID NO: 12726 - DNA, 1452 bp, Homo sapiens
ttgctagtccgggctaaagtttccatctaggtcttttgtacctctttctgctcgttttgccttgtttggtgctagagatttggttagctcttaaaaggcaatatagtatagtggttaagaacatggagaaaaactgcttgggttcaaatttcaggtcacttaccagctagctgtgtgagaaaatcagtaaattacctaacgtctctgcctcagtttcatctgtacgtttttcacttgtacatctgcagaagcacctactttagagatcactgccaagattaaatgagttgatcacataaaacctttagaacatgcttggtgcactattaatttgcatcctcactagacagatgtgaaagagaagatggaacatctgaccctgggcctcagatatgggccattgctgagtcaccctaatcccccccttatttctcctttgtttgcaggtgcaagaagtggggtgtcccaattgagaagatttacaacaaaacccagcgggagaagtttgcctgggccattgacatggctgatgaagactatgagttttagccagtctcaagaggcagagttctgtgaagaggaacagtgtggtttgggaaagatggataaactgagcctcacttgccctcgtgcctgggggagagaggcagcaagtcttaacaaaccaacatctttgcgaaaagataaacctggagatattataagggagagctgagccagttgtcctatggacaacttatttaaaaatatttcagatatcaaaattctagctgtatgatttgttttgaattttgtttttattttcaagagggcaagtggatgggaatttgtcagcgttctaccaggcaaattcactgtttcactgaaatgtttggattctcttagctactgtatgcaaagtccgattatattggtgcgtttttacagttagggttttgcaataacttctatattttaatagaaataaattcctaaactcccttccctctctcccatttcaggaatttaaaattaagtagaacaaaaaacccagcgcacctgttagagtcgtcactctctattgtcatggggatcaattttcattaaacttgaagcagtcgtggctttggcagtgttttggttcagacacctgttcacagaaaaagcatgatgggaaaatatttcctgacttgagtgttcctttttaaatgtgaatttttatttctttttaattattttaaaatatttaaacctttttcttgatcttaaagatcgtgtagattggggttggggagggatgaagggcgagtgaatctaaggataatgaaataatcagtgactgaaaccattttcccatcatcctttgttctgagcattcgctgtaccctttaagatatccatctttttctttttaaccctaatctttcacttgaaagattttattgtataaaaagtttcacaggtcaataaact

SEQ ID NO: 12727 - DNA, 1149 bp, Homo sapiens
gaccccaggcagggaagcccaagcacatgtgtgtgtgcacatgaagccccaggttggcagtggcagggagagcctttctgctctgactggtgcttctcacctctgcagtgtgcagtcaaagccctctttgactacaaggcccagagggaggacgagctgaccttcatcaagagcgccatcatccagaatgtggagaagcaagagggaggctggtaagccagtggtgtggtaggcccagagtccaagggccccagtggagctggggccccaaagacatgcatttgtgatgtgcttgtctcctgtgtgcaccagcagtgcctgcctcaccctggcttaggcatgggaacccctaccaaaggataccctcctcatgggagttcggggtggttgctggaggtcagcaccctgtggctcccacaggtggcgaggggactacggagggaagaagcagctgtggttcccatcaaactacgtggaagagatggtcaaccccgtggccctggagccggagagggaggtaagaccagaaccacctgagtaacagcattccctattcccagattctccttggcatgcccccatcacacagtcccaagcacgcacgtgcatgcacagacacctgtcacatgggctggtcgcacagcccatgtggccatgcacgtagtctcccatatacctgtgctacatttggcagtcacaggtacacccacaagatgtatttgtcccatgcacacggatatcccctcacacacatatgcagtagccatgctgaccattggtgggctttgcttcccacagcacttggacgagaacagccccctaggggacttgctgcggggggtcttggatgtgccggcttgtcagattggtgagctcccatctgtttctcttgcccactgttccctagggtgagattcttctttgtatctctttcctgctcctagggaggaagctgatggctgaaccccaaagtctgccctcactccaagctctccccatgctctggacatccccttgacaccctgggctccctttgtcactgtcagctttgacccctgcatgtttacctatgccaggcactggggaacccgtcagaatcagcagaacaaagttgatgctgctggttggctgacatccccaggcctaatg

SEQ ID NO: 12728 - DNA, 1183 bp, Homo sapiens
aggctgcctcagccagtggcacaggagactccaaggagctactgacattcctaagagtggaggaggaggaggagccttgctgggccagggaaacaaagtttacattgtcctgtagctttaaaaccacagctgggcagggtgagaagctagatgcccctgcagtttggccctggagccagggcagaggaatgtagggcctgcatggagaagggttctgccctgcctgaggaggaggacacagcacaagggcacattgcccatggctgggaacatgacccagcctgaaagatacaggggatcatgttaaaaatagcagtattatttttcgtctcaatggtattgtaactaagttatttactcctcctgctcctcacccctgtagggaaaccttggagaggagagtggcaggtgggctgcctgctgtgttaagaggacttagtttgtgatgtaaggcactgtcaggaatggggggcgggccagggtgggaagagaagaaatagcagagcctattttggtgaggttttttgtttttaagtcaaagaagactcagtatgctttccctgaggaatgaaaaagggattgaggagttgcctgactcctgggtgggtggggtacaggcagttaggtgctgaatgaagctgccatccttgctgcagcttctaactggtaaaaagatccagggatggagatgggaaggttagaaaggcagccctcacctctgaggacagaggccggggtccaggcccgtgggcgcaaaggtgcctcatagcatagccagcattcagcacacacaaacctactgcccacatttgggctcagggttggccatttgctagttctgctgccctcttaagatctgactgccaaataaatcatcctcatgtcctttttcctttgacttgtatgctctttcgggggctcaggaaagcctgttgcatgggacatgctcactagaaacagtcgccagatgattattctgcagtagaagcaggtaggaaatttctggaaatttctcaggttaagcagcaagagctgtaacccctcctctgggctaacaggagttgtgggtccactctctcctgcccaccctctgagggtgtgtctgagcagagtacatcctgcctgggttctttgtggccagccagttttggtggtgagctggaaacaaccagagcccctttcc

SEQ ID NO: 12729 - DNA, 3106 bp, Homo sapiens
aaaacagacactttagctgaggacaagcctggtccaggtccattttctgatcagtctgaacctgcaataactactagtagtcctgtggcttttaacccatttctcatcccaggagtatctcctggactcatttacccatccatgttcctctcccctggtatgggcatggctctgccagccatgcagcaggccagacactcggaaatagtaggtctggagagccagaagaggaagaagaagaagacaaagggggacaaccccaactcccacccagagcctgctcccagctgtgaaagggagcccagcggtgatgagaactgtgccgaacccagtgcccctttgcccgcagagagagaacatggggcacaggctggggagggggcactcaaagactccaacaacgacaccaattagaacttttttcatttaagaaattattgtgacttgtaagtttcttatcccataaaggtttgttacttccctcacttcacctccataagaacctgtgtttccataagtaagattacgtacctgatttcctgtctgagaactatggtaacagatgttaatagttgcagggtctcaccacttcattagataagtgttgtctacctagtctaggaggcacagaattctcattctgttatccagttcattccagcaatcatagttaatacagtacttggtgacacgccctacccccttctcttccaagtttcccactcacttgaggaggaaaaatggcaaaagaaagctgtctagggttttaccattgaagggtggaagaacagagacaaagaggagctctttttctgtgagctgggttgcacaggaagaatgtcacagggaaccaaaaagcacagaaaaaggaagtgctggtgcatatttttgagttaaaatatttccctattttatcatgattactaagtgagtagtatagacagaagtatataactaatggttgaaaatacatatattcatttctttataaaaaacaaaaaccttaccggtagtaatataatttcccccttggtggtttttcagacacctgcagcaagaagaaatactgactgactaggcattattttctatacatccctctcaccagtgaaaagattcctcttgctgcgagaaagctttacccaccatgagttattgctgtcgacgggggtggggcaaggacccgcgctccgtagagctacacgctgcttcacaagcacacggctagcgctctgctctcacctggttcgcttacagatttctctagccattaatttgcctctctgtgtttaaagagcaccaggaccgaatggattttcacttcaggctttccttcaccaagaataaggttctttctggagcctgcaagaagacagttgcccaacactttgacacttgctagtaggtcctttgatcaagagtgtctgaggctgtcaaatgtgtgccaccctttataatacagctatgaaaagttacttctccattaatttctccattctgtttatatcttacagttggacccaaattccaaattatcagttaatcgaaactacattgcaagtcaacattattttctcttcttcctcagcttctccatgtttaggaactgagaaagaaactgcctaagcagcacttccccatgtcctttcaccttcatgttaacgtcccttctgatggtctcactcttcacaggtagttcacactctgagacttgaagtaagctcatggttcagtactctgggggcgcagggctgcgcaggacccttggaaatgttgcaagtgttactagtaccagtttcactttttgttgtcacaatttactgtattttttactttttctgttacagttttgctaatttatcagaaggtccaaaagtctgacataactatttcattttgcattatttatttatgatgcttttttcattgtcttttatacatttgggattataaattatgtaaatgttaaaatgagcatctcaaagaagtctgttaaatcatgactgaaaaaaatcaatcagatgtatcttcaaaaagtggagtcccagttttatgaatcagagatataaaccagaaattctataactgatcatagaagaagaatccagtaattgaacaaatcctatttaatgacatccttgtagcatagatggtctataatgctgaccacagatttcttagaaatgctgctctctctatttaactaacattttgttcagttttgcctccagtggaagcagaaagggttttttcagctgttaaatcctaaaaatcaatataatttatttatgtaagaaaaataactcaatcaatatatttttgaaccttttaagtactaattttctttttatcaagtagaaaaaaaaatgtatttgccctaaatccttaaaatacaaatgctataaaaattcctgtatcttgaaagccttactgcaaatgagtattatagacatccagcagagtctggttttctttgttgtcgttgtgttgttgttgttttgtatggaaaagctgctttccccgggttccacttataacctccggtaggtcacagggttcaatgtggatctgacttaaaaacccaccagcatgctcaatcccttgttatccttatggaatctgtatgttaactctctgggtgttcaggcttctatttgactgctgttgtgaccctgtttgcaaaatgaatatgacactctgtggattatttgctctgtaaggcacaagtgcttcttatgattattttgacgtttccaagagcaaaagccaaatttaaactctcttcagcaaacttgagccttttcatctaattccatgtcactcacggccataactttccttgaccattcttcaccccatgtcttacataataaattgtggtcttgatcctggatttaaaaacaaaagaaaaagtttaaaagtcacatttgtatttgaggaattcagtggcacttgggtgtctcctgctgcctggggcattgatgagtacatggtatgcccatcgcctttccgaggtgtctgatccgtgctgggcaccctactgagggcttgtcgaatattcatcatgagggttgacttggcctgtctcttgaccaactgaccagaa

SEQ ID NO: 12730 - DNA, 1109 bp, Homo sapiens
tggcatctatcaccataaaacttcctcctatacaggtagtttggtttttgcaagtggctaaaggttatttggtgctcagtctggtggctagattagatgatcatacagaacagcacaatttttagttaaaatcaaaggcctacctttgaatgatcctgatttagtatgctaacaacacgttggcacagctccacaagtgtaaaggccgtgtatgtcctgtttgccactctgtctccaaggcctagcacaataggaactaacagagagtgggaactcagtaaatatttgttgagcaaatccatgtattcaaactgggtaactctctttgtctgaagcatgaattggaagggtaatatgcttgtttctctttcttttacagttgtcaaatttaaaagttttgaatcactccccaatgtctgatgcctctgtcaattttgactacaaatctccatccccatttgactgcagcactgatcaagaagagaaaattgaagatgttgctagtcactgtctgcctcagaaggacctgtatactgctgaagaggaagctgctaccctttttcctaggaaaatgacatcccataatgggatggaggacagtggaggaggaggtactggagtgaagaagaaacggaagaaaaaggagccaggagaccaagagggtgcagcaaagggaagcaaggacagagagcccaagccaaagaggaaacgagaaccgaaagagccaaaggaacccagaaaggccaaggagccgaagaaggccaaggagcacaaggagccgaagcaaaaagatggggcaaagaaggcacggaagccccgggaggcctcgggcaccaaggaggccaaagagaagaggagctgcactgactctgcagccaggacgaagtccaggaaggccaggtacgttcctttctcccttctctgagcacttgcctatgccagtgcagaacgatttgcctttggcattagcccaagcccctaggcataaccctgctgcactcctgtgggcctaagcttcacatctcacctgtataggatggggagcaggggtaaccccttggtgctaatgcaaggggctgtccttggaggttgctgttttctcattgcat

SEQ ID NO: 12731 - DNA, 1147 bp, Homo sapiens
tgctcgttggtattctggtggcttcttgctcacacataagcacttgtctcctgggcccacgtctgttctgctgtatgggctggtgggttgcaccgggcaggcctgtttcctgcaggggccttttgagttggtctttttctttttctttcttttttttttttttgcagggggaagtaagaagggattgactcctttctgggtcaacttaccagtgtctctgttagcagctcagcagcttacaccacatggcagtgctggatgtcatcagattaggaatgactccatcttgaccaatttgtttggagatagggggccttgacatggtcggggcgaaaaacagcgaccacagacatgaagcataccttgggggcacaaacctccgtcctcactatcaaagcacctctacttcctccttccagaaaggaatacttagcaagatcattatggacatctgagagtatattatatggaaggagtgctctgcagccagagaacaatgttgtaaaacacaaagtgcccttctgaaaggcattttctgtgtggcttgtgagcaagtaagttttcccttcatgtggaaagggcgtaatgaggagaagagaaagggagaaaggaaattgaaattccatgtggcaggcatcacgccaggtgctttgacaaacattattttctgaaatcctcatgccaactctgagaagcagatatgatgcctgccattttatagatggaaaactgaggctcagagaagctgggtgaattgccccagataggcaatgatgactctgcagcaggtgccagtgtgtgccctgtccacatcctttgggccttaccactgcagtatgcaccagccgacttccaattgcatctctttctccaaagctagaaagtagtatccacccccagctctcatggcatggttggtgggagttggtgtataaatacctcagctccctcacccctcaggtgggagaactctggggtgtgtactctacactggatgtcagggtgccctggtggagttcagctctatttgctgacagcgataactggcttgagaacacacccttcactggcttctttctttctctttatcacttggcctctccttaaccagtgccccctaggattaccttccaaataaatgatttgt

SEQ ID NO: 12732 - DNA, 1154 bp, Homo sapiens
agtctgaccaatcttgtctttcaggattttatgcgacaagcaggtgaagtaacctatgcggatgcccacaaggaacgaacaaatgagggtgtaattgagtttcgctcctactctgacatgaagcgtgctttggacaaactggatggcacagaaataaatggcagaaatattaggcttattgaagataagccacgcacaagccataggcgatcttactctggaagcagatccaggtaacttgttgaaggacactgtgggaaggaaacaatatttgccaataaaaagggagtaattgagtgatgtcaattgttgcctacttgaattaaagccagcttttagtttgttttggctgtgcatcattgcgttcttttctggatgttttgaacagtgtatttaatttcgtagtaaagaaaaacattattctttggcttatctatttttgccagatggcacggatgtatttaagttggattgggattaagacttcattgtttttctcctaataggtctcgatctagaagacggtcacgaagtaggagtcgcaggagcagccgcagtagatctcgaagtatctcaaaaagtcgctcccggtaaataacgttgtgttgagtcactgtgaatattaccgtacttgtttatggagtatgtgtacattctcactaagtattgagaaaatcggtctttccttgtccagttccaggtcgcggagcaaaggtcgatcacgttctcgatcaaaaggcaggaaatctagatcaaagagcaaatctaagcccaagtctgatcggggctcccattcacattctcgaagcagatctaaggatgagtatgagaaatctcgaagcaggtctcggtcccgatcccctaaagaaaatggaaagggtgatataaagtcaaaatccagatcaaggagccagtcccgttccaattcgccgctacctgttccaccctcaaaggcccgttctgtgtcccctccaccaaaaagagctacttcaagatcccgttctagatctcgctcaaagtcaagatcaaggtccaggtcgagttccagagattaactcagaactccttgtttgcacattattatggaacactttcctacttaggcagttactcttccatgtttatacttggcctcttctgcaagaggaatctct

SEQ ID NO: 12733 - DNA, 1957 bp, Homo sapiens
taacttttgtaaagattaagctcatttagtgttgtttttttttttttttttttttttttttttttttttttagtatttcagcaggatctgctggcagggtttttttgttttatttgtttgcttatttttaaattaactgttttgagctttgaatacttaaggctttagagggagaacccaattttcaattatgttggctttttataaagcttgagttatgtaagatttaaataaaagtttgctaccaagatgattgccttattgaataggtcactattaaattcctttaaatgttgatatctgccatttgtggaaacaacgtaaattctacttaagtgtaaacaaggcaagcctcagaccagcaataaattactcagtttggataacattattttgtgcagttaatcaaatttgccaaagtctttatctgcccctttaacaagttgagtaaaaataaaaggtattttttagtcaatgtgttccatgattttgcttaaattaatacttttaagtaatggaacttttttcaaaggcaaatttaaactatttaagaaatagctcctaatacttgggatcttgtttagagaatccactttctggaagttctcagcataattagtgttgagagtggttcagttgtctttaatgtttgtcatgtggaaatggaagtagcctctttttgttctgaaattgagtttattcaaagtgtaaaagcacatactgcattttctgctgaaagatcattatgtttaacaggcacttaatctcagtaaagtcagttgccagttaagttccacccagtagtcagtcccctttgtagttagtgggattatttgataattggttagatcatacttgtaaattttaatgctttgtgtaattggtttgaaaaacagtgaaatgggtaaacgcaaaacttttgtactttattacgagtaaagtgtaatgagtactgtggaaaccaaatttgaatactgcaaatttgtaggagttactaggttagcaattagtccatacatccataagcctgatgagttgaaattgcagtttgagaagtgaattaaccttacatccctttgttcagataccttaaaagttactttatttaaaagcatttattaatcttagtctgaaatcaaaatatagattaattggctcagctttaatacctttctaggaggtgtcacaatgtagggtaccaagggttggattgtgatggggcatggtcgtacactgctcattgtgccacaggtgtgactggaaagcatgatattctagggttggtttgtagattcaaataatccagaaatatacctaataagattgagtgaaaaatttgagtcaaatatctagggcattcacagagtagctgtgagttcttggtaatgtgaaaaaggccttgtttttcagaaattcctgggtttcctgttaaaaaatcttaaagcccaaccttaggaatatagtgccccaaaaggcggatgcttcttccattatcttattttctttgatactttatttaattagatgtttataaagaaatgggtttatttttccagcataaacctcagaatttaaggaaagaaaatgatgtctgttgttatagttcattgttttgcctactcagcagaagtgatgactcttaaaaattggctttgaccaaagttctcttgttttcagggaaagaacataaaagctttttgaactacagcctttttaaaagagggatgggaggatattacagtaagaaattaggctttctaaaagtatgaaacatccttcaactgggctctcttgttaataggacatcatatggtaatagactggtttgactatattgttagctgccacagtaagcaggtcattgtataggtaaatgcctgcacccataattttctagtaatagccacgaccaatttattaacagtcagggcctatccttgcctgtagttctcagtca

SEQ ID NO: 12734 - DNA, 1236 bp, Homo sapiens
accaccatgctcagctaaatttttttgtatttctgtagtgacagggttttgccatattgcccaggctgatctccaactcctgggctcaagcgatccactcacctcagcctcccaaagtgttgtaggtgtgagccactgcacccagctgggaaaatcattttgatggctgaactgacaaaagggaattattgtctagaagaatgggaaagtgagtagactacggagatgtagttgattgctgagcgctcaagatcagagatcatgaaattaaaagaccagttgatagggttgtatgtttctccagctgttttcagccatgtgagtactggtgtaattggagatttggatttagccagtactggggtttagccaagtgagttttgttcctctttgcacataaattggcttatttaaggtttagtgtcagtgatcatgaacagtaaaatttcttggcaagagaatataaatgttgcagatttagacctgagacagtggagacttgacagaataaatgcttgctcttgctgtgctaaaaggaaccctcttgtggctttcagatttctgactacatgatgctgccctacacagccaccctatcaaagcggaatcgagagtgtctccaggagagtgatgagatcccaagggactttaccaccctcttcgacctgtccatcttccagctggataccacctccttccacagcgtcatcgagtcagtacctgtgggcctctgagccacactgcactccattctgagtgtttggtttggaaacatgaacctgggaacgggaattagggtcacagtaaatgtggcatgcagaacatgttctcagatctatgatgaggtcaacaaagaaactgggctgggcatgaggggttgatgtagaggaactgccagaggttattagcccctgcgtgttccagattctggaccaggcatttagcctgaccagcttgtttcattttgccccagacttctggttttagcacagagagtcccaagtcccaggaaaatggagtcccaagtccctcagtaaatggagatggtggtcacctcatttctctctgggtatctgggcaactggtaatgctattaactggcacttagaatgcaggaaaaggaatgataaatgggctgtgttctgggcactctcagtctagtgcggatgtgcaggtggaactacaagtttaaagatgaaaagatctgtaaagccgttagggaagccgtgggatggg

SEQ ID NO: 12735 - DNA, 1432 bp, Homo sapiens
tgacagagcgagactcgtctcaaaaaaaaaaaaaaaattctatagtgactgtgtcacttttgcagcaaaaaaagagtgttttgttgtttaatgtaagcaggcaaaattcaagcttaggatttcagatgctgagtggaaagaccaattaggttctgagcctctcctggaaggaagctggctgtgccggatgctcatttggcagtgttttactctccacgtctagcatggtgctggaggctggggccatagcagtgaacaagatgattgcggttcttgctgtgcctctcagagctctgtgtagtgggagacagaagtgtattggcagttaccgtggtctaagtgccatccatgaagggaacccagagatgagggttttgatgtggctgctcagcagtgaatgatgggatgggaggtcaggtaggttcccagcagtactcactctggtggcatgctaggacagacacccgaggccaatataagaagtctggtgtggtctttgcaccagtgctttcaactctgtttgttactcatcatggtgggtggtgggcagtggtcacaagccctgccatggtagggcaaaaggatcaaaatttgatccttgggttggattcagccctaaagccagatattatgtatatgtcctaattaataaagattcagaatctctaaagtccaaagcactgaagagtttacatttcaggctttatactgaaatactaaaattctgtgtcttattctctcatccaggaacatgacatcgatacaagtgaaacagcattccagaacaatttctgaagaccatgcctcttgaagctttttctgcctcctgattctctctttgtaaactattttcaaattgtttttcaactccttatcaaaattgtttatacactctttcctccatgagctctggaaggtatatgcatcttctgtaatactcagataggtataagatttttcacaaaatccttatgtaagatacattccatttttaaaaattaaatgtatggttgcatctgtctttttataccctatgaaacagtcttgatttttttttctcaaccccagttctggatttgagtcttttatcaaagacataattaactctcaagcttgttgtaaatactgtacagctttctggaccggttgaaaggatacaacagtggctggacacggtggctcactcatgtaatcccagcactttgggaggccgaggcgggcggatcatttgaggtcaggagttcaagaccagcctggccaacatggtgaaacctgtctctactaaaaatacaaaagttagccaggtgtggtggcatgtgcctgtaatcccagctacttgggaggctgagacaggagaatcacttgaatctgggaggcagaggttgcagtgagccgagatcacgccactacactcccgcctgggtgacagtga

SEQ ID NO: 12736 - DNA, 1137 bp, Homo sapiens
cagagtgctaggattacaggcgtgagccaccgcgtctggcgtgttttattttgtgtagagatggaagggggcgggagtggcctcgcgttgtgtctcacctcactatgttacccaggctggtctcgaactcctggcttccagggattctcccccacttggcctcccaaagtgtcgggattacaggtgtgagccaccttgcctggcgccatcctgattttttgttcaggaagagttattccaggagtgactgcctctagaccaccccaggtcctgggctacttctcccatgaggggctcagtggaggaacccctcctgtgtgaaggatggcagctccacagccctcagcccatttcctggccacttgctgtaactctcctctgccctagtgccccacttcccgctttgtctctgactcacccctgtcctggagcagagcccagcacgttgaagggcaaaaggtagggtatgttggaccacaatgtggttgccaccactaactggactctgctttttcagctgggattaggatatgaggacttgcaggtgtctggagttaggaaggttcagagcctggctctatgaacttggcaggtggcctcacccctctgagcctcaatttccgcatctgttaagggggataatgagaatgtgggtgaagttgatggccagcacatatggtaaagtatatcatctcacagaaatgccccagctgtctgagatgctgaccctatcaaacagcattggaggctgggtgtggtagctcatgcctgtaatcccagcactttgggaggccaagagttcaagaccagcttgaccaatatggtgaaactcctcgtctctaccaaaaatacaaaaattagccgggcgtggtggtaggcgcctgtaagcgcggctattcgggaggctgaggcaggagaattcacttgaacccaggaggcagaggttgctgtgagtcgagatcatgccactgcacttcagcctgggtgacaaagcgagactctatctcaaaataaacaaacaaacaaacaaacagcattggagcaccagggagtgtccatgcagacatcatttcatccttgaaagaatatttgctgaccttctgttagaagccaggcctttgtgctggatgctggaga

SEQ ID NO: 12737 - DNA, 1174 bp, Homo sapiens
ggcaggtgctaccacattcgagtatttagagcctcctgatggtgagggggttcccctcaggacctccttctcaggccctcccacccctgacccacaggtgtctgggagggagggggtgtggcaggagctgccatatgtcttactgcctgggctgctcagaaagcatgtcaccagatcctttcctgccccatttcctcatctccccctcttctgtgtaatctgaactcttcagggaataaaaatgctctcctagaaaaaagcaggggtccctgacgtacaaggaattaaagacttgtgatggtggccccttgtgttcggttggtagggagcggcttcccacaggggaccgagtttgccctctcgtgtagcaaagggaaaccgcccatgttccggcatgtgggcttgcagtgagtggtggctgcatggaacaggacacacctacccaaggtgtgcctagtcccaggccataggcccctgagcctagtacttaaccaggcccccagcccgaggtcccagaagttctcacagattggtttgttcttctgttcttttcccagaaccgcactgaccagcaatgccagtacaggtggctgagagttttgaatccagaccttgtcaaggggccatggaccaaagaggaagaccaaaaagtaactgctgggacagtgccttgcacacagtgggtcttcacccaccagtgtacctggggactgtgagattgccttgtgttggggttgggggtgtcaagctgagcattgggtgtgagttgtctaccagccagtctggacactcttatgctgccctggctccagccctgagattccaagtttcagagtgtctccaggcttcctcactcatggtctgagggctattgggctgattactcggcttctcttgttccacccatggaggggagcagtagcagtgcagcgttgtcatgagaattaagcaggtgatgcttgtagggggcttgcaggttctgtacatttgctctcagcaaatggcagctgctgctatccctgatttaatgatgattgcaccctgtgaccttcacagggcacagatgccttcttttgatcgccacagcagtcctgtgaggtgggcagaagttgttagtcccattttatagatggagagagcaaggctcagagaggttggggatgtccccaaccta

SEQ ID NO: 12738 - DNA, 1195 bp, Homo sapiens
gctggtgtgggaaagtctgtttcccacctttagtttggactccgtgtgtgttgttcctcctcatccctctgctcttttctacttagcttattgggttgagccctggagagggaagcaggactctggcgcctttgtttacccccacttgatctctactctagaaagggtctctggtattcttggcctagatttattccaggcaataaatgagagggatgcggtcagatcctcaggtaggccctgtgggctacacaaagtcatcctgggtggcatcccctgcagctcgctcagtgttgcctgaggggatgtggtaggtggcacctctcagggccatggcaaggctcaggtggatgtgaagggctatggtgggggcgagagaggggccggtgcaagtggctacccagagacttttctctaaggtcatcgagctggttaagaagtatggcacaaagcagtggacactgattgccaagcacctgaagggccggctggggaagcagtgccgtgaacgctggcacaaccacctcaaccctgaggtgaagaagtcttgctggaccgaggaggaggaccgcatcatctgcgaggcccacaaggtgctgggcaaccgctgggccgagatcgccaagatgttgccagggaggtaagctgtcttcttgggggttgggacaggttcccgggaggccaggcccgtgtttctgatggaggagggttcctgggtgggtattgtggtcctgtgctcttgttctgtaacacccagcctcggctccagggctcccagaggcatgcatagtcaggaggaagggtggttccccagggaaggccctgtcttctgtcagcttaaaagaacagatggtgataagggaggcctcagcaagaaatcgggaaccctggagtctagttctcatcctgttcccagctcactgtgtcttcttggttagcctcttctcttcgacttcagtttcttctaacacagaataggcttgagatgtgggatagatgggctttctttaagaagaaaatgatcaaaaatcaggtagtactataatctgctaaaaggtgttttttgtttttctttttcttaaaaggtttaataatgaaaaacatcagtctttgtcaccactctgttaaatgactctactaaaacagactcatctttttgagttctttatctctttaagtgatgtgccatttttca

SEQ ID NO: 12739 - DNA, 1183 bp, Homo sapiens
tgggttcaagcgattctccttcctcagactcccaagtagctgggattacaggcatgtgccaccatgcctggctaattttgtatttttagtagagacagggtttctctgtgttggtcaggctggtctcgaactcccgatctcaggtgatctgctcgcctaggccgcccagagtgctgggatcacaggtgtggtgagccaccgcactcggcaatttttttttttttttaattaaaaaaaattttgttttttacctgaacctgacagtagctggtgccattttataatttttgccatagcctgaatgattcagttgcttatttcacagagcttcgtggaaatgctctgtaaattattagggctagagacttgtgagacttcatcttggaactgaaagagaccttagagttcatctagtggaagattcatttacaggagcaggaacttggcttagggaggttagtgatgtgcctgatggcaccccacccacagagctggggttcaaaggccccctgctgccccctgcaggacagacaatgctgtgaagaatcactggaactctaccatcaaaaggaaggtggacacaggaggcttcttgagcgagtccaaagactgcaagcccccagtgtacttgctgctggagctcgaggacaaggacggcctccagagtgcccagcccacggaaggccaggtgagacagctgctcagcctttggcttggtttgatttcacattcatctgacaccatctcattgaacaccttgtccacagctattggtcagtttctgccacagagtctaaaagtgggctctgtgcttctggggccttgtgagacttctgcacataactggcacttgtctgcctgcagatgaaggatagcagagcaagctgattatataaaactgtgaattagttaaggagatcctcagcctccatctctccttgctggtggccaccttcttacctgttgctcattttaattttttaaaactgaaagcatgtttgcaataaaaaaatcagaggtggctgggtgcgttggttcacacctgtaatcccagcaagttgagaggctgaagcgggcggattgctcaagcccaggagttggaggccagttcaggcaacatggtgaaaccttgtctctatctttttaattaaaaaaaattaaaaaatgtattgagttgtaattt

SEQ ID NO: 12740 - DNA, 1231 bp, Homo sapiens
ataaagttatattcaatccagggaatttaagcctaattcaggatctttatctacagtttatattccatttttccctgtccatgatgcagtctaagaccagacattgcatttagttgtcctatccctttagtcagcctttcttagtgtcatgatgttgacattttggaagtatatggtatggctaattattctgtagaatgtttctctatttgggttcatcacagtttccttcttagattcaggttgtgtggtttagctggaaactactatatagtctatatctcagcgaaatgcaaatggtgtattcttgtgtcttacagggaagtcttctgaccaactggccctccgtccctcctaccataaaggaggaggaaaacagtgaggaggaacttgcagcagccaccacatcgaaggaacaggagcccatcggtacagatctggacgcagtgcgaacaccagagcccttggaggaattcccgaagcgtgaggaccaggaaggctccccaccagaaacgagcctgccttacaagtgggtggtggaggcagctaacctcctcatccctgctgtgggttctagcctctctgaagccctggacttgatcgagtcggtatgttggtcacaacacttcacagtgagcacagaacacccccagcaggaagtgcttctctctcaggcccacatccttttgctcattccatcgccctgctaacagttactgacttgatgctgaatgcctagccctgacccaagggctggggacaccagggttgtcagcatgcagtccctatccttggggagctcccggtgtgtgcagcaggagtttgtggtggcatctgacctctatgtatggcacagggcggggtgggaaggctgcccagaggaggtggcactgaactgagtcctaaaggttgactggcaggtgacagcacaggacagcgtggtatttgtggcatcacacatggttgggtctccctgaagaggagcccaggaaatgccaagtcttggtgctggtcttggagtggtgagtgggttctggttactcagggtggggcagccattgagcccgtgttgtggttactgtgttggctgtgtggttgtgtcctttgaggagggcttcttggtgtgacaccccggctcctggctgcatcggccaggcctgctgtgtagagcgggttttgggaggtgaaagaccagaggcctggtcactagggtggggagttcagtatgggg

SEQ ID NO: 12741 - DNA, 1099 bp, Homo sapiens
acacgcctgtagtcccagctactcaggaggctgaggcaggagaattgcttgaacccggaaggcggaggttgcagtgagccgaggttgcaccactgcactacagcctgggcgacagagcaagtctctgtctcaaaaaaaagtaaaaaataaaaaattagccgagaatggtggtacatgtctgtagtcccaactactcgggaggctgaggcgggaggatcacttgaacccaggagttcaagcctgcagtgagctgtgattgtgctactgtactccagcgtaggcaacagagtgaaaccctgtctctttaaagaaaagaagaatctatgaaaatatagatgtatagtcatagaaaactttgaggaaatgcatgaaatattaatgattggtcctgggctgtgggatcatacttgacacttaaatatttcccgtaatgaatgagtcctcttgtattaagagcatagtaattgcaattcctaacctccctccctggacaggaccctgatgcttggtgtgacctgagtaaatttgacctccctgaggaaccatctgcagaggacagtatcaacaacagcctagtgcagctgcaagcgtcacatcagcagcaagtcctgccaccccgccagccttccgccctggtgcccagtgtgaccgagtaccgcctggatggccacaccatctcagacctgagccggagcagccggggcgagctgatccccatctcccccagcactgaagtcgggggctctggcattggcacaccgccctctgtgctcaagcggcagaggaagaggcgtgtggctctgtcccctgtcactgagaatagcaccagtctgtccttcctggattcctgtaacagcctcacgcccaagagcacacctgttaagaccctgcccttctcgccctcccaggtgcgtggaccccactctggctgcttattgggtcggtacagacacctagtgttcagtgctggggcaagggtgagcaaaacgagacctggctctgccctcatgcagcttatgctctggtaggaagaccaggtaactaaaaaagactcagaaaatgtgataatcaggatgaaagagaaggcttatggtgctgc

SEQ ID NO: 12742 - DNA, 12392 bp, Homo sapiens
tcacaggtcagttcagagctagttttatttcttctgagaaggagccactctcccacagttggcttcctgtgccttaactgcgtcgtcagcactcgagtagagatggcaaaagctaggattagggtgacggaagcccagaggtctgtgtgaacctgcttggtgggctcctggcatcgatctgtcccagtccttgttctcgggtgtctgatgggtcaagaggggacctcagtatcagagcagacgttttgggggagaggctcaaggatctctccccatgatcccctgaggtctcagggatactcatgcaggtcatcattttgtcttgttccctctctcttctttggcagtttctgaacttctggaacaaacaggacacattggagctggagagcccctcgctgacatccaccccagtgtgcagccagaaggtggtggtcaccacaccactgcaccgggacaagacacccctgcaccagaaacatgctgcgtgagtgctgcagtgcccccaaccttcgccgtcctctccctcagcaacaccagaccatgggccttgggaccactggtggaacagtggggagggggcacccttggaataacactgaagactgttttaagaaagccctctcctttctggccaccacgatttatcatttttatcgatatagttttgggctccacctttgcttttcctcatttgtattttttaatttgatagtttccttttttgtgatcctcctgcctcagcctcctgagtagctgggactccaggtgcatgccaccatgctcagctaattaaaaaaatatttatttatttatttatttatttatttatttatttatttattttgagatggagtcttgctctgttgcccaggctggagtgcaatggcgcgatcttggctcactgcaagctccgcctcccaggttcatgccattctcctgcctcagcctcccgagtagctaggactacaggcatccgccaccgcgctcagctaattttttgtatttttagtagagacaggatttcaccgtattagccaggatggtgtcgatctcctgacctcgtgatcctcctgcctcagcctcccaaaatgctgggattacaggcgtgagccaccacacccggctaaaatttttttaagaggtgaggtcttgctactttatctgggctggtcttgaactggccttaaagtgatcttcctgccacagcctcccaaaacgctgggattacaggcgtgagctactgcacctggccctcatttgataattttctgtctcaggaatggagagtccaaattagcctgaaaaacataatctcttccgcttcctaaggtttcaggtgcaaattcgttgtgtttgagcagccttatgtgcagggcgaaagtgcccatccctctatcaagagtggagactgcattcctgtcctctgagcttacggagcatgacattttctgtctggaagcctgtacaggttgctcgccagcctgcttttacaatggaagtgcttttacaataagtttacttccttgggtcatcatgattctaaattccaggtagagagagttgcttaactattcctctgcttgatacatttgctggaggaggaaatcgctattttgtgattcagaaatcagctcaggaattttagccctgatagtgatacataatttcgggaaaagatttgtgaatcccttagtcagaaatcagtctccaaagtccggctcagtggctcacacttgtaatcccagcgcttgggaggccaaggtgggaggatcacttgagactaggggtttaagaccagtctgggcaatatagggagaccctgtctgtacacaaaaaaaaaaaaagttttttttttttttgagatggagtcttgctttatcacccaggctggagtgcagtggtgcaatctcggctcactgcaacctccgcctcccgggttcaagcagttctcctgcctcagcctcctgagtagctgggattacaggcacgcgccaccacacccagctaatttttgtatttttagtagaaacgaggtttcaccgtgttggtcaggctggtctcaaactcctgaccttgtgatccactcgcctcggcttcccaaagtgctgggattatatgtgtgagccactgctcccagccaaaaaaaatttttttaattagctgggcgtggccgtgtgtgcctgtagtcccagctactcgggaggctgaagtgggaggattgcttgagcccaggagtttgaagctgcagtgagctatgattggctactgcactccagcctaggtgacaaagcgtgactctctttctagttttttttttttttaaaaaaaaaagagaaaaaagaaatcagtctctaaagagttgatctaaagcataacttagataggtttcgtgagaaatgattgtccgttcaaaccagaatcttggacttcgcatctaagcccttaaacagagatgctgtcactacaaaaggcattgatacttctctctctccctttctttcttatccatgtggcctcatttgctgcctccttccaattccttttttccataggaagaagcatctccagtgctcttcattcctctttagatccatatttccatctggttccttctgaaggccatcctttaaccatgtagtgtgggcttgctggtgatgagttctaatttttatatttttttgctaatttttctatttttttgtagagatggggtttcgccatattggccaggctggtctcgaactcctgactcaaatggcctgcctcggcctcccaaagtgctgggattacaggcgtgagctgtaatccagctgttattcctttgtagagagtctctttagttatccctcaaatttgacaggctgtatggtggtgtggtatttctctatttttttcccccccggctttcatatcagactaaagattcaaaccttgagctgaggaagtgtttatttctttagtttttctttccctgtctgccccttctcctaccttaggaattccttcatatataggctggattggtctctgtgtctttttcgtcttcatacgcctcttcaccatcttaagccatttccttaatcttcggagaacatgatgggattgttttctgattcaccagtttggttgtctgtggtttccaacttgctgaattctctgatttacagagctgcattttttatctccaagcaatcttttgaattcccttttcaagtcagcctccctgcctccctgagttttctttttgagacagtcttgctctgtccccaaggttgaatacagtggtgtgatcatggcccactgcaacttctacctcccaggatcaagtgatcctcccacctcagccttctaactagctgagaacacaggtgtgcaccaccatgcttggctaatttttttgtttttttgagagacagggtctcactgtgttgcccaggctagtcttgaactctgggactcaagcaatccttccgcctcagcctcctaaagtgctggcattacaggggtgagccacaaggcccggcctctccctgagttttctaatgtgtgtatatacactcttttttttcttttttccgagacaaggtctctcttagtcacccgggttggagtgcagtggtgcaatcatggctcactgcagccttgaattctgggctcaagtggtcctcctaccatagcctctggagtagttgggactacaagcaccaccatggctggctgatttttttatttttagtagtgatggagtctgtgttacccagactgttctttaactcctggcctcaagtgatcctctcctgtcagcctaacactaatcccagagtgttaggattacaggcgtgaaccactgcctttggccatgtgtgtgctcttagtccttgttgatgccacgaattagagaggttctggaattttctcatgttcctcagaaactccatgtcccatggagatgcttgagtggctcagattcacctctgtgaattgtggtttgaactgtaagatgtgtacatttgacttgtgcttatctgtcttcactcttccttacagagggggatctctgtgtgtcccagatgggggataacaagggtttgggaagagactgtggatccctgcctaatctctaggtcctgaggaaggaagaaaagaatggtctgcatttgttctagttttttatctccccatggagtggctggccagctgcgggaagtggaggcggcgaggccccaggctgctgtttctaggagttggcctcatcacccaggtccctggctacctggggtgtttctctcatcctctgagtgccctggttatgccatgagagtcagccatggtggtatctccaggtgactaaggtcacataccagcacacaagggttcgtgtttgtggaacctggtagcttccttcagagctgacatttgcccacagccagcctggcccagccccataccaccagccctggcgctctggggcgtgaggtgccttttctgcccccctgctctagggcaggtggaaatcacccatggtgggtctacatctgatagaagcatcttatagttctgcttctggaccagaccatcctgggtttttctctgttctgctgaagggttccctccacgtgtccatcacctcggtgaactcttgggagacctgggaagatgctggcctcacctctcgcccctcctttccctcattgtgctgccaccatccttctcacacaggctctccagggagagctgggcaggatgggatcttcctgggttcccaccttgctccgtgccccctctcactgttcctgaagtgtggccacggactgccttgttttctggaaagtcccaagtctggaccatgactgagcagcattctcggctatctgccacctgtctggggctcctggcccctcttagactcccctctcccttctgtttcccccgagcccctgacttggacctgcagggtggggagagggatgggacgagaacctgtgctggggccaaaggtcgcactgggggaaggtggagccagggcagcagagtgcctggcgtcggcccctatcctgtcactagttcccccgttctggcccctggcaggtttgtaaccccagatcagaagtactccatggacaacactccccacacgccaaccccgttcaagaacgccctggagaagtacggacccctgaagcccctggtacgtggtgtggtcgctgccgtggatctctgcacagtgggatcccttcggttcatccaaccatgttcagtccacaggacccttccctctgaggtctcatttgattctttctcctgagaagatgcagagatcctgataatataaatggggaagctgaggctgctctttgtcacttcctccgactgctcctgagcacctgagtttgcaagcacgcgccggctggtgctagagacatggtggtatcccgtgacactcagcctcaggatgggggagactgatgtgaaatacaaataacttaaacactttcaggcaaagataagcactgggcctagttcagagaagtggcaaattgctactctggcctgtctctgaccaactcccagttctctacagagcacgggaaagcccctcggggacgtctttcctgcagtgtgcaggctgcccttctcccctgctcttcccagttgatgggatggttgtgttttctctatgaaaaaaggagttggcaccttgggctttctgaaacacacaggtgttttagaaatcagtggagggtgagagaaaggcatggttgtggaggcactggactgtgaacaaggtctgcagcgggtccccctgctgtctctctccactgcatggagcctcctatgaagcccaaggtggctgggggctgaggctcccttgggcctgccatggaactgattctgagtcaagcagactttccacggaccatgctacatgagccgaggtgaggcactagttagtgctcctttcctgttgcagtggagatttggctcctctgtactaaaatatctgcatgctctccaaacaggtgtgagggcaaatcacatgaccttggcagctgtaattaaagtttgtgggggcttttcggatgacttatgaggagtggctgtgattcgcacctttcactcttagtagcactcgccctcccctgttctctgttgcctgaagctggagaggtccttggaaccccgaggcctgagaaagggaaatgggtttgagagcccccattagtgtggaacaaagggttgagtgagcctgggctttgagctgtcggggtcctaattcagcagctgtgtgactgtgtgccaggctgttgatctctgagcttctgtttctacctgcttaaaatgacggttactgcacagggctgtgtgagggttacagtgcgtctctgggctgctcccagccatggcaggcccctgggaatcaaggtcatcagctgcttgtccaaggcagcagttagtggttgtgaatggtgcgtgtgagatctgcatcctggcgtcaggcctccttcctgccttacccaggacagcccagttgcagctgggttggtcccacagtcccacacacacacagcccgagtgtggtgcctcacgtgggctgccccgtgcctacccacagccacagaccccgcacctggaggaggacttgaaggaggtgctgcgttctgaggctggcatcgaactcatcatcgaggacgacatcaggcccgagaagcagaagaggaagcctggggtgagtagggtaggggtgggagagcctgggcagggggaattggagccgtggcatgggggaggcgtctggggacaggttgtagaaagtgaggcgctggggagaatgggggcgtagcatatcccctttgccccctttcgcacggtggttgttgaggaaactgacaagataaggacagtgtctctgggaccctcctctgctctgctttgaaggattcacttacttatccagcattgtgttcggaccctgctcaagttgggctgggctggatgtggtggatggagcagcaattacgacccagactggatctccccttagtgttcagggggcagagacagatgctagacagacacaccatgactgaattcacagggtaccaagggccgcagaaagggaggttccaaaggaatcttttgggtggaggcgaggcggtcgggatgagccagccaggccaggcagtgcctggctgagtgtcaagctgcatgagctgggggtgggggagtgggttcaggtgaggtggagtctgcaggggctcctgggcaggggggcagggaagggactgtcccaagcctccgttctatgccagcctccctcccactgcgtcgttagctttcatgacagtgcgcgatcccttcgagtctcctagtgctcctttttcccagactgctctcctcaagggagagctgggaacggtgggatgtacagggtgttaggtaaggaggggaggtgggcggtcagcctgggcgggacttgcccgagctggcaccccatgtgcacgtggagagaacttggcctctggcctccagggtcctccctggcctctccttggtggggatggttgtgagccatggcagcccctgctgagtgcactgttgggtagagtggggatgtgactctcagagccgctccctggtatcggagcaggccctggacctgcttctgtgaggtgcacggttaggaatggggcgttccttgattgtattaggcattgtagaggggcttgtcctgaggggtttgtgttcccatattactggcctgtgggtgctattttaggtgttactggggtgattctctgctgggcctgtttgaggggctgtgtctggtccattcggggtgagaacaggtcacttcgtggtggaggttcatgctgtgttcctgctcactgtcgcagcacctggcaggatagggtctaccttgggtacagagtctaatggggccatggggcctaactttcccagccaccccattcttctgacagcagattcccactagctgggccttgctccaagtctgcactgcagcagggcctggttttgtgaccatccatggccatgaccatccaggtgctgaccatggggaatccagacactcaccctaacccccttctatctgccaacccctagctgcggcggagccccatcaagaaagtccggaagtctctggctcttgacattgtggatgaggatgtgaagctgatgatgtccacactgcccaagtctctatccttggtaaggcttctgctccttggaactgttgagttttggagaggaccctcaaggtggagttagtgtagtgactctccaactgggcttctggaaccctgggctctgcagggaggggctatcagggagggtgggtccgggcacccactcatggcttcagtcagcagctctgcttgtctctcacagaaggttttgtttggcagagttgcgcggctaggacatgttttaaaaacatgcatctgggtctcctgcgctctcccagagagggtcagtgatgtgtctttttttttctttttttttttttgaattggaatttcgctcttgttgcccaggctggagtgcaatggtgccatctcggctcactgcaacctccgtctcccgagttcaagttgttctcctgcctcagcctcccaagtagctgggattacaggcatgcatcaccacgcccggctaattttgtatctttagtagagacggggtttctccatgttggtcaggctggtctcgaactccccacctcaggtgatctgcctgcctcggcctcccagagtgctgggattacaggcgtgagtcaccgtgcccagcctagtaatgtgtcttaaggtatagccaggcacttgggcacattagtcctgggatgggtgctatacagcccccaggccagtggacttgctgtgccgggtgctacagtgaggtcgacctcagaaagggggttgttgcctgtgcagagcctgggtccccagaagccagggtgtgctgctgatccctctctgctcacaatggggtgagttggcttgccctggctcagagtggggaggcggtgagaggcatggcggcgtcatgaacaaaggttaagggttgcctgatcttccaagtagactgctgccctcacggtccttgcagagaaaccttgtcctggctaggggtctctgacaggctggggacctgcagccaggttactgcaaagaaaaaaacatcaccgcagggagtgaagagcacagattgagtcaggtgggcctgggtttgagttatgacaccatcactgctctctgggatctttcaggttccctgagccccagttaaaagcctataaaaggggtgccaagcctaagtcaggagggcacagtgccaagcagagcagagagactggaagggcgtgggaggggctttgtgcaactccgctgtgcttggggttgaagctgcgtctttatgatgcttgtggatgtttctggtcccaggaaaactaggaacagccttggctcctcctgaggctttatgtgacaaagccaacgttattgagtatgttattactggataatgctcagtgatactccacatttattgattatgttattatggcctgggggctgcacggcacccatcccagggctgatgtgcccccacgtacttgactgtgcctccagacacaccactgaatcaggctctgaaacgcacacacgtttctttacttgattacttgattttttttttttaagtaagaaagttctttagaacaagattaagttctttgcttaatttttttttgagacggagtctggctctgtctcccaggctggaatgcagtggtgcaatctcggctcactgcaagctccacctcctcccaggttcgcaccattcttctgcctcagcctcccaagtagctgggacaacaggcgcccaccaccacacccagctaatttttgtgtttttagtagagacggggtttcaccctgttgaccaggatggtctcgatctcttgacctcgtgatccgcctgcctcggcctcccaaagtgctgggattacaggcgtgagccaccgctcctggccctttgcttaatcttttaagtataaagtaagcttaagctcatgtaaactccctatctgaaagcagaaactgaggcttggaaaagtgtgtatcctctttcaggtctcagcagccaggtggtggtgctggggtgggattgcgggtttttttcttccctctcacagcttctcgcaaaatggtgactccttgacttggttttggtttcagccgacaactgccccttcaaactcttccagcctcaccctgtcaggtatcaaagaagacaacagcttgctcaaccagggcttcttgcaggccaagcccgagaaggcagcagtggcccagaagccccgaagccacttcacgacacctgcccctgtgagtgctgtggccatctctgggggtcctgcagtgcccgccttcttagctcagggctgagtgctggccatccctgggggtcctgcagtgcccgccttcttagctcagggcctttgcataggctgttcctctgcctgggtgcttttcctgctacttcccgtggctgcatttgcttaacttactcttctgatttcagtctcaatgctgcttccttaggggtaagccttctctgaccctacattctgtagagatacccccattctgccattctctcttttgtggcctgggtttcacttgtaactaagtcattatccctgtatttggtttgcttagtacatgtctgtcctcaagcaggggctggcttcaggctgctgacccgtctcactgctccttctcacccgcctcctggctgtggcttctcctcgaggctggtgctgcacggggcgggcagtgcatggccatgtctccttgtccagcgtcctacttacagttgaggaagcccacagccaggaagtgacttgtccagggtcacagggaatgtggagagagaataagaaggctctggcttctaggggagggaggcttataactctacccttccctggccaggatcaccagggtctgttgggaacacatagtccctgcctggatggtaaccctcttgcctcctcccagatgtccagtgcctggaagacggtggcctgcggggggaccagggaccagcttttcatgcaggagaaagcccggcagctcctgggccgcctgaagcccagccacacatctcggaccctcatcttgtcctgaggtgttgagggtgtcacgagcccattctcatgtttacaggggttgtgggggcagagggggtctgtgaatctgagagtcattcaggtgacctcctgcagggagccttctgccaccagcccctccccagactctcaggtggaggcaacagggccatgtgctgccctgttgccgagcccagctgtgggcggctcctggtgctaacaacaaagttccacttccaggtctgcctggttccctccccaaggccacagggagctccgtcagcttctcccaagcccacgtcaggcctggcctcatctcagaccctgcttaggatgggggatgtggccaggggtgctcctgtgctcaccctctcttggtgcatttttttggaagaataaaattgcctctctctttgtgctggtctggactctgcctctctactgggccctgctcatggttccctggtgacctaggggcctcttctgggatatagggacctgaatgctcatcctcagaggccagccttatcggcacagcccaggcctgagcccttgaccctgtttccacagaggggcacaatgagatgagagcaatttctctcgtctctgcacccagtgggcatctctgcaaagctctgagtattaatagccatggggttgggcgggggtgggcagagactgggggcggaggaggacgatgggttggtgcagtagggccttgcctggcccttgccttgggtggctcacctgcccattaacaagcccctgcctcaagctgagcgtggcccccaggtcagaccagtaagcaaggaagaggggtgaaggcagctgggcagaaccctctagccccattggccaaggctgagcaggaggccaggatgggccagagcctctgcccttgtggccctaaatccctagggttgtggctacagagcacagtgcttggcaggtggttgggaagagtcactggggattgaagaggggaagatgccaagtctgagaatgtctaaatgaggaattgatgttttcagcagcaggcttcatgggacaggcacatgaacatccctgtgggcagaggttgagcagacttggggcaggtcctcacctggggcaagagatgcggccaactctagagggatggggactgagttaattagggtgccagagttcagatgtgtctggcctcagacacacc

SEQ ID NO: 12743 - DNA, 1215 bp, Homo sapiens
ctcagtcgctgcacgccagaactctgtctggctctccccgatcctgttctgagcaagctcgagtcttcgtggatgatgtgaccattgaggacctgtcaggctacatggagtattacttgtatattcccaagaaaatgtcccacatggcagaaatgatgtacacctgatagcaagaagctaattcatatgctttaaaccaatgaaggcttgtcaaagagatttagttaatggcagaccttgtggccactttgtgtgagaagacatctctttctgctcactgtgcttgcaataaaaacttttcttggcatctcagttaatcttcattctttcaacttactctcttgagttcttacatacacttcaaggcgagcagatcaaagaaaaatcccccttatttagaaatgttcctgggggatgaagaaaccataattacttgagactggcagcagtgggtatatggtaaaagcctttgtaaaacagtgcatttttcagatttgtttaaggtttgctagccaaggaaagtaaaatgtgattttgtaactgcactaaacatttgtcatgctgtagttgccagcccagaatattagaagttacaagactgatttaaaccgtctctgatttaatgcaagatatattgtgtctataaaggtttctcttgttattgttaagccagagatctaaggtttagattcaatttgaataaactagctggcctgccctctattgtttgagagagttattaaccatcactaaataagcccctgctggtgctattcatcctaagacatgttacatgcagtttcaagtaagcagcttggaatgggctgcttcagttggagggagggggtgtaatatttgaaacgagtgtgtgtcttcaccatctccagcattttaaatatatggcggttttttttttttttttttgttatcagttgtaatacaggtctcatacctcagtttcagatgttatagatggttacctctttgagctgccctgtcaccccagcaaccctaaaagagaattttgtacattctgtatcccacagatttggtcagccatttcaaaattccctccagtttggtaaaaaaaaaatctgtcttcggtttcagctggatgatgaatccttgtttttcaggtggctccaaaaagaatgttgcatgtgttcagaccatcctgagcagagccaccaaatttagtgacagtgtctagccatg

SEQ ID NO: 12744 - DNA, 1281 bp, Homo sapiens
ctccgtcagtaccagccacccaccgttgtattaaaaacgcccagcatggactgagttcttaccaggtgccaggtcccgtgctaagcatgtcatatgtattcacttaactaaccttacagagatgcaatggagtagaggctcttccatttaacaaaggagtaaacagactcagagaagccacatcacttgtaaatggtcccacggagatggaatttgcaggtctgtgattgtggaattctggagtgttagctccgcaaattcactacttcactcagccctcaccacaaacccccacccagtaaggtgctgccacccgcagtaaggatatgaaaaaactgaggctgggggtggtggacatgacttgtaagatgtttctagaaagctctgctgtgacaaccagtaactgttttttaaaagcccagtccaactctctgggctcggacctagttcgcggtgacatggccaaacctaccaagaaagtcgggatcgtcggtaaatacgggacccgctatggggcctccctctggaaaatggtgaagaaagttgaaatcagccagcaggccaagtacacttgctctttctgtggcaaaaccaagatgaagagatgagctgcggggatctggcactgtggttcccgcgtgaagacagtggctggcggtgcctggacatacaataccacctccgctatcacggtaaagtccgccatcagaagcctgaaggagttgaaagaccagtagacgctcctctactctttgagacatcactggcctgtaataaatgggttaatttacgtaacaacaacaacaacaaaaaagagcccagtccaaacccacagctgctaaaatttggccatggctacccaaaacccccacatttactattacccctatacccaccacattctcctaggatgggaagaggaagcaaagagttctttggtgaccatctccctggaagggtggaatggggtcatgggggctcttccatgagaggggccactatatgtagagaataatgtgtggccattatgagggggcccagtggtctcatgtgggcatggacatctagaggctgagagaaacgggctgcctggctgaactggtgaaggagccagtgtgggcgtgctaaggtaagccacattcccaggactttcggagtacaggctgctggctggagtgtttcccatgggccagtgttggcagagagcacctacaaggggtcctcttgggtcctgtcccctagagcctcctggaggggcagaggtgtggcagcagcaagaag

SEQ ID NO: 12745 - DNA, 1606 bp, Homo sapiens
atatagagaatggatttagagagatgagaccaggtgcagtccatatgagatgtgaaatagagaagtggaatcgtagggacggggagaaattgacaggtgagggctacttagcaattagaatttttttttttcaattttaatttttttttttgagacggagtcttgctctgtcgcccaggctggagtgcaatggtgcgatctccgctcactgcaggctccgcctcccgggttcacgccattctcccgcctcagcctccctagtagctgggactacaggcacccaccaccacgcctggctaattttttttgtatttttagtagagacagggtttcaccatgttagccaggatggtctcgatctcctgacctcgtgatccacctgccgcggcctcccaaagttctaggattactggcatgagccaccgtgcctggccagcaattagaattttaacactggcagttatgaataatatgaaggagaggtagatttctgagtgattctggtttaaccagctgggtggatggtggttccacgtattcaggtggcaaacaggaaaaacatgtgttcgaagaagaatggaggtaggtggtctcttaagaatggttaagaggcttgggagtcagactgcttgggtttgcatcccagctttgccgttttctggctatcaaacttgtcagctattatttgttgagtacgtactatttgatttatgaccacaggcagctgagcctcagtgttggtgcctagtgtacaagattgttaaagaataaagttattttgcaaagtgtaacccatttttagcactgacatagcactgacagtagctgctgatctcattatgggctaaaataagacaatattcaaaggtcagagatatctagccagaatctgatggaggctggatttcagattttgttacagaattagacagaggaacacagaggggacaggctcagttagggtggaggtgtggggtagggaagcaggacttgatataaattattggaatcattgtcttttaaaccagtggtttatgtcagggtatagcgtttcaagggatttgagggtcagatggggaaatgtagccccttattttgccagtgtgaagcagataccctgcttttctttacagtagcggagtcagcttaagagctttaaaggtcctaaacttcaaaaacattacagtgccccatcctccgccttaatgtaattcaaaatacaaacaatactaaactgtaaaataaatgtaacaaagtccaataaagtttttatttttttctcatgatgataactgatattaatttgaagtaacaaatgctctttaaaagtcgggaggcagtgtccctgctttgcttggtcctaccttaagaagtagtgaagtctgcctcttagtaggaaaaccagtagtctaatcaagactcaagtgaattatacatgtgaatgctgaattatatacaagcatgagtaagacagcattctgaataaggccaggatcatcatttaaagcaggggagtattttgagtcatcagatctcagggtggcctttcattccagatgagtacctttatgtttcatcactatgaaagggcttgcctagccttggg

SEQ ID NO: 12746 - DNA, 1488 bp, Homo sapiens
ataagaactaaaaatagcagcttcctctggtccccttcaaccctactggggggtagtgccagccaagtttcactggagaatttcttggccttggctggggggctgcaggaggctgatagaagtcaggtagaccaggcttttctacctgactctctcttgttttcttagccctgatgcaaagtttcagagcatgaccagcaagtggccagctgtgtgggtcaagatcagctccagctgggtctgcctcctgctttacgtctggacccttgtggctccacttgtcctcaccagtcgggacttcagctgaacctctgagtgccaaggacaccactggaactcacaaaggtctccttcaccgaaaacccatataccttttaagtttgtttcaactaaaatattaagtgaatgctttgcaagtttgactgtatgcaggtttatatcagaaggtgagattgaataatgcttgatgcagaatcgaaacttctcatttatctgtatattatgtttacttctaaggatatagcacaaagggaacattttttgtttaaagtgaactacagctgtgctgtgaagagagttctttataaagcctgtaggttcttttaactttggtttaaaatgtaagataggaaaatgttggatatttgaggccatgcttaatatatttatattgcagtatcctttaaaagcaaaaaaaaaaaaatgcatttatattacagttttcctctatgaaagtccttacttatatgatacaagcactgtgttttgtgcttaaactcttcagcggggtagcatcaaagttcttggggaaggatcgtatatgtgggtcccttccctagaagaatggttgctgatatggctactgcttctacatcttgagttttttaatttactttttttacactgtagcattgagactgcttgattcaagtctggtgctttgccagatgtattaatttccataaatgctttgtgagtttggttaaaatgaagattcacttgggaaaacactgcagctttagtctgtgttactatcttgttatgagtatgtaaaagtaaaatgcatgtgaatttatcatatttgcactatgaaggtatttggttaaaatacaaagacttttaagattttaaggccctttcttccaacagcttttatagttagcagccattctttattttctggatagccaggttttatcacgcttctagtcaggatgctcctattccttctaaaaattacggtctgactagtgagcaaagtcttgaatttattcaaaagtcctaaataccttctctaggtaagacacttggtagatgagagacggaaggcattgtcaagaaccattttcatgagaggtggtgtgcaaaaaggtagaataaaagagttctttcaacaaagatttactgtctattctgtactagaccctgtaggttttggggtacagtgttaaacatgatagaggctctgccgtcttggactttaatagc

SEQ ID NO: 12747 - DNA, 2121 bp, Homo sapiens
ttagtctttttaaaaaaaacatcctatactaagggcagaacccactgccccggcctcaattaccttggctgaaggaaagatggcggtaggagagaaaagtgaagaggcgtgagtgtaagaactgggagattccttttccagcaggcctgggtagctgccttcccagcccagccctccctggggcctgcgggagcccttttgcatgcaagggaggatggaggctggcccctctttatagaagcacatttctgccacctcccctgggaggcacccagaagcctgccactctttacctagtccctgctgtgtagggcgtagtccaggttagctaggtagagttagtgctccaagccctggggcctgttcttagctcatgcatagtccttacagagtcccaggaccgggggtggagaggagcctcaagtacattccaggagaccactgtctcctcgctggcctgggcctagatggggcagcctggctcacaggaggccagcccctcctcctccgcccccttccttcccttgtccccgtagggttatagctggagctgcctgttatactcggctgttctgatttattattcttggtactgactttctttatgagggactcctaagggttgtaggaccttggcagagggggcctggtctccattagagggtgttgttttctcctgaggacacccaggctgcctttggtcccaccctgttcctggtcccggtcccggtcccagtcccaccaggcaactccttccacccggaaattcttcccttcccttagcctgtggaaaccctgggtattctttaaagttctggtcaatgtatatcacctccacagagctgcttaccctgcactgggaaggggagatggagacgccccctttacccaggaggtcttcagagtttcctgggaccgcggtgggtggaatcccaaggctgggggtggaaggagcagggctctggagggattcgcattcaaggcacagaattggccccttgcctgtttgtttttctaaccagtgtgatttctctgctgttcgtttattacttaccattggaatattttgagccaggagagcgccttctctctccagccatcaccgctgtggttgttcaggggtagcttttcaaaaacagggcagagcctggctgtcccaaccagggggagcaggggcttggccctgacagcctgagcccttcccctggtgtctgcacagcctttataaagagagagagagctccgaagcaataacaacacctgggggtggtcagtgagggccccctcaatgattttcttgtttgttctgtgaaatcccgctcacctcctggaggggtggagcagctgggggctggagccctgtttctttgtgtcatcgtgagcatgtgccccttcccaggggctgtgaccattgggtgtgggaactacggtctgtcctcaccaagggatgggggtttggggaggagagtgacattttcatcattagcttcggagaagcttcaagcccatcctgtccccgctactgcctggccccttgctgactcaggctgcactgtttgaagaggagcagagaggctggcactaggggccactggggggctggggtctccaggggatgactgttttcaatctctgggccaagatcacatgcaggataccatgggaaggagccatctccactctccttctccagaacccccttgaagggcctttgggaccattagtccatttccattttacagacaaggaaatcaagacccagcttgggggaaaagccacccctggagtcacctgtgtgttcagtggcacccccagcctgggtcccctcctcccaatagaggctgagccggagccagggcagtatgaggtggggctgccactgcccatacctcctcctcccttctttctttgaagcctaatggccccccaaaagatgggcaggacaagctgtagcccatctgagaggttgggaaactgaggcccagaaacaggaagtgactcacacaagacccctcagcaagggtgcaaagggggaagaactaggggctccattgttcttcaggcgacaggagaccgttgctccagtgcatgtctgctgggacaaggattcctggcctcgaa

SEQ ID NO: 12748 - DNA, 2589 bp, Homo sapiens
gttttaagttgttaaatttgttataaatgactgctgaagttttgacctttgcaatcatccctgtctgcagtgacacaggaataattttaaactgtcgagtgagataagattatacatactgggccacttacctagggaacttttagtagccctgctttgattatacttcctttctcttgcagctgtggacatcggaaaaccagggagacgaaggagacgctggggagggagagaactaatgtttctcgtgctttgtgatctgttcagtgtcactctgtaccctcaacatatatcccttgtgcgataaaaaaaaaaaaaaaaaaaaaaagagaatcgtacgtcgactttcgatttttcacagcctcagcctaggaaaaatggttcatgggataaacagctggtatttgtatctaaaactcagattggtcacataaatgccacggcattccgaagttttgattttgattaacattgacaggattactgtgtgtttaattttttaaaaactgaacactgtgattatggggttttgtaatttagcagaactcttactggtagaaaaaatagacctgaattatgtgtaactttttggaaggtttaatctgatatcaaaataatcattgaaatacaattccattgtaaagttgtacagaaagttatagagattatattgtgatgctggaacttggagtgagacacacatcatttggcatttgagttgaatggtaattcacagtaatgctgccgttgttcgggacttaaagacacttgacctgtttgggctgttgccacttaaaagttcatgaccacaaatgtccacagtgtcttcctctgaggaaactcgaatcctgaaatggaaattctttgtggcagataactggcttatgacaccttgaaaagttcaagtgctcatataacacaccacactgaaccccctttcctacagcaatatgttcactatgttaccaatttgcaacttgtgcttcaatagtggaatctactttcattgttaacactgagctaaagaaaaaaagccgtgtgttttatgaatgaccttatctgtttcctggataatacctttaagaataatgtcctgagtcaggcgtggtggtgcgtgcatctagtcccaactatttgggaggctgaggcaggaggatcgcttgagcccaggagtttaaagctgcagtgccctgtggttgcacctgtgaataactgcactccagcctgggcaacatagcgagacctcatctccaaaaaagaaaacaaaaaacaaaaaaaggaatgatgttctgtagagatggcctttcacttgaggagtactcagttttcaggttcttcctagctcggggcttttaaattttgaaatctaaacattctttcccaccatcctttttgactgttgaccttggttttctcttctaagtttctgtccctctgcttccttactttttttcctttttgaattctatctttatctgtcttttgttcactttttaatgctatatatgggcaggggtgagagacattactgagcaccttggtgagcaagcctggctttaaagattggagaagagcttctggcaccagaaccctgtcttcctccagttctcaacacggtgttgctcttcagtcataccggaatctgaatcaaaaaagtatttttaaatatccatgatttctccctgtattgaggctagccctgatcatgctttttgtgcctgtcaccaggtctcccaagtgcactcatccaggtcagtgctcagatgtgtttaaggagaccctatattcagggaagttgcgtgaacactgcagtggggagaattgagaatagtcaggcctatcagtctcacagaatcacccctctacctttgatattccacttagctgtagagtccatctgtttgtccatctgctgaaatgagaaaagaaaaatttatgcactgatttaaaacaaaccaaaaaaaaagaaaaaaacaaaaaaaaaaatccctcctttctagctgaacaaaaatgtgcagttaatacttggcgcttgaaaatgcagtagtgaatgtggaaccaagcctgtctgtatatctggtagctcttttcttgctttgttttttcttaccagtattctgcctaacgtttgcttctgtgatggttatattgcctagcaagcacacccgtggttgtgaaaatagtatagcaaaaaagaaaaatccccggttattgatgtactagatttgtgtatgtcttttaaacagttctagtttcaccttacacagaataatcaggaaaagtgtaaaaattcaaaagtgaaataaaaattttatcagttagttgcctgtgaattgatgtgtcaccaccatctctgttgttaccagacctagctaactattctgatcacacttatttttaactctgttttctttaaaaataggcaaacagttttatttcattatttaggaccagaagtcaaggtgttatccaggggaagaaattaccattaattaaacagcctctttacacccgttacttgatacctctctaccttccacaacaaaccatgcaggtattaggtcctctttagtgacttctaagatttgg

SEQ ID NO: 12749 - DNA, 1092 bp, Homo sapiens
ccatagaggctaagaagagacggcaacaaaacttctgagcaaggccaggctgtgagggccccagctccacccaggctttgggtgaattctggatggcttgcctcatgtttgttagccagcacttctgctctgtcgtctctccacagcacctttgtgaactcaggaatgtgcgccagtgggaagggctctcttgacagtcagcgtgccatcttgatgtgtgtatgtacattggtcaggtatattatctcaaaggatttatattggcgcttttaactcagagttttaaaccccaggaacagagactcctagttgagtgatagctgggaaagttttacattgtctgtttttcttctcccaatagctttcaattgttctttctggaagacttttaaaaaaatataaatatgcatatatatatataaattataaatagattccccacgcagtgtggtggcatctctgtacaggtacagttttaaacggtttgcctcttttctgtaagattatggtactgtggaacatgagggcagaggacaccgggaggctgttagggggtcactgaatcccaggagccaacctccccctttgcagggctgcatttaaaaattaggtttgggacagttcttgtaccgtggtttcagccttgtgtggtcatcactggcttctggagctattggtgatgtccaagggaaagctttgagagtttatgtttactctttgagtcccaggagaagcctggcaccctctttgcaaattggcctttgctctttcaatgcctttcatccatctccactctctcaactgcctaaagtcacagcacagatactgcccagtgccttaagaggagacatgatctctaccagggactctcagcaaacacgggactgtgttcagtccacaaaggaaaagcgtttttgaagctctcattgttcatgtaaaaatcatacacgtggcatgttgctccacattccttacacacaggggtagaggggattgcttttgtgacccacgttcaaatatgtgactgttttcttttctcttttactgctaagcagcctggaaaggataaatgaatattagactaagatttgt

SEQ ID NO: 12750 - DNA, 2821 bp, Homo sapiens
cactgcaacctccgcctcccgggttcaagcgattcttctgctgggattacagcatatgccaccatgcccagattatttttttgtatttgtagtagagacggggtttcaccatgtcagtcaggctggtcttgaactcctgacctcaggtgatccacccgcctcagcctcccacactgctgggattacaggcatgagccaccgctcctggcctctctttcttttttaaacaaagaactttgcacttggccagagaggaggagaaagcccattttctcccttcctaagctagatccaaataaaagaaagttcagttttcccccataactattcttgggtcatgaactttgatctggagtttgttttgtttcaggaatgtgtgcacccagcttgctgatccaacaaagtctattgcttaccagtctagcttgatgaagccttttggccagaagtcaatttgttttggatcagagaaatttcctgacaaggtatatttgttttctagtgacagaaaggcaaaggaacaagtcctagttgttgttgttgttgttgaatactaaatttaagatatgtcagcttgctttcaatgagccttgggcttctgttattgcttgagcatttggaactcgagcttccagagaaatttgaggtcctcgcttgttctctgccttcaagaaacaatgacctgattctgtctttaaaaaaaaaaatctcagaattctttttttgtttgtgtttttttttttttttgagacagagtctcactctgttgcccaggctggagtgcagtggcgccatctcggctcactgcaacctccgcctcccaggttcaagcaattctcctgcctcagcctcccaggtagctgccactacaggtgctgcaccaccacgcccggctaatttttgtatttttagtagagacagggtttcaccatattagccaggtgggtcttgaactcctgaccttgtgatccacccgcctcggcctcccaaagtgctgggattacaggcgtgagccaccttgcctggccaaaaatctcagaattctttaagactgttttaattgctccatcagtaattttgaagcactttcctttttttttttttttcccctttttgtccctttccccaagccaccaattggatggatgaatgtttgacggggaagaggaagggtaggaggatgcatggatgagtggatgagtggatcgatggatgtattgataaatagatagaaccagtcatctgaagcaacttaagaattgtagccttgactccttgagactgtagatttcgatccaggaaacatttatttagcacctgccagatgccagaaatttataccatttaaaactcagtaagtcttttaaatatcaggaaggagagaagcgacatcatgatacatcctatgggtattaaaaagccaatagaatattatgaataattttatgctaataaatttaacaacttcaacatcataaacaaattccttgaaaaataaaaagtaccaaaattcattcaagaagaaatagataccagcctgagcaacatggcaaaatcccatctctacaaaacatcaaaaaaaaaaaaaattagtcgggcatggtggtgcacacctgtaatcccagcttgtcaggaggctgaagtgggaggatcacctgagcccagggaggtcaaggatgcagtgagccatggtctcaccactgcactctagcctgggtgacagaatgagaccccgtctcaaaaaaaaagaagaagtagataatctgaatagccctatatctatagaaacttaatagtgctgggagatataggtattattatcctcattttacagatgtgaaaattgaggctcagagaagtaaagtctattgctcaaggtcatgtggctagaatatggcagagccatgattcagatccaggtcttctgattcttattccagtgtcctttctagcataccatgttgcctctaaagattgcagctccttatttactagaaaattgttcctgcccaatctacatctccacctcaccccatcttttcttaagcactatgtttgtgtttttatcagtattatattcattgtctttggaatacatgttcttgtttgtgtttggaaaaaaaatctcttttaccagcttgcactcggaccaacttggaaaaaaaaaagcttaaatgtttttgctatgtacagtttaaaaatgtgaagtttgtagctttaactttttgtaagaaaatctaataacactggcttaagtgctgacttgaaatgctattttgtaaggtttggatgtaagtaatcaattgaggtcagcagtttgtatgagacatagcttcctccattgcccccactccttttttcttttttaagtttgagatgcttcctgtgtttttatgttagaattgttgttctccttcttttcttcttcctatacctcatcacgtttgttttaaataaactgtcctttggaccacaaacccttattaacgagaacctcaatatatagcctggataatggtgttgtgaacaatctttgtgacattgactcagtggtgtgtttattctaagatccaaagctggggagaggttggtaaacttttgttgggcttctattatgtgccagggtactgagctagttatcaggaatataataaagatgaaccagatacagtttttgcagggcatttggggagttagccaagcacaaaaacacacaacattgaacataccatggtagaagaaggtacagggcctgtggatacacagaagagggagtgacggttctgctgggatgtccaaggaaactcttctagaggagaca

SEQ ID NO: 12751 - DNA, 1961 bp, Homo sapiens
actggcttggactttagcggggagggaagccaggggattttgaagggtggacattagggtagggtgaggtcaacctaatactgacttgtcagtatctccagctctgattacctttgaagtgttcagaagagacattgtcttctactgttctgccaggttcttcttgagctttgggcctcagttgccctggcagaaaaatggattcaacttggcctttctgaaggcaagactgggattggatcacttcttaaacttccagttaagaatctaggtccgccctcaagcccatactgaccatgcctcatccagagctcctctgaagccagggggctaacggatgttgtgtggagtcctggctggaggtcctcccccagtggccttcctcccttcctttcacagccggtctctctgccaggaaatgggggaaggaactagaaccacctgcaccttgagatgtttctgtaaatgggtacttgtgatcacactacgggaatctctgtggtatatacctggggccattctaggctctttcaagtgacttttggaaatcaaccttttttatttgggggggaggatggggaaaagagctgagagtttatgctgaaatggatttatagaatatttgtaaatctatttttagtgtttgttcgtttttttaactgttcattcctttgtgcagagtgtatatctctgcctgggcaagagtgtggaggtgccgaggtgtcttcattctctcgcacatttccacagcacctgctaagtttgtatttaatggtttttgtttttgtttttgtttgtttcttgaaaatgagagaagagccggagagatgatttttattaattttttttttttttttttttttttactatttatagctttagatagggcctcccttcccctcttctttctttgttctctttcattaaaccccttccccagttttttttttatactttaaaccccgctcctcatggccttggccctttctgaagctgcttcctcttataaaatagcttttgccgaaacatagtttttttttagcagatcccaaaatataatgaaggggatggtgggatatttgtgtctgtgttcttataatatattattattcttccttggttctagaaaaatagataaatatatttttttcaggaaatagtgtggtgtttccagtttgatgttgctgggtggttgagtgagtgaattttcatgtggctgggtgggtttttgcctttttctcttgccctgttcctggtgccttctgatggggctggaatagttgaggtggatggttctaccctttctgccttctgtttgggacccagctggtgttctttggtttgctttcttcaggctctagggctgtgctatccaatacagtaaccacatgcggctgtttaaagttaagccaattaaaatcacataagattaaaaattccttcctcagttgcactaaccacgtttctagaggcgtcactgtatgtagttcatggctactgtactgacagcgagagcatgtccatctgttggacagcactattctagagaactaaactggcttaacgagtcacagcctcagctgtgctgggacgacccttgtctccctgggtaggggggggggaatgggggagggctgatgaggccccagctggggcctgttgtctgggaccctccctctcctgagaggggaggcctggtggcttagcctgggcaggtcgtgtctcctcctgaccccagtggctgcggtgaggggaaccaccctcccttgctgcaccagtggccattagctcccgtcaccactgcaacccagggtcccagctggctgggtcctcttctgcccccagtgcccttccccttgggctgtgttggagtgagcacctcctctgtaggcacctctcacactgttgtctgttactgattttttttgataaaaagataataaaacctggtactttctaaa

SEQ ID NO: 12752 - DNA, 1532 bp, Homo sapiens
gttcttctaggcgtctggtatcataacccttgcttcacacttatctcgtcacttctgaccactatgctgccgtcctaattgtccctaccctcccaaataacctaaggccaggacaacccagtgacaactcactgctgtcctctccccacagtgccctgggcttgctgtacttcatccggcgaggaaagcagtgtctggatttcactgtcactgtccatttctttcacctcctgggctgctggttctacagctcccgtttcccctcggcgctgacctggtggctggtccaagccgtgtgcattgcactcatggctgtcatcggggagtacctgtgcatgcggacggagctcaaggagatacccctcaactcagcccctaaatccaatgtctagaatcaggccctttggacatcctgctgacacttgggccccttaacaccttgggctgctcagaccctccagatgaggtccagcccagatctgagaggaaccctggaaatgtgaagtctctgttggtttgggagagatagtgagggcctgtcaaagaaggcaggtagcagtcagcatgacagctgcaagaatgacctctgtctgttgaagccttggtatctgagaggtcaggaaggggacctctttgagggtaataacagaattggaaccatgccactcttgagccacaatacctgtcaccagcctgttgttttaagagagaaaaaaaatcaaggatatctgattggagcaaaccacttctttagtcatctgtcttacccccctgggacagctgttacctttgcagtgttgccgaatcacagcagttacctttgcagtgttgccgaatcacagcagttctgttggagaaacgcttggtttccggatccagagccacagaaagaaatgtaggtgtgaagtattaggctgctgtcagggagaggatggcagatggaggcatcaagcacaaggaaaatgcacaacctgtgccctgttatacacacgttcatgtgcacccaagaacctatgactttcttccagttccttctaccaggtccccatcctgctgccagctctcaacatagcaggccataggacccagagaagaatcccagcgttgctcaaagtctaaccatcataaagacactgcctgtcttctaggaatgaccaggcacccagctcccactggactccaattttttttcctgccttatttagaattctttggcgggaagggtatgatgggttcccagagacaagaagcccaaccttctggcctgggctgtgctgatagtgctgagggagataggaatttgctgctaagatttttctttggggtggagtttcctctgtgaggggcttgcagctatccttcctgtgtatacaaatacagtattttccatggttctgcctgcacttactttgtaatgccacggttgagattgagagagatcagcgcagccaggcaagggaactttaaagaattattaggccaccttctccctttcctggaccccagagtcattcctccatttggttaaaata

SEQ ID NO: 12753 - DNA, 1102 bp, Homo sapiens
tgaaagagggagcagaggtagccccaggacagtgagtggatttgtgtctctatccagtgtggataaatcttggaaggagctcagtaatgtcctctcagggatcttctgcgcctctctcaacttcatcgactccaccaacacagtcactcccactgcctccttcaaacccctgggtctggccaatggtgagataacccctacagccctttccttcttcctcttacctcctgcccaaacctttgcctccttttccctcagtttcctgcttcctcagcctgggctagatcctaagtcccctgtgtgtgcaggcccccaatactgtgccatctctgcatgccttttcccaaggagagaagggagtcctactcccagttgggactgtccagactgtggtgctagaggtggtgtggggagcaggagggtcattcccatctctggaatgtggatcccgaggggtcagagcccaaggcccaccccagacagacctctgtctccctcagacactgaccactactttctgcgctatgctgtgctgccgcgggaggtggtctgcaccgaaaacctcaccccctggaagaagctcttgccctgtagttccaaggtgaggccgcagagcctggcagccgggggcggggggtgtatagagaacctgcgccccatgccaagtgctccatacagggcttctcttatctctttccatctcctccaggcaggcctctctgtgctgctgaaggcagatcgcttgttccacaccagctaccactcccaggcagtgcatatccgccctgtttgcagagtaagtcatggggagtagaggaagctgccatccaggggctcagagaaggtacatgtaaagcatgtggtcagtgtctggctcaggctgagtgagtactgagtggtagatgtgatgacggttattcagggcattggccaagcaccaagaaaacagtggttgcctagcaagcactgaataaatatttgtcatggaaaatagtggttcagaacaatagctatgcgggtgcaattgctagctcagtcacttgccagctggcgtaaccttgggtgaatcatttcattcccctgagcttggtttcccaccctg

SEQ ID NO: 12754 - DNA, 1255 bp, Homo sapiens
agagattgagctatgccttctgttgaaaggttttgagcctaagagaacattggaaacactgtgttgcattgcccaatactgccggaatgaggatggggtgagatggggaggagcagccagtcctgtctcaccgctcttcccctgaccccaggttcccagtctctgatggctctaactactttgtgcggctctacacggagccgctgctggtgaacctgccgacaccggacttcagcatgccctacaacgtgatctgcctcacgtgcactgtggtggccgtgtgctatggctccttctacaatctcctcacccgaaccttccacatcgaggagccccgcacaggtggcctggccaagcggctggccaaccttatccggcgcgcccgaggtgtccccccactctgattcttgccctttccagcagctgcagctgccgtttctctctggggaggggagcccaagggctgtttctgccacttgctctcctcagagttggcttttgaaccaaagtgccctggaccaggtcagggcctacagctgtgttgtccagtacaggagccacgagccaaatgtggcatttgaatttgaattaacttagaaattcatttcctcacctgtagtggccacctctatattgaggtgctcaataagcaaaagtggtcggtggctgctgtattggacagcacagaaaaagatttccatcaccacagaaaggtcggctggcagcactggccaaggtgatggggtgtgctacacagtgtatgtcactgtgtagtggatggagtttactgtttgtggaataaaaacggctgtttccgtggttctttgcctcttgtccttgagtcctgggaagagctggggactggggattgtttgctgagtgcctgaacaggacctcctaccctatgcctgcaaccccctccacaaaaaacaaaaaaccctacctcctcccacctggccggaaatttcttctcctgatctgctccccctgtcctccccatccccatctgattgtgattcccagaactccccgggttgtttgggagtgtttctgaaagcataatccatggccatggaaatgaatcatcctacttcttgggggcattgagagtcagtccacatcagcaagggtagagtggagaggtgggagggctctgggtggtgggtctctaactgtagtgtgcatcagagtcactgggggcacttgtgaaaataatgtatgttcctggggtccagatcctactaattcagttggt

SEQ ID NO: 12755 - DNA, 1149 bp, Homo sapiens
ccaactgcatggataggctttgcagtcaagaagaccttggttcaaatgttagctctgacacttacctaaccttctcacctccctgagtcacagttatctcgcttataaaatgtagctaaataagatctaattgatcagataatcccattttaacctaaagaagaaggcatggcagaacttcctaatagtagaaggattcttggggagagaaatggccatgacccctcaggaaggccacagtggacatctgggaccacagtatacccaggtgcctgctagggatggtctgaccacagtatacccaggtacctgctagggatggtctgaaggagaagagtatgtctagaacctgtagaaaatgcaagcagagcccccagaaggtgaggctttgctgtgtgggtgtgtgggatggggtggggtcaaggagctggtctaggatttaagctgcaggtactcctgcctagtctaatggatattgttgttgatggtattgttataattttcttcctccagctccagccaccaccaggctgagcagtgaggagagaaagtttctgcctggccctgcatctggttccagcccacctgccctcccctttttcgggactctgtattccctcttgggctgaccacagcttctccctttcccaaccaataaagtaaccactttcagcacgttctgtctctgtctcccctgacttgggttgaggtgggtgggcaagtgttaagggtgtgaccagatcatccaggcatgaagtccagagaaggatcatctggtaggtgttagcattctcctggtggatccctgcatcaaccctatgaatctggtcattattcctccaggaggatggatgagaaaaacgaggctcagacaggtggtggggtgcttccaaagtcactcagattcattgctgggggtgctgataagcagcagcatgcaccaggtgccagacacggtgctgggaggtttgcttatgagatcctctgggtcctcaaaacaatccccagagcagttaacaacatacccctgtcatagacctggactccatgaggttacttgccagtggccacacagaaagatggcaatccaggatcctctcttgttgatactttaagtcaaagttttattttatataagtaatatagtca

SEQ ID NO: 12756 - DNA, 1134 bp, Homo sapiens
tgcccgcctcggcctcccaaagtgctgggattacaggcgtgagccatcgcacccggcctgttttaacattttcataaggtaaaaacctttcttagctcaaaggtctttaaaaaagcaggcaatccagctgggcatggtggctcacgcctgtaatcccagcattttgggaggctgaggtggacagatgacttgaggtcaggagttcaagaccagcctggccaacatagtgaaaccctgtctctactaaaaatacacaaattagccaggtgtggtggcgggggccctgtaatcccagctactcgggaggctgaggcaggagaatcgcttgaacctgggaggcagaggttgcagtaggccaagatcctgctgccactgcactccagcctgggagggtgagactccatctaaaaaaaataaaataaatggcaacccctggtctaagataagagataaaacatcaggtggtgaggttgaggtttggggcttggtagcagttgccccagtcatgagatgactcacttaacccgtctcctttaagtgagctgggctgggaggcttcctacaggggaagaggcccctctggggagctgactcagccaggctccctgaacttttttccttgtcccatcctggggtcaataaaactgaatgttgcatattctagcacttgtctagttttttttttgttccatagaaggcagtttagggtatatcatggagagaatagactttagagtgttatacaacatgtgaatcctggttggttccttccctgcttgatttttgtgcctggttctgccttttactagctatgagacttattaggataagttacccctctaaacctcaacctgattatctgtaaaaatggggatctccacagggtatgttcacagagcaggcatacctagtgggtgctcaattaagtattaattttccttccttgcctatggtcctatgacctgccttcaacatgctgggaaatttaaggcaagaggagaattcaaatacctaggacttaatataagaaattctggccaggcatggtggctcacacctgtaatcccagcactttgggaggccgaggcaggcggatcacctgaggtcgggagtttgagaccagcctgaccaaca

SEQ ID NO: 12757 - DNA, 1715 bp, Homo sapiens
ggaggaagactgtcacgtggcgccggagttcacgtgactcgtacacatgacttccagtccccgggcgcctcctggagagcaaggacgcgggggagcagaggtgagctggcaccggaggctggaggggatccccgagcccgggatcggtgcgcggcagaggaggctcgcgggtgggagctggcgctggggccggggcttccctcgcggaggcgccgccagcaactccccgggggctgctgcacggaagcgctgaggagcgagtcaacagcccctctgctgcctcccgtagatgatccgagccgcgccgccgccgctgttcctgctgctgctgctgctgctgctgctagtgtcctgggcgtcccgaggcgaggcagcccccgaccaggacgagatccagcgcctccccgggctggccaagcagccgtctttccgccagtactccggctacctcaaaggctccggctccaagcacctccactactggtctgccgccctgccttctgggcgggattgggagaagagatgacggatgagggatggggggtagttctgcagacccctgaggatgcctgggagccgggagggctggaaagggcccctccaactgcgccaaccctgccctgacccccctcccaggtttgtggagtcccagaaggatcccgagaacagccctgtggtgctttggctcaatgggggtcccggctgcagctcactagatgggctcctcacagagcatggccccttcctggtgagtggacagcagggggaaagcacagttcccaaagtaaaaggctggggaaagcgagagaggggctttgtgattttccaaaaagtttccttccttctaagcctcgggattttcctctatgccattggctttgctgcctgtacctctcagaggttttacccacatgtaaagtgcctctcatggtggccctttccctccacccagctggcccttgggacttactcagccatctctttcctcctcaggtccagccagatggtgtcaccctggagtacaacccctattcttggaatctggtatagctggagctgtgggtgtgtctgggcacttggatggggtggcatttagctaatttttccctcccctctagattgccaatgtgttatacctggagtccccagctggggtgggcttctcctactccgatgacaagttttatgcaactaatgacactgaggtgagtctggtgcctgcccatctgccccaggctccccggtcctccatccatggcatgatgctgggagagagagcatggccttggagtctacttttcgctctgtcatatgctattgtggtatggtggccagtcacttcctcttgcacaaatagggtgggttaatgtcattatctctgaagttctttccagttcaaataccaaagcttcctgattccctctgtcttgctctgccatccccaggtcgcccagagcaattttgaggcccttcaagatttcttccgcctctttccggagtacaagaacaacaaacttttcctgaccggggagagctatgctggcatctacatccccaccctggccgtgctggtcatgcaggatcccagcatgaaccttcaggtgcagggtagctgcaggagggaagggaggtagcttgaggctgtggccttacagttagcaaggtcagactgactggtcaatgtccccatccaacccagcttcctgcataacctc

SEQ ID NO: 12758 - DNA, 1173 bp, Homo sapiens
gctgagagataactgggccggaggcaaaggagcaggacccacccgtcctttccctctggctgccttttaggctgggtcatgggtcaccatctggcccctgtatgggcaagtttttttggagaggggtggggagggttctgggaagaataaagggtttgggatgaaggaattgcccccgagtgagcagttatatggggaggagggaatggtggggtcaggagctcacgaacattgctcctcagggcgccggccacatggttcccaccgacaagcccctcgctgccttcaccatgttctcccgcttcctgaacaagcagccatactgatgaccacagcaaccagctccacggcctgatgcagcccctcccagcctctcccgctaggagagtcctcttctaagcaaagtgcccctgcaggccgggttctgccgccaggactgcccccttcccagagccctgtacatcccagactgggcccagggtctcccatagacagcctgggggcaagttagcactttattcccgcagcagttcctgaatggggtggcctggccccttctctgcttaaagaatgccctttatgatgcactgattccatcccaggaacccaacagagctcaggacagcccacagggaggtggtggacggactgtaattgatagattgattatggaattaaattgggtacagcttcaaatcccgtcttctctgtggcactgggggttagagggggcactacaggctatgaatgtgggaaaagaggggctgagaggggttggggtcctgaatgacagctgccagcttggggattgagggctcagacagctgctgtggacggtgtgggggcagtggacgccctgacatcagcaggccggttcttctcaatcacctctcgcagccctttggcaaagtggagatcagccccgatggtgaggaatccctgtgttggggagaggggagcctcatttattcattcagttattgaggccagagtttagagatcaagagacagagtgtttgtctttcaggaactcaatctaatggataattccatgtcaaggtgttaaaatgaggctgtaggagtgtagactatgggtgtcaaggagggcttcttggaggaggtgacctctgagctaagacctgaacaattagtaggtattgggatgggagaaga

SEQ ID NO: 12759 - DNA, 1219 bp, Homo sapiens
ctggtcccctggaggtccaaactcatcacgcggcggtagcacgagggaactgggaacgtcccctcccccgtgtcccaaatcctctgggagccagaacgcaagtcgcatcgcctctctgagcctcagtttccacatctgccatatggaggcaagattattggttccaagttccccgaagagttatctggagggtaacgatccaggctagttcccacttatggttggacgtccaaggaatgggtttaagcggctcagataactcctgcgaccccaccccacccccaggcccgctcgccatggccctcttcggggccctcttcctagcgctgctggcaggcgcacatgcagagttcccaggctgcaagatccgcgtcacctccaaggcgctggagctgggtaaggcgcaggggcagacagggacggacgggagcggacggggttggggtcgccccaacagtgggcacgggagctaagtaagggtttctctgctgcttcagtgaagcaggaggggctgcgctttctggagcaagagctggagactatcaccattccggacctgcggggcaaagaaggccacttctactacaacatctctgagtaagtggggggcggggcctcgcgatccggggcggggcctcggcggtggaggcggggcccgagaaatctcagggtctcgggagactggaggctgagtgggatggggcgtggccaaatcgatgaggcaagacttaagaaaccggatggggccgaaaagataaaggccaagccagtcatcataggcgggaccaggcagatgggcgtggccttgaaaatgtagagggggccaagaaggaagcaggaccagtggatgtgaggcgtggtcgaagaacaacagaaaggtggagtcaaggaacttcccaatagatgagagtggagtctcgggcacggggtggagttaatcggaggggtggagaaactgaaggctctaagtatggtttaggatgagggagggggaataaggaattgagatgtgagacggagcttaggtgatggaggcaaagtgaacggactctattaaaagaccgggtgtagcaaccccagggtgtgggaggggagggggtgcaagcaaacaagactttttttttttttttttctgagagggagtcttgttctgttgcccaggctagagtgcagtggcgcgatcttggctcactgcaacctccgcatcccgagttcaagc

SEQ ID NO: 12760 - DNA, 1457 bp, Homo sapiens
cgctcccaggccggcatcgagtgtcatcaatttctaccacctgctctctcttctgcccaaggctgtgttgcttattccttacaaagtttatactgcatttggggctgtatctttttttgttttttgttttgtagaaaataaatatctccgggggcagtacaggtgtctgggcttgtatttgatggggtttctccggtccctgtttctactggatttggagccaggcccagctagccaagtttggaatggcatttgtcatgtcagtagccaccacctttgttcattgtgaacctaccaaggctttccagcttcatacacattgaccagagctcaagctcctgcctgcaactcctgcctagagttgaagaaaagcaaactggccttggcaggcacagtgtcatcataccctcaccccatatgtttggggtctgcttgaggattcataaatcagccactctggattgttgaggaatggccatggcagccacagaaaaaagaatttttctctctgagccaaggttgttttttgtttttttctcttttcttttttgttttcatttcattggaagatctccaatggactgaacagctccagtcagcagcagttaccacaaactgtgaatctgggccccaccactcttccctgttaaccagttctgtcagcatccccctctccagcagcacttccatgaagttggttctgagactctggccgtgaacacccgtttcttcagtgatttgttttgggcttttggctcaaaaccccaggctcttgtttttgtctagactcttattctgtttcctgagcagcaggaggtagggaccactttgatgtcagacttctggtagctggacatgttctcgagatgggtggctgttcgcgacttttgtaccagagtgaaattgttagaaggagggtttctggctgtggttctaaatggagccccaggaagctgccctctccccagggtttgtgctcagtagagccctgtggatcacagtcttgaggtcctctagcaggggtgagggagagcagcgacttcagctgagtccctgccagtggttaagcaaacaatggtttcaaaattcaaggtccccaaatggcagcattttatgttctgacctgtttgtgttatatagtggttttttttttcctctttggaactcttgtgttgttaataaaatgaaatgattactttttaattaaaatgaaaaaagtaaaagctttgttcatcttttttgggtgtgaatatgctctttgcaggatgctttccccaagtcagaggtgagggctcctgtctcgaggactctggtctgcccccttttgtcctcagcatatgatccggcctcaaacctctttgaaccctgccttctcttcataggtagctcacttagaggctttaataacagttcagagcaaaggcctgttggctaattatagtgctgtgttcaacatc

SEQ ID NO: 12761 - DNA, 1156 bp, Homo sapiens
aattttcgatcattatctttccatttattagttttaagaaacatgtaatgacaagtacttgccccactggagccaggctccctgggttgaaatactaactctgctgcttgtgtagcctttcaacaagttatttagcctctcagcctcggttttctcacctgtaaaatgggagacatagtagcagtatccatgtcatagggatgttgtgaccattagaggaggtatgtgtgtcacgtattatgttcaaatgtgtgcctggcacatagtgcccaataaatgttggatttcattaaattgcctattttttcattaaacatcattgtgcgccagcaccataaactttgtcctcagatgagaaagtgacactcagagagaagtaacttgcccaaggttacacggttactaagtggccggtccaggccctcagctccttatgcctctgactcagaagccctggctttttacttttacgcttcttgcctttcttttatcagtattttttaggtaccagtgggtaccaggacattgttaagtgctgggagatctgggtgggggatattcagtagccaacaagcggacacattgctgccctttcagagacttaagatttcatgaagttatttgtgtattcatatttctgttttcagcctcatgatctgtttcgttaagcagagattgtattatagctggcttgtttattgctgtatccccattgataacatctctcagtttctagaaaagtatactgagcctggttgactttcagtaaagattcattgagtttattggagctattgttccttgtatagtagcagaaactgaggcttagagaagttaatgtaattttaagattagattagacaactaataagaaaagcagctgggatttgaaccctgtcctctctgactacgaagatgaacctcgaagctagcacactgcttggcctcctgtttgtgtcctcatcagtagaaactgctctgactgggctgtgccttgctctttgtttttgttttttgagacagtgtctcactttgtcacccaggctggagtggtgcagtggcacaatctcagctcactgcaacttacgctccctgagttcaagctattctcctgcctcagcctcccgagtagctgggactacaggcgtgagccacc

SEQ ID NO: 12762 - DNA, 1202 bp, Homo sapiens
gattcctcctacttgcttctgtgccatgggtataatttgcaaatagaactgggttaatgtggtcaaggacaactgaggtggaaacactggcctggataaaagcactttgggccaggcatggtggtttatgcccgtcatcccattacttttggaggcagaggtgggtggatcacctgaggtcggggtttgagaccagcctggccaacatggtgaaactctgtctctactaaaaatagaaaacttagccaggtgtggtggcatactcctgtaatcttagctactcgggaggctgaggcaggagaatcacttcaacccaggaggcggaggttgcagggagccgagaccgcacccttgcactccagcctgggcaacaagagcgaaactccatctcaaaaaaaaaaaagtaatttgtatgtcaataagccccaagaaatcccttacttattcttttcacagatcttttctcaccttcatcctctgaaacttttgcattttttgcatagagaaaagagttgaaggttcaagaaccacatacacaagaggatacgtcatttgcaaaaatatccacagttgccacagaaagatactggcaaaaattctgactgacccaggttaagattcaggatgctgccggtggtggaggttttgtccgttttcgtcgtgataggagctgacagttgaggagagaagggctttgggctgccggataaactccctgcttgtcccgtcttggtggaggctggtgaagctgaaaaagtatggcattgttaaaagacaggtttacaaataaacaagtagaacgtgtaggtgtggtgtagggagagaatggagagattatgaaattgtgtttgatttcagcaaggccgctacagtatcacgaatggggtggggtggagcatagcaggttggccatttattttcagcaaagggctttaaccggatgtgaaaccgttaaagccacaaatgaagaaggtctccccagttactctattaagcacaaagctctaagacaaatcggctaagctgccactgaaattggtttggcccattcacggatataaatctcaacataaatagcgattaaaccaacccccacatggtccagatgtggagaacgggagccaggcttacaaatgcgtatcatctgtttgtggaaagacaccacggccagctcacacgcagccactgcacctgccagggac

SEQ ID NO: 12763 - DNA, 1579 bp, Homo sapiens
ctccaggctaactggaaggcagcactcccttttttatatagtagaaaaatgaagtttattataagtttttatattttctacttgttcatttggtgcaaactcaagatttcttttaataggtgcagtctttgagataatttgtttttacctgtattgccctttatcttttttaggtaattctttgtactcctgctgtctacctctcctcacaccccagcaccccccattttttcaaaccttggtatctgttgggtgaacagtataatcttttcatctgcttttagaatgtgggatatttccagtacctactttttttttttttttttgctgaatccaaagatatataaataaaatatatatattttataaagatcagaatgatataaaggagatacatgtttcttcctttaaaaaataaacggaagttacattgttaatgttcatattatgatgccacttttctaaactgcatctggattgaaaggtgtaaatatcaataacagtgctacttagttatcagtatttaatatctgaggtgagttgggggtatctatattaggggtagggtattacagaagataattggcttgatgtcctagaagttctttgatccagaggtgggtgcagctgaaagtaaacagaatggattgccagttacatgtatgcctgcccagttccctttttatttgcagaagctgtgagttttgttcacaattaggttcctaggagcaaaacctcaaggattgatttattgttttcaactccaaggcacactgttaataaacgagcagggtgttttctctcttcctttctaatatatggagtttcgaagaataaaatatgagagcaatatttaaattctcaggaattgacttatactcttgagaatgaattcagtttcaatcaagtttacattatgttgcttaaaaaaatagaaattattctttatcttgcaaagaattgaaaccacatgaaatgacttatgggggatggtgagctgtgactgctttgctgaccattttggatgtcattgtaaataaaggtttctatttaaaattggagcctaaagagttttttttttttttttttttttttaaatccctgttgggttaagggtaaaggaggttaaggaagcctatttcaaataatggtaacagtttctgagaagttaaaaaacgccactagggagttgctagggagccttggcctgtttggggcattgaaacaaatgtgggtgcttttagggattatctccgtcatctgttaaatgagaaatgggttggactggtgattgatagttgaaatctgtcaactacttgtatcaggttagactacctgatacacaaagaagggttggccaaggcgaatttctttgcaattgattaatacttttttaaaaaatgaagtaccaaagctggtatactatgagacttacctgtagtcccttgaagtatggtagactttttagtcaatctacaaccatctactccccttttaagaaaatcttctaaacccaaggcattttcttccaaaaagatgttgactggtagtatcttgaatactttaaaaaaacagacac

SEQ ID NO: 12764 - DNA, 1837 bp, Homo sapiens
gtgaactgccacttgcaacctctggtctactcatttcttcctttatatgcatataaacctgtgtggctttaataggacattagtaacaggtcacctaagcctttcttcggtgcttctagaattaaggtacagaatctttacatatcacaatctccttagccactattctgtccagatccttaaatgccatccttgccaggcattgggtgtataagtaaacaaaaaattgaggtgactaggtggtggcaatcccgttctaagtaacctagaaatattcattctcagcagccttgaagcaaagcttcctcagctataggaccgattaggaagtcatgataaagaccatgatagctaagtgctaagatgagtttgttttgttctttaggggacaactgtgggaaggctgggaaggttaagaaacaacagaggtggacctccaaaaacatagaggcatcacctgactgcacaggcaatgaaaaaccatgtgggtgatttccagcagacctgtggtattggccaggaggcctgagaaagcaagcacgcactctcagtcaacatgacagattctggaggataaccagcaggagcagagataacttcaggaagtccatttttgcccctgcttttgctttggattatacctcaccagctgcacaaaatgcattttttcgtatcaaaaagtcaccactaaccctcccccagaagctcacaaaggaaaacggagagagcgagcgagagagatttccttggaaatttctcccaagggcgaaagtcattggaatttttaaatcataggggaaaagcagtcctgttctaaatcctcttattcttttggtttgtcacaaagaaggaactaagaagcaggacagaggcaacgtggagaggctgaaaacagtgcagagacgtttgacaatgagtcagtagcacaaaagagatgacatttacctagcactataaaccctggttgcctctgaagaaactgccttcattgtatatatgtgactatttacatgtaatcaacatgggaacttttaggggaacctaataagaaatcccaattttcaggagtggtggtgtcaataaacgctctgtggccagtgtaaaagaaaatccctcgcagttgtggacatttctgttcctgtccagataccatttctcctagtatttctttgttatgtcccagaactgatgttttttttttaaggtactgaaaagaaatgaagttgatgtatgtcccaagttttgatgaaactgtatttgtaaaaaaaattttgtagtttaagtattgtcatacagtgttcaaaaccccagccaatgaccagcagttggtatgaagaacctttgacattttgtaaaaggccatttcttgggagttttttggtgtgtctgtttttttaaagtattcaagatactaccagtcaacatctttttggaagaaaatgccttgggtttagaagattttcttaaaaggggagtagatggttgtagattgactaaaaagtctaccatacttcaagggactacaggtaagtctcatagtataccagctttggtacttcattttttaaaaaagtattaatcaattgcaaagaaattcgccttggccaacccttctttgtgtatcaggtagtctaacctgatacaagtagttgacagatttcaactatcaatcaccagtccaacccatttctcatttaacagatgacggagataatccctaaaagcacccacatttgtttcaatgccccaaacaggccaaggctccctagcaactccctagtggcgttttttaacttctcagaaactgttaccattatttgaaataggcttccttaac

SEQ ID NO: 12765 - DNA, 1198 bp, Homo sapiens
cacctctacctagttccaaaacatttcatcaccccaaaagggaaccccgtacccacaaagcagtcactcctcactaccctctcccccagcccctggcaatcaccaatcttctttctgccgctatagatttacctattctgggtagttcctataaatagaatgtaacaatacgagcccgctttgtgtctggctggtttcactccgcctgcttttgacattcatccacgctctagcgtgaatcagaacctcgctcctggttctggtcgcatattccgttgtacagatgatgtaccgccatttgtttacccgcaagcagctctcgcttgaaatcctcttgagtcagtggcttcttggctccaggacttccgtcttgccggtgtgatcacctcgaggccctcccctgcggtccaggatctgcgagcaggcgggtagattccacgacccctcgagtcgcaggcaaagctgagcctcatgcttggaagcccggccctatcttgatgaaggacccactgccctgggagcctggccagcctttcctgcctccctaactctgccactcctctaatgcccacagagtacaaggccagctatgtccgcagtcgctccatccgctcagtggccatcgaggtggacggcagggtgtaccacgtaggcctgggtgatgccgcccagccccgaaacctcaccaagcggcactggccaggggcccctgaggaccaagatgacaaggatggtggggacttcagtggcactggaggccttcccgactactcagccgccaaccccattaaagtgacacatcggtgagtgtccaggtggaagtcgagggtgaaggggacaggacagacctcggcaaagggcttcccacacctcttgggcccctgaggaccaagatgacaaggatggtggggacttcagtggcactggaggccttcccgactattcagccgccaaccccattaaagtgacacatcggtgagtgtccaggtggaagtcgagggtgaaggggacaggacagacctcggcaagggcttcccacacctcttgggcacctgggctgctccccctccaccacctccgagccacacgtgatcccttctctcaagcaggtgctacatcctagagaacgacacagtccagtgtgacctggacctgtacaagtccctgcaggcctggaaagaccacaagctgcacatcg

SEQ ID NO: 12766 - DNA, 1192 bp, Homo sapiens
acagtaggccaggtatggtggctcacgcctgtaatcccaacactttggtcaggagttcaagaccagcccggccaacatggtgaaaccctgtctctactaaaaatacaaaaaattagccaggcatggtggcagacgcctgtaatcccagctgaggattactcgggaggctgaggcaggagaattgcttgaaacctgggaggcagaggttgcaatgagccaagatcgtaccattgcactccagcctgggtaacagagcaagactccatctcaaaaataaaaaataaaagacacactgtatcgcaaatgtgtttagtattttgataaccgtatttccaaacaattgattttctctgtaatcctatatcttgtattcaatgcacgtaataacattggagaagggatccattgctctgtgtgccagagggctccatggcagagcaggtgtgcatgctcaggcctcggacacacaatagtttaataaacatcgtcaggcactttctcacgtggcctcctgatccatctccctccgcagctttcttcgggaagtatcttaatgaatacaacggctcctacgtgccacccggctggaaggagtgggtcggactccttaaaaactcccgcttttataactacacgctgtgtcggaacggggtgaaagagaagcacggctccgactactccaaggtaagctgcaacctttccagcctgggagtggctgtgtggcccagcagttagaggcccaactcaggagccagactacttgggttcagattgtgactcaggcacttaaaagtgtgaccttgagcattttacatacacctcctcctcagtttttcatctctcagccagggacagtggctcacgcctgtaatcccagcactttgggaggctaaggcaggtgaatcacttgagtccaggagttcaagaccagcctgggcaacatgacgagaccctgtctgtacgaaaaaaatacaaaacttagccgggtgtggtggcacatgcctgtggacccagctactagagaggctgaaatgggaggattgcttaagcccgggagtttgaggctgcagtgagccaggatcttcccactgctcttcggcctaggtgacggagcaagactctgtctttaaaaaagaaaagaaaaatgtattcatttctcaaaaaatagtgtctgtttccaagagtttggttt

SEQ ID NO: 12767 - DNA, 1117 bp, Homo sapiens
acattgtctgccgcttaaaatctccattttttctttgcggtattgatcacagtacaataaaatagtcttgtttggagtttattaataataatcacaaatggggccaggcgtggtggctcatgcctgtaattccagcactttgggaggccaagacggacggatcacgaggtcaggagattgagaccatcctggctaacacagtgaaaccccgtctctactaaaaatacaaaaaattagccgggcgtggtggcaggtgcctgtagtcccagctactcgggaggctgaggcaggagaatggcttgaacccaggaggtggagcttgcagtaagccgagatcgtgccactgcactccagcctgggcgatagagtgagactctgtctcaaaaaaataataataataataaaaaataataatcacaaacccgttttggggttactgcagtaaacaaaacagacaacccctggccctcgtggagcctaccttcttgggtggttgtgggcttctcgttggccatgcatggcctctcggatgctgccacctaacaccctccccttcttgttccattccagggagactgccagactcgggaggaggcagtggcgctcggcgtgggtctgtgcaacaatggcttcatgcaccacggtaaccacccccacctgcagcccagcccccgggaccttgctccctggagctgatggtttgggggagtatgggaggactgaagccaggtctgtggctctctagacccccgggggtttggggaggctcacgaatcccacctccctccccttcccgttctgaaccgatcgagaaatggcttctggtgtccactggggaccaaaatggctggaaggacatgggctagatttgaagtccaacccatgggtttcctgtgcccttcttcctgggggggatgtggccttccagggtaggcagcaaggccagatgaggcaggcctggcccgaaggcctccgtgaggaaggaggagctgtgccctgtgggacagtgggcaggtgggttgtgaatgtgagaggcaggaagcccttcctgggatgtctgcctctttccccggcctcctccctcagataagtgacttttctttccattgggagagag

SEQ ID NO: 12768 - DNA, 1273 bp, Homo sapiens
actttacccctcaccagcagggtgaccttggggcaaatgacttgacctctgtgccttggtttccccagctatgaaacgggtaataataacacctcctctgggtttgatgcagcacttaggacagcgtccagcacgtggtaggagctcagtcatgtcagccaccgttattattacacacaaatgcacagacgtgcagacacagcaatgccaggctctgccatctggcagcagcagcgcgaaggtaacgatttatttctgtgtgctttgtctgtctgtgtttaccgaagggagtgatattagtgtgtgtgtgtgtgtgtgtgcatgaatctgcacagttccaagtcagctagctggggtgccgttttctgcatgcatatctccttgcataagtacagtgtatgcattattcatgcacatgcgcacactctcaccctctcacatattcctgggaataaatatgtgttggggttcccgggtggtgatagcagtcacctgagcagccagtaatgtttcagttgactggggagggtgggagctgatggggacagggtgggtagaggtaagcagatgttctggagaatctgggtggctgctgctggggatgttgggatatggcagggaaagtgttgagtgcactgagggctgggctgtgggacttgggtgcaacccacagcttgtggctgtggctgtggggaaaggtgctgggatttgactttcactgtctcggcattcagtgttggagtggatggaacagccaggcttcctctagggcgtgcctaacaggcccctgatcctttctctgcctcccttcaccttccctttcttctcttcagcatattgcaggctctaatttaggcaaaaactcctcagagtctaagaaaagctgaagcatgcagaatgagcacaacagaatttagctgtctcgagaggcagcctggaccattgaatttatcttttttttttccgcactcatgttgaagactttttttccctgttaaacttcttaaattaccttgcagccctccaccctcctttttccttggagcctggggagagtggagccttttgttcctctgtttcctctcttccgttcctactttcgggggaggctcgtggaacttgaggttgcttctgaaatagagaggtggttagactgggtcagccctagaatggatttgacaacttactcatcatattgttagctgacacttaccaagcacttaggatgcatccggctgtgtcctgagcattctgcattcattaactgacttat

SEQ ID NO: 12769 - DNA, 1174 bp, Homo sapiens
gttctgcccgccttggcctcccacagtgctgggattataggcgtgagccaccatgcccggccaaaagtccctcttgaagaggtttcacggggtcatttctggccctagcgttggtctggagcaaatcccactagtctctcagccttcagcactgtcgacatacggggctggaccattctttgctgtgggggtgctgtcctgtgcattgtaagatgtttagcagcatcgctggcctctacctaccagatgccagtaggacccctcttccccagttgtgacaaccacagatgtctccagatattccaggtatccactagaggtggttgggtgtgaaaaatagcccccagttgagaaccactgggctaaaagctcctttgactaccacctgtgctctcagatcgtgtgggggcattagcatgcctgtgtggaaatacgtgagattgatgtgtttatgtaagtagcataatacggtttgcccttttcacccagcagagtgtctgggaggctccctctcttgcggttcatggtttagagcacagactctcgagccaccttgcctgggttcagatcccagctcttcccctgtgtgaccttggggatgttgctttgcctctctgagtcctggtttccccatctgcaaaatggggatgaccccagcactcctagggttactctggggagtacagtgactgtgtgcgggctcacccctcctcccggaggaagtcccaaggaagaagcagagccctccagccttccagccctgtgtagatttttgagcttatttttattttcttggctccttgaggaccagaagggaatctgtctgctcttcttttgtcttgtggtcagacactcaatctgtgtttacccgcctgattccttccccaggatggaactgacagacgatcccttgattctgggccaggggaggcgagactatttcaggctggcgggactggggccactgaaagctggtgcaggcaggtggccattggccgtcaggacccagggtcttgtgcttccccccttgctgggagggtgggtggcttctgtgcatctctcaggaggagcgaggccggggtcagggtgtgggcagttgatgctttcatccactaatcgacttattcattcaataaatggccattcagcacccactgtgtgccaggcactgtgc

SEQ ID NO: 12770 - DNA, 1143 bp, Homo sapiens
acaacatttcgcttatagaaaacttgatgttttgtcctcatagcactgatcacagtccttaaaagccacttttagcccctgcagctacttttctgcagccactgaagcactttctcctcggctcttctccatcccttaaagcaaaattggcaaaccggtagcctcagggctaggcagcttgcaaaccagtcttatttaagccataatattttttaaatatatttttattgatacatatagctgtacatatttttgaggtgcattgataattggatgctttcatatagtcaaatcagggtagctgggatatccatcactttaaatatttattttttctttatattaggaacatttgaattattctttcctagctattttgaaatgtacagttggttaatgttaactgtagtcatcctactgatctaacgaacaccagatcttattttttctatttaacataattttaaaacaattgaaggtgtttgaattacaatcagaggtttcacttaaaatctggatttcgacctctggaaaaatcagaacaactagcacctgtgagctgagggactctaaagattccagtcagctggagctgaggagctgccgcaccccttcctgtactgggtggagagggggtcctgtcattctttgatcttacacccaccgtgttttttcttgacatttcccgtctggcctccatgggcctttgtagttggtgtaacttttgtgtttggtttgttttatgggttttttttgtttgttttttttttttttgagaaagtctcactatgtcacccaggctgaagtgcagtggcaccatctcggctcactgcaattactgcttcccgggttcaagcgattctcctgcctcagcctcctgagtagctggggttacaggtgtgtggtaccacgccctgctaattttcatatttttagtagagatggggtttcaccatgttggtcaggctggtctcaaactcctgacctcgtgatctgcctgcctcggcctcccaaaatgctgggattacaggcatgagccaccgcgcctggcctatagtggcatttcaaaacagattgttttagagctcacagcccagcaccaatgctagcgaagacctcattgctttagataggtttaggact

SEQ ID NO: 12771 - DNA, 1237 bp, Homo sapiens
agtcactgcacctggccaggcaattttttatctccattttatagctgaagaaactaaggctcagtgatttgcccaagatagcacagccagagtgggtgctcaatagttattgcagtggctgggctcagaggctcaggctcacatctataatcccagcactttgggaagccaaggcagacagattgctgagcccaggagttcaagaccagcctgggcaacgtggtgaaaccccatctctactaaaaatcaaaaaaattagccaggcatggtggcgcaagcatgtagtgttagctgcttcagaggcagaggtgggaggatcagcttgagcccgaggaggtcaaggctacagtgaaccttgatcacaccactgcactccagcctgggccgcagagcaagaccctgtctcaaaaaaaaaaaagtaattaaaaaaaacatgttaaaataattttaaaaatagcacaagaatgaatagttctcccctgaatgtgagatgttaatcaattgtttgatatgcctccccctctctaattcttctagtgtttgcagtgaagctcttgcctatttcatcactgtgaattctgagagccatcgggaggcctggacaagtctcttgttgttacttctaactaaaaccctcaaaataaatgatgaaaaggtatgaacaagtaaactctgaccaattttcactaggacataaagtttgggttggctttttactcaagagtttgcagtaactattttctcagttctcccaaggatggttacgtgactagcaccattctagatgcattggagagaagttaatccgttatggacaatgggtgccacaggatattagggctttttgcctggaagaacagtagttgagaacggctgaagtgtagacctcatgtgttgctgttaggaatggtatggtgagtttcagtgcaggaagagagggttaagattgtgaagcaccagttttgacctaggaacctgctttacaaaataaaagagctgttgacttttggcagcaagactatccaaatttaattaaagttaaatataactgaaagaagctttaatttgcaaggtttcttcaacttctttttttttttttgagacagagtcttggtctgtcacacaggctggaatgcagtgacgtaatctagctcactgcaatttctgcctcccaggctcaagcgatcctcccacctcagcctcctgagtagctgggaccacagacacgcgccactat

SEQ ID NO: 12772 - DNA, 1246 bp, Homo sapiens
ggccccaactttctaatagcaagaaaagcaccaatattgtaataagttccagggtgagattaacacttctgaaaaactggtgcccaaaaaaaaaaaaaattgtctaattttatctgtttctctcccacctcaagttcaaagcacatgcttcaatgtactacccctacttgtgtgaaattatgcagtttgacctgatccctgagctccgagcagttctgcggaagttcttcctacggataggtgttgtgtataagatatggataccagaagagccatcacaggtaccagcagcactgtcaccagtgtggtagccctggctgcccaggccagtgctgcagctctgcagaatgttcagcatgccatttctgactggcacatctcgtgaagtttcatagaaacaaggagttggcatcttggatctcagaatggcctggaaacggatggcctctacgctgttccatcacagtctccaactaaggcttatggtatttcattaaactgttgcatacccagttagcacagtaggtggggagtctgcttcatttctatcattccatttttctgattaaactgtcaaatctgtcattgcatatgccatcgttttctagcaaaatcccatgattggctataaacgttttgtaagaagtcactctccttgaaaatactgaacatagctgtataggtttgtgattattagagaatatgttaataaaacttcttgtaacggctaactgccacctaaaatatgctgggttttctgttgtttgagtgtgttagagaaatttgaatgtttttgtcagttacgagtcagccgtaattagattagtttaaggacaggtcaggattagagaagagttgtttttgtgttttgttaatgtctgagtgatttttaaagtattttacaaaaagatattgaaaatttggttgaaggcagagtttagtaattaagttagaattaagagttttgcgaggttaaaaaaatgtgcctcgtggatctccctgttttagtaacatggagagaaaaagtctacacgaaaaagtgaacaatttaatgaagatgattagccttccttgaaataagtatttgtggatgggtgttaaattaaaatttccagaatacactgtccatctcacacactctgaaatctaatatatgaagtagtaatgaaaatgaagtagtaatttaaccagagttcatttatccttgaataaacctttttattttcacctcagaaaagtgagtgta

SEQ ID NO: 12773 - DNA, 2554 bp, Homo sapiens
acagtccccattaaaggaccctccagagagggacagtaactgtgcatgagaagccgctcccataagcctcctcagccagatgtcatgggtggaactggagctgtgtcggggccagcacagctgaactgtgacaatggcaggaggtggcatgtgcccagcacttccattaatctgagcctaggagttgaattctttggcaaggttggattctgaggtccttattatgttaatgatggtgcaatactctcacctgcagtagaactgagttctgctgcagcttgtgtaaaagtgggcagtacacaagtacgtcccaaagcctgtgagcagtatacgtggatgctcacccatgagaaggagcacacacgcctcattctctgccctcacccactgctcacctagagcatcgctgagcgttagacaaagtgttacacagaatgattaaaactttcagacttctacctatgctctttagtcctgtaaattgggttgtattgatgtcaactctggtgccttagaagttagtagtttgggaacctatctgtaaaatcagatgttttttctttgtagagaaggatttctggtgcttttgcttactaagagaccgatattcttaagttgttttcttgttttaacagccttgagaaatgtttggttttggccagcagaattcttgtctacttttttctttcccaaaaagtgttttttaatttctctaccaaagaaaaaatgagcaggtttaggtttttacatgacttatatacattagataaaaggagctgtataatttagcaggaagggactatgggagaatactttactgtgagtggaaaatgttagcacatttgactggtttgccctggaatccactgcacctttacactgcaccatgaaacctacactccctggtatcatagcgcgtcatcacctcaacaagtcagtcgtctccattgatatttgtacaaaaggtatacatggggaacacgtgttcattcattaagtccatcttgcgtgcagctatatccctgattggttatttttcctttccttctgaggttctcatgtcattttcttcatcggatgtgactaaaatttttctggtgtcttctgccctctctttaattttgcctcttgaggggtagcagatgtgtcagtgcattttattacttgctgaaacattcaggcttacatttcttattagtttagtattttaaaagatttaattttctgaatgaggcatttgaattgtaccagcaatggacttttaaaaaattggatgtaaaaccattcagggtgatttttcttgtcagtggacagtgacgaacagagatttgaaatcccttacctccaataataagccattcagcctaaattcatttttatgaataaatctcttctttctcatggtaaatgtggcttgtgccactcaaacactagtgaaagggtatgtacaaccgcaacatcaggccaggacaccatttatttaaccaagtaatggaggagagtgaaacattttccaaggccttatttctttttcagaatgctttaagtgttgattatatgtgctgggtctctagagaagtttttatttgttacaatactgctgctttgagcaattttgtttctcttcattgtctgttagggaaatcaccagctttggcatcttaacaacaaacagtggatgggtaatttttatttctgatacgcatctttagagtcaaatatatcttttccctgtactcctcatgtacaaccaaagaacatacattatgaaaattgtattataatatctggaaacacaacattttcctctggcaggtgacttttgtacgaaatgaaaaaaaaaaaacctgtattttttttgttgttcttttgtgattaaggatatacatttagtagtctttgttattaaaggaacctgctgataagtacaagtgtgaccatctcattcaaatgtttgttgttatgatgcaaatggatattggtttcaatagaagctggatccttaatactgcattttctgaattctgttttaatatttgtgttaaagtagacatagctgaactcacatggaatcctggagttttgttatcagcagctttgcagtttgggaaacaaagaaaccaaagctgagtgttttaaagaatgaacatatctggaaatccttgctctcaaaacaaaacaatataatctatcaaaggtgttttactcagtgttctaatttttaaaaaattttatctgcatatttgcatcaaatatttatgtgtaaaatgtatgttttacctccttaaaatgcctaaaagttagttaatagttactttggtttaacctatacacaatgattaagtgcatttaatattggtaatttaatgaaaaccattccttgcccaatggatgtataaatttttgaaagaataagcagaattatataatatgaaatgctatgtaaagttttctatgtaaaaatattatgtataatactattaaaatatcccatgctttgatcaggtggtacatcaataaaattttaaaaagtatagctgtttctaatgtgtag

SEQ ID NO: 12774 - DNA, 1205 bp, Homo sapiens
catatggtttgtgggctgtaataagagtaccaaaacttacataccaggccaggcgcggtggctcacgcctggaatcccagcattttgggaggccaaggtgtgcggatcacttgaggccaggagttcgagacctgtctggccgtgtctccctctaaaatagaagctccaagaggggcaggaagttctcttccgtcttagaccctatgtgcacgaccttggatcgatcaacattgaacacctcctacgtgccaagccctgacatcaaaatgggtcagaagccagcagccgctcgctgaatctgtgttcctctttggaaaacgagaaccgtgaagcctgctggcatggtcagagccaaagagcattgtcacttgtgagatcagcgcagaaacagagcggggccccgattggcccttcgaacttgggtggggccagagcattcctggccccgccccctgcagcgggccgctcgctcatgcgctctggcctcaggctcgctgtcgcgccattttgccggggtttgaatgtgaggcggagcggcggcaggagcgggtagtgccagctacggtccgcggctggggttccctcctccgtttctgtatccccacgaggtgaggcgcggggcgtgcacggcctaccagagtggctcttggggcccagctgaggaagggatgaggcgctcccggtactaacgagcgctagggagtgagaaccgcgcctctgggcgagagcggaatgtgggcccggggttcgggtggtgcgctcaggcaaggtcttcggcttccctagggagcgcttgccgcgcctcgcggcatcctaggtctctggcccaggtgcggcgaccccagggcctgtgagggctgagggcaactgaggcgcggcctaacgcgagcctgcggattgcccgccctttcctctccatcacggcgctgattggctgcgccgccgcctctccgctcgggaaggccgctccttattggtcgcgctcgcatgtccattctctgcgacggtggctgctagccgcgcgagctgagtgtgcggcggcgaggcctgcccgggcggggactgcgggcgcgtggagctgcggctgcctcgcgtcgtcccttgccctaactctagtgaagcccccgaactcacccttctctaacctctgtacttgtatccctgactgtaaaacgggcatcgtgatctcactttgctgaattgtt

SEQ ID NO: 12775 - DNA, 1429 bp, Homo sapiens
gtaagtaccttattctacatcattaaccagtaaggactttttaattaaccacaataccactatcacacctaataatagtaattccttatggatcttttctttagacctatttttgaaggcataaaagcagttgagtttctggagaatttttggatggtgattaatgacttgactggctgctcttcccagagctgtggcagctctcccgtagaagatggggtttgtattggcgcaccaagatctccaacagccagtgtgtgtttcccatctcttgtaggttccatcaatggtgagcaccagcctgaatgcagaagcgctccagtatctccaagggtaccttcaggcagccagtgtgacactgctttaaactgcatttttctaatgggctaaacccagatggtttcctaggaaatcacaggcttctgagcacagctgcattaaaacaaaggaagttctccttttgaacttgtcacgaattccatcttgtaaaggatattaaatgttgctttaacctgaaccttgagcaaattagttggtttgtgtgatcatacagttatgtgggtggcttctagtttgcaacttcaagggacaagtattaatagttcagtgtatggcgttggtttgtgttgagcgtttgcacggtttggataatcttaaattttgacggacactgtggagactttctgttactaaatccttttgttttgaagctgttgctatttgtatttctcttgtcctttatattttttgtctgtttatttacgcttttattggaaatgtgaataagtaaagaattacttgtgttacttgccaagcagtgcacatttcatagtttcaaatctgtaatcagcaataaaaatcctaaaatatgtacctaagaacatcttaagggcaggttttcagtgctctctcatgcttttataaaaatgaagaatttctttaaatttcttccttttcctttcctggactctgtaaaatcctaatttctaaatcatgtaaactcagattatttagtctttttttttatatgggggaaggggacattaatatagatttggggcttatttactagaattttctgtagcagttcctaggtggcagtgtgagttttgggtaggtggctcctctgggagaaatgctctgcctcgcttaatgggatggcggtcgagagtacttgagactgtggatgttttgatctctttcatctctgctgttccctggagagtggaggttacttggaacttttcaaaccctgacaccttagaaccgtgaagtccagtccagtggtggatccggccggatgcctggtgagcttggttgcactggctccctcccttggcctggcccatggaattgtacagcattcgtttctgaggaatgaagaatcagaatatctaaattttgtgaggcacagtttatgctggaattg

SEQ ID NO: 12776 - DNA, 1133 bp, Homo sapiens
tatggcaagcatttaatgaacatttacagatggaggaagaaacaactgcaggaaggagagaaaggaaggccagaggcaggacaagaggaagaagcgacagcaaggaaggaaaaaggaagtggaggaggaaagaaggtaggctgggttctcccagacccgcttcgagtccagcaggcagcgcgaaactcccaccagaactacaactcccggcaggccccgggactcaggacgggccgctgcggtccaggcgggacagggcgctcctcccgctgggcccccggcgtgccttgcgagcgcaggctccgccgcagtgccagccggaacttgtggttcggaccgtgggtgggggtggggccggggccgggcctggaggcgggcgggggccgggggcgggcgcctgcccctcccccgtcacttcctgccgggctgcgggcgcctgagcggctcttcagcgtttgcgccggcggctgccgcgtctctctcggctcccgcttcctttgaccgcctcccccccccggcccggcggcgcccgcctcctccacggccactccgcctcttccctcccttcgtcccttcttcctctcccttttttccttcttccttcccctcctcgccgccaccgcccaggaccgccggccgggggacgagctcggagcagcagccaggtgaggcggccgggccgggccgggcctggtggggccctcgcgggcgccgccgcggtggggaggtgggcggcgggtggggcctaggcctcggcgggcccgcgcacccctccgccttctcccgggcctctctctagcccgcggggccttcccggaggaggcgggtcctcttgcgttccctcgcctcggggcgccctgaggcctggccccgggcgcccccatcccctccagccctcaccggtgccacaaacaggtgctgcggccgcctttcctcgtcccgcatggcgcgcgcggggatgccgaagttattcccggggctggggcgcaggcgggggggggggggggtccctgcttcaggtccccgagggctggagcctctcagtgtcgccggcccaggtctgtagcttagtggttaagagcacggcccaggtgtccaaaacgggtgccgaacccggctctgccccgttaggc

SEQ ID NO: 12777 - DNA, 1161 bp, Homo sapiens
aagtgctgggattacaggcgtgagccaccgcgcccggcctaaaatttttatatatataatatgtatatgtattttcagagaaggccaaaattttttctttttcaagttaattatgaagagtttgttctcttattcgatgtttcaatgaaaatttctttttcacctctttatttttatctgcagagggcagccactacattagatgagaagattgagaaagttcgaaagaaaaggaaaacagaggtgagaagaaaagtggctatttttcgttgttagggcccactctttactctcaccacgaccccagcatctctctggaagcccttatagagcggggcatggctggggcaggcgcactcttctgtgtgtttgctgtgaatctgtactgagaatccccacagccgttcattcaggccggagagcttcctatcgctctacttaggttctggatttctagaagtttctcatcaccctcactttaatttttttcccaggataaagaagccaagtctgggaagttggaaaaggagaaagaagcaaaggaaggctctgaaccaaaggagcaggaagaccttcaagagaatgatgaggaaggctcagaagatgaagcctcggagactgactactcatcagctgatgagaacatcctcaccaaagcaggtagacgttacggcggaggtgtcagtaatggggacaggagatcagaaggcatcctcctttactttgtagggtttcctccactcttctgcacagtttatctttaagctgttctgcctactacattgaactcctttctttcttttttttttttttttaagagatgttggctgggtgcagtggctcatgcctgtaatcccagtactttgggaggctgaggtgggtgtatcgcttgaagccaggagtttgagaccagcctgggcaacatggtaaaaccccatctctactgaaaatacaaaaataagcttggtgtagtggcatgcacctgtaatcccagccactcaggtggctgaggtacgagaatcacttgaaactgggaggcagaggttgcagtgagctgagattgtcccactgaacttaaccctgggccacagaatgagaccctgtctcaaaaaacaaaacaaaagagatgtggtctcactccatccacaggctggagtgcag

SEQ ID NO: 12778 - DNA, 1109 bp, Homo sapiens
ccacttctggctaatttttgtatttttagtagagatggggtttcaccgtgtttgccaggctggtcttgaactcctggcttcaagtgatctgtcctccttggtctcccaaagtgctgggattacgggcatgagccactacatccagccgcctgcttgcacttctcactataagctggttcctgcctccgggccttcatgtttgccatttcctctgtctagaatcttcccctggatcttcccatggatcatctgccttgtcattcaacctaatgtcacctcttcagagaggccagcccttagctgcttccccctcgtccctgcactctctctcacagcatttttcaccccccaggaattggcttctctgtatccaccctggaatttgagttccacaggacagggacagtgcctgtctatccagtgccaggcacagtgaccatactttgtggatgaggagggggtacatgttgaataagagcctagaaacagctgccagctcagtcctctcttcctgccagctttgttgacgaggaccttcactgaccatgtgatgctgttcacgcaaaccaagaagcaggcccaccgcatgcacatcctcctggggctcatggggctgcaggtgggtgagctccatggcaacttgtcacagacgcagcggctggaggccctccggtaacatttggggtggggactgaggctcccaccatccttctggggcagagaggatagaaggaagaagaggaccctgagcattctattagaacattagcaggggacacatagcatgatcttggccttgaacattttaacctaaccactgtgaggtcatgtcttagatgtgtttagaactctaacttcatagtcagagatgaccctcatgtccttggatgcttgtccctagcatgggagctgttgtgtggcgtgacagaggaagctggcttggaaaggcaacacatggtctcttcttggaagctttctgagagtggtgaacattcctgggtctgattgaacaagatttagagtcaaagttagcagccattacttgagcatctactttgccaggcactgtgctgcgtgctttccatgtgatttcttgtttagtcctcaga

SEQ ID NO: 12779 - DNA, 1217 bp, Homo sapiens
cttgggttgaaacaggcctgagagtgttctgaccgcttgttttcccccacttctgatacagtatattcacttcaccattacaattagctaagtacctgtattacagcctacccctggtatgagatggctttagtgattcccaaggatataaatacgatggttcttcagagggcctctggcaagaaatgccaacttagaaagacaggaagcaggtagccaagtgcttctgtagaacttgtggaagaatgtagcacatatgagtcaggtcaaacacggtctcagtacttaatgccttcaggagtgttgttttctctatttcaaatgagtttgtgaacatgtactaagattttagaggattaaagtaagcaatgaagcgagacctccaggctggatggaatattcctccttcattcagcctggaatttgacacttctcttaaagccagaattgtatgaatgcccaggtgtcttcatgtagccttccctctgctccttttggtggagcctagtagtcctcactgtttaccatgcataactatgatgatcgaggattagatattcaaaataagaatttgtaaaccttaccaatgatttgagaactttcaagggcaactttggatgcagttttcatctgagtgctggctttgcacctgatctagttcagttcagtatcactatatgtggtgagcggagtcatgatctcaattcttagaagcacagattcagcatctctcccaggaggcatcaggaaaggttgatttgtttcattttgaagcagcgggaagatctttatttagtgacatctgtctgacttgcgagccttctaaaggctcatagcctcagactcagtgacggccagaagagagcactttctcataaacagtgctttccaccacttgttaaaggtactgtgttgatacgatggcagtaggaccgttttagcaggcactgtgccaagtcctgtgtgaagcaccagttgctaggcactggttgtacagcattcaacaagaaagtaccacccccatgactttcatggcatgcattttaggaacaagaaacaggctatggtcaaagatgtttaatgataactagtgctagtactagtataaatgctttccacgtatttactcctgacaagccaacaatcctataaagagataccattattattcccattttatagaaggtgatactgagggacacagaggttaggtcatt

SEQ ID NO: 12780 - DNA, 1162 bp, Homo sapiens
gcacagcacctccttgtaacaactctatagccctctttgggagatgacatgagtggaactcacagccaccactaccaccactttagacaggaccgaggccacatactccccattctctcgtggctttccatctcagcctcggagggcaacattgacagtcctcctggcttcagctagagaaggatgctggaacaagcggctggtgttgaaagagtgggttgaccaatttggtattgaatgttgcccagccacccctaggaacacctgtccatcacctcctggatggattccactgttagacagctacagggaatgattggtcatggggaagtctctgcgccataagccacgatcccagcgcaaaacccttactcaaatgtcttcattgacttcggtatttcatagtacctgagattttattttgagataccatcagggtgagttgcaccacttgtactcaattctaattgccccctggcaatctgggaagggttcagaaggtgggcacccagccaacagcatgaactcagagcattgttttagggttggaggaggaacacgctttctttacatcactagtgtagactcaaaagatatgcaagtgtcaaatatgcaaaagaaatagtttattcaaagagactgtgtgttactgaagaacagcataaaaatatgatttttttacttgcaaaaatgaaaggaaaaaaataccacgcattgaaatgcccagttcagactgaataattcctgctgcagcaaggaaagtacctactataatagaaattctgttttgttttctgtggttttcaagttaaaaaaaaaaaagttaaaataaaaagcactttatgtttttcaaaaataggttctgccagggacagtgtcaacatcttgcactttaaaataagcactatttcccatagcccaattgttgggactgtagttggattgttgctacctgcccatttctggccagcatgggtaatattgtgctggtattactgtctgccatatcaaagtctgtgggctccttccctgcccctctgaaaccttcccttaaccctcatgggtcaggaggggttcttgccccttgggtggggcctctcatgaagtcaagtatacaggagacatgcacatctcaaaaggacacagtgacagttggacattg

SEQ ID NO: 12781 - DNA, 1356 bp, Homo sapiens
tatttagaaaataaattgcattgcaaagctcttatcggctcatatgagagagcaggttcctgcccttgaaaatgccggtaagctatagcatatgttttttaagacttaagcatttcatgctttaaaataccttcacaagtgaacattacacacagaagttcatttggttttcctttgttttatggtgcatatagcaataaagacccccctccaccctgcaacccccatcccccaccgggcctttgtccctgccttggcttttctccccttctcattctcctctcccctttcctcactgaaggctgtgagttgctttcaatgtgacaacactatgatgtcatttggaaggatttgccaggacagactgattctgagtcctgggtgccgtatgtgtatgcggcagtgttgtcaggcgatcttgtttgaagctctatgttgccataattaccatcaagtacacactgttggcaaaaggctaacacctgactttagaaaatgctgatttgagaacaaaaggaaaggtcttttttcactgcttaaagtggggtcactttgatacctttgcggtcatgtctgtgtctgatgagtgtagaatctctggatgtgcactgtcagtcatgtgtccaccaggcctcgaatatcatatgggaaatgtcatagttaaaaacgtacagccaggcccgtgtgctgttaatagtgtgaaattgtcatgttaaaaaaaaaaacaggaaccaaatgtgaccttgtgcatatattggtagctgaaaatcttcaaggctactgatgggtggccccttaatcttgtctttgattgctgtgtgcagggaaaggtgtccccgtttgttcatgctgttttggggggtgggggggtatttgcaagaatactcattttgacataataggtcctcttgtcagagatcctctaccacagacattaatagctgagcaggagccacatggattgattgtatccactcaccattgacgatggcattgagcgtagctagcttatttccatcactacgtgtttttgagcttgctcttacgttttaagaggtgccaggggtacatttttgcactgaaatctaaagatgttttaaaaaacacttttcacaaaaatagtcctttgtcattacattatttactcatgtgtttgtacatttttgtatgttaatttatgaatgattttttcagtaaaaaatacatattcaagaaccaaaccttggtggtcatttctctttgtgtaggacagtttgggtccttgggggtctttcctttttcctttcctttcctacaggagttcaacttaaggcagctcagctgagctctgggtcttgctggggtaaatactgcctg

SEQ ID NO: 12782 - DNA, 1788 bp, Homo sapiens
aagcacctggcatgaaacacaggaggtgtttctgaccacagcactcagcctggcatagcagaattggccgtgcgcccaccttgtgctgcagaagtgctgccatgggttgcgtcctctgctgtgggacgccctgctccatcctctggctgcagaggcatggatcctcactcagagccacctcttctctgttccctccctaaacaggtatgctctgctgaggaagtcaaaagaacggcaagggctggatggcctcaacaacctgaactactttgcaaacatcacatacgacgccttgtataaaaacataactgtcaacctgacacccgagctggctcaggtgaacgagtactgagaggagagaatgtacgtttgctttacccaccgccaccaagaaagcagtccgatgagatttttttttggaggggggagggtctacacagcaagagaacagaaatactgtgtctcatgaaggatcacagagttcagggggaaaatgtgacagcacacgcacaaacgccttcactggatcagccgctggaactgagggagtgagcttggggacttccttcgtcagcactggctttctgttttcacaagacagacgtctgtcccgctgctctctccccatctcctaccccacatcctgtcttagccgcagtctccagaacccatgatgaactgtgatctgccgtggtcctgccgtggtcctgccgtggagcctgtccctacacatgaccttggagcctcttggccttcagagcagaggcaaacccaccacagggcagctgcgttttaggaagagcaaatgaaactccacaccattcttctagatctctggtgttctctttggtttcatttttttaaaaaattaccttctttgggtggggattgagggtggaggggagggtgtttgggaaagataaatagacataaatatataacaatcacttcttgaagaagtataattgtaaataagccatgtaaaatgcctttttaaaatttaattttctagctggctccaattcaaattgaggatttatgtattaggccacttacttggttggcaagtgcaggaactcagttaaaatgcagttgaagaatgtcatctcccgaattgctgtcactttggcgagggagtggatatagggcatgtcacaaaagaacaaaataacccgacctttattgctgggagctggcttctgtccctttcttcccccccccacgagtcttgcccttgacttctgctctggattcactcttccctgtcggccgcgcatgtgctcatcccactctccgctaagcgggaggctgctgttagagcaggctgcttcctgcctaaagcaggcccttcggggctcgctgcacacacatctctggctctccaggcttcgtgttctgtcttttcatcagcatggcggggcggggggcggggggcgggggtgtgtatgggaatccctccccctcttactttttctcttgtggaacttggccacagtttctgaacaatgtgcctacattaccagctggcttcagtgattcctctgtgtccctttttggtttctggaaagattctttgtcaacattagtaactgatacatagaaccaaggagcactcaaatagggagccaggagccagggagctggtgacacttgtgtgctgtggggcagctgggatccaggtaagaccggattgaagctttgaaattagactaacaaagctccagacagcaagagcccaggtgcactgctcacacccccacctgcattttgaagtcatattattttttg

SEQ ID NO: 12783 - DNA, 1259 bp, Homo sapiens
gctggtggagagccactgtcttccctgcagtaactatctatacacctacctccagtgtgcacttagggggtgagcgcgggtgtcgaggtctgtgtgtctgcagactgctaacctatgacaattcagggacctcacctgtcggacctatagcttgctgagcaggaaccttgcacttcacacttcttgagtctcgtttcagaaggaaaatcatttgggattcctactgcccctccatctcaatcctcttctcttcaccagtttccaggactcatctgcaacatttgcaatctttttgcactaaaagtgggcaggagtcggcatgtgcccatcagagagacggctcctcagatgctcagctaagcctaagcgcttccaagcctgaaggccccttcagcttctcatgtgaattaccaacccctggattttccttgtgggggtacaagagcaggagtggggcaagagtttgaaaataaagccgcttccttgtgaactaactatattttagccataactgtttgtgatgtacacaatgttaagggatttatatgcagtgggcttttctgggagaaagttattcagctcttgagcaagtttaagtctggctgaatcctgaggccactgtgaatttgctgatgttcttccaactcagttgagtgattttaaggttttccaaatcttctatggctctctttttaatatatatatatatatatatatatatatatatatatatatatatatatatctatctggtagatcacatgtagatgtacagtgtgtatattaagctgaatttcaaccaactttattactaagaccagcctagcagggcattcatctttgatgttcttccttttcacatttcagaatcggcaatgcctggcccactcctgagagctctagttttctagttttccatttccagattgcgccagcattacagtaactaactctttctaaccaaccgtgatgccacgtaacttaccctatggacaaaagcaggaatgactaacacatcctaggagggaaagtccagtgtacctgtcatcacggacgcactgtggtcacagactggaatacgaaatactacagccctgctcccaggtgtgcatcttactggatgaggttgctgtgattgagatagttaaatacatgctaatttaaaaatgcagatgttttacatttgatttctaccaagagttgaaatgttgagagatgattaaaaataataataataaagtgtcttccattgttaaatg

SEQ ID NO: 12784 - DNA, 1879 bp, Homo sapiens
ctgtcttcccctactgttaaccttgtttgtcacacggtcgagttcgtattggttctcggctacttcctggagcttctgccgcctcctgtggaagataatctagcttctccacctcttgtttcacactcattcctcccatccagtgtttgtctctcgggtccttcaagccagccaggaccttttctgggtcatgaatagcacaatgaagcaagtgtctcctttccttgtccccaaggtgtgcagactttggcagccgtgcacctgaccagagctgaagctcccgctgggctgtggggttgccagaagctggggttgccatcccggggtacatgtcaccagtcctcttggggttttgtaccatctgatgctggaagttttgattagtgatattttctactactacatatttagagttcactggttcagtcttaaatgcctgcatggtgcctttttaggataaggtataaccatacatttttggtggaagtgtttctgggttagggaagttaaagtctgtttatccgtaagtggggaggagggtcagctaagagaagtgggagggccagagctttttggttctgatttacaaattaatgaagtagtttcaaacaacgcggtcatgtttacctctccatttgggagcctgcctacattcttgttctagaagcacaaaaaatcctcagatgaattagaagaaagaggtttggggactcagcggatactagttcttttaccttctgcttggtaacttagattaaactgagcattgtttttctgtcacaaatgttttccttatgacactggtttcgacatgtaaaatgtgtttgaaaacctgctttgtagatgcagagagaagctataggaaacccagtaccacccctggtctgttctgacgagacatcgttcataaggcacagcacatcgcaagatgaacagttgttaataaaagctgttgctggaaacttgctttaggaacagctcaagaaccttggagttcatatttcacaaatattaataaatataagtccaagagctgtcagcctaatctgtaggagcagaacctctgattgaccaaaaggcatatgggtttaggttggttttttgatgtcatatgtctctgatggggctgcaagtgctacctcgcgcttgtacactgctgctgtggggctccgcgcctgccggtgaagagctgcagatgccgagaagccagcaaacacagggcccactggaaaaaaatagttttttcattagtatttctcgggaggacccaaaagttaaggtcagcttgttcactgtaatttctggaagaagttcactcagaccttcctgaattcagatcatctcagaagtctggagggaaatctggcgaaaccttcgtttgagggactgatgtgagtgtatgtccacctcactggtggcaccgagaaacttacttccttgtattaagtgcacttcttgtatttctaataagatgactttccagaaagtgagatttgttatgttctggcttttaaaaggtaaaatataaataaatttcataacttaatctaagtggtaagctatggttcttgttttcattcaacacatttgccatagcatgggcttggggagtctccagaagatggttaccctttctagaagggaagttcttgcttgttgctgagtcctgtttggcgtcaaatctcagctgatgccaccagctgggcctcatggtgcctgtcctctggaaaaagaacacttgttacagttgggaggctctgggaggtgagaagtggcagcgctccatatagcaaggctttagacatgcggcttctgctacgtgcgggtaacagcagcagtgctgagggcttgtagtaaaggggctccgcagggtcaagtt

SEQ ID NO: 12785 - DNA, 1162 bp, Homo sapiens
atgggggttggaggcctgagtggccccaggcccattggtgggaggcccccacttccagttccttggccggtccctgtgtcctatcctgtactgactcactcctcattgggcccctccagcccagtgaaggtcagctctcttccaatgtccccttgactactctctcccattcaaactcccgctgccatttctactgcaggctggctcaactaccctctggagaagataggcttctggcgacgcctggaggacctcatccagggcctgacgggcgagaagcctcgggcagatgacatgaaatgggcccagaagatcaaataacttctccgagcctgctacctggttgccaaccttccctagcccccaaaccgaagccatctgccaaattccagcctctttgagctggcccctccagatggagaggacatctcctgggctgggcccaggtaccccagcccacccctcatgacacagaatacttgagccactgatttttcatttcttttttttttttttcctcggcccctcctcagccacctgagttgctctatctgcaagcctgactctgccagcctcccctggtagagaggaggtttacccactccctgcacgcctgccgtccctgccccgctgggcagcccttcagtgtggctggcgttggggccagtgagttgcctctttccctccttgtctggccccagtggtctggggagcccccaggcacacctaagcgtcgtggagcattgttctgccacagccctgcatactgaccccgggaggctgggcaggtggacagccccagccaccaccttcagcctagcctgtcccccaaggatggtgaagctcagcaggggtctgagggtagccggccagaagaggctggaacctcctgctcaagtctagacccctacttctctgctgcccccaccctgccagagctgatgtttccaataccaagatgtcttcacagggcacagcccctgcagagcatcttggtcatttggaagaggacacggtatcccctctggccagagtatgtcagagaaggaagagtagggcttttttgttttgtttttttttaaaggtgcttgcttgtttaatgtaaataatagaaagccttaatatcttttctgtaacacggagtaatattttaatgtcatgt

SEQ ID NO: 12786 - DNA, 1143 bp, Homo sapiens
tccacaagccattttttgaggagagtgaaagagagtaccatgctggcggcgcagagggaaggggcctacacccgtcttggggctcgccccacccagggctccctcctggagcatcccaggcgggcggcacgccaacagccccccccttgaatctgcagggagcaactctccactccatatttatttaaacaattttttccccaaaggcatccatagtgcactagcattttcttgaaccaataatgtattaaaattttttgatgtcagccttgcatcaagggctttatcaaaaagtacaataataaatcctcaggtagtactgggaatggaaggctttgccatgggcctgctgcgtcagaccagtactgggaaggaggacggttgtaagcagttgttatttagtgatattgtgggtaacgtgagaagatagaacaatgctataatatataatgaacacgtgggtatttaataagaaacatgatgtgagattactttgtcccgcttattctcctccctgttatctgctagatctagttctcaatcactgctcccccgtgtgtattagaatgcatgtaaggtcttcttgtgtcctgatgaaaaatatgtgcttgaaatgagaaactttgatctctgcttactaatgtgccccatgtccaagtccaacctgcctgtgcatgacctgatcattacatggctgtggttcctaagcctgttgctgaagtcattgtcgctcagcaatagggtgcagttttccaggaataggcatttgcctaattcctggcatgacactctagtgacttcctggtgaggcccagcctgtcctggtacagcagggtcttgctgtaactcagacattccaagggtatgggaagccatattcacacctcacgctctggacatgatttagggaagcagggacaccccccgccccccacctttgggatcagcctccgccattccaagtcaacactcttcttgagcagaccgtgatttggaagagaggcacctgctggaaaccacacttcttgaaacagcctgggtgacggtcctttaggcagcctgccgccgtctctgtcccggttcaccttgccgagagaggcgcgtctgccccaccctcaaaccctgtggggcctgatggtgctc

SEQ ID NO: 12787 - DNA, 1837 bp, Homo sapiens
tccatctgagagtgggcctggatcccaacaagtgtcagactttgaggacaatacctgcgaaatgaaaccaggaacctggtctgacgagtcttcccaaagcgaagatgcaaggagcagtaagccagctgccaaaaaaaaggctaccatgcaaggtgacagagagcagttgaaatggaagaatagttcctatggaaaagttgaagggttttggtctaaggaccagtcacagtggaagaatgcatctgagaatgatgagcgcttatctaacccccagattgagtggcagaatagcacaattgacagtgaggatggggaacagtttgacaacatgactgatggagtagctgagcccatgcatggcagcttagccggagttaaactgagcagccaacaggcctaagtgccaggttccctggcgttggtgacatgctgcagcctggaactctgatatccagtgtgactgcaaagctgtcttctcactggtactgccttgtgagtactggttggactgtggggcatgtggccgctgcagttccagtggttatttctaagtctatgacaggacaggctgttcttgcttcagaaccttctctgacagacacggtaactaaatgtgaaaaaccaataagctggtgactcatgaatacacacgaggaaaagcagaggtttattttatctgccttttcaacatttctttccctctgtgaaatgattggtcagatgtctttgagaagtgttaaactaattcacatggtagtgtagggccaacatacaagctaccagtctaatgtgtatagtagactttgggaaaagcgattttttttcatgtattcattctgaatagttgaaatgtatatttgtacagtcttttagacctattcaagtgatgctcatgatcctgttactgtgtgcccatcatagatttctttttttagtgttgcccttgctgtgtaataaacgctctatctagtttacctagcaaaagctcaaaactgcgctagtatggactttttggacagacttagtttttgcacataaccttgtacaatcttgcaacagaggccagccacgtaagatatatatctggactctcttgtattataggatttttcttgttctgaatatccttgacattacagctgtcaaaaacaaaaactggtatttcagatctgttttctgaaatcttttaagctaaaatcacatgcaagaattgactttgcagctactaattttgacaccttttagatctgtataaaagtgtgttgtgttgaagcagcaaaccaatgagtgctgcattttggatatttagttttatctttagttcaacaccatcatggtggattcatttataccatctaatatatgacacactgttgtagtatgtataattttgtgatctttattttccctttgtattcattttaagcatctaaataaattgctgtattgtgcttaatgtaaatatttgctttattacacatgacagtcctgtgtgtccattatatcttttgccatttaatgccataactctttcatcagagatggcagccacagtcacagaggaaacttgtggaaaacccaagatctgtcatctgcaaatagaatgctttctcttgaggcacctggtacaaaatctgtttttcttttttttttttttttttttttttttttttaactgaaaaacaaacacccttgagtttttcagttcaccttttgttaaggagcagagcctgcatatatatgtaaatgtctcaatgataaaaaaaaaaatgtaaacatggattggcattaatttgcaagcagaatcttaatagcctgatgggttttttgtttgttt

SEQ ID NO: 12788 - DNA, 1170 bp, Homo sapiens
aggactatcggacaaaacctttctgctgcagcgcttgtccattttcctcaaaattcttctctgcctacaaaagtcatttccgcaatgtccatagtgaagactttgaaaataggattctccttaattgcccctactgtaccttcaatgcagacaaaaagactttggaaacacacattaaaatatttcatgctccgaacgccagcgcaccaagtagcagcctcagcactttcaaagataaaaacaaaaatgatggccttaaacctaagcaggctgacagtgtagagcaagctgtttattactgtaagaagtgcacttaccgagatcctctttatgaaatagttaggaagcacatttacagggaacattttcagcatgtggcagcaccttacatagcaaaggcaggagaaaaatcactcaatggggcagtccccttaggctcgaatgcccgagaagagagtagtattcactgcaagcgatgccttttcatgccaaagtcctatgaagctttggtacagcatgtcatcgaagaccatgaacgtataggctatcaggtcactgccatgattgggcacacaaatgtagtggttccccgatccaaacccttgatgctaattgctcccaaacctcaagacaagaagagcatgggactcccaccaaggatcggttcccttgcttctggaaatgtccggtctttaccatcacagcagatggtgaatcgactctcaataccaaagcctaacttaaattctacaggagtcaacatgatgtccagtgttcatctgcagcagaacaactatggagtcaaatctgtaggccagggttacagtgttggtcagtcaatgagactgggtctaggtggcaacgcaccagtttccattcctcaacaatctcagtctgtaaagcagttacttccaagtggaaacggaaggtcttatgggcttgggtcagagcagaggtcccaggcaccagcaagatactccctgcagtctgctaatgcctcttctctctcatcgggccagttaaagtctccttccctctctcagtcacaggcatccagagtgttaggtcagtccagttccaaacctgctgcagctgccacaggccctcccccaggtaacacttcctcaactcaaaagtggaaaatatgtacaatctgtaatgagctttttc

SEQ ID NO: 12789 - DNA, 1033 bp, Homo sapiens
ttgttgctatgctgctttgcaaaaagttgaaaaaataaaaaaaaaatgcataccaaaacaaatacagactctttttttttgagatggagtctcgctctatcacccaggctggagtgcagtggcatgatctcggctcactgcaacctccccattctgggttcaagtgattctcctgccttagcctccagagtagctgggattacaggcaggtgccaccacgcccggctaattttgtattttgagtagagactgggtttcaccatgttggtcaggctggtctcgaactgctgacctcgtgatccacccgccttggcctcccaaagtgctgggattacaggcatgagctaccacgcctggcactttttttttttttttctaattttggaaagaagcgggtcttgcaaagtagctttgttacttgtaacagacgtatacatagaacctttgtacaacctagagtgactttttccaaagactgttacctatttcaaggtagaatcgttggaacttactgaacaacagtggaaaagacaactacacagcctcattgaggggagatgggtactgtatacttactggtaactggacacgggtaaaaggacaaggtctgtcatctctttagggacctgttttatatgccccaaccctgtccccatcttattgtttttttttgaatgtacttaaaaaaggaacaacaaaaaactagggttgtagaattataaaactgcttcaaccttagaaccttaagtaggaggccctcaaatggacttacgttagtccttagggagtcaatgtgtgtgttgctgcttatttaaatacagttcagttggagccccgagagtgccaatgttttccccacacctcttggatgccttcctcttcccaaatcccagaagaggtgggcacctgagcggggaatctcaggtgacttagtttgccagtgcctactctattgaagaactgggttttcatgctcgagaagaaactcgtggaagggcgtgtttcccatcacaggttcacatactgattgctt

SEQ ID NO: 12790 - DNA, 1194 bp, Homo sapiens
ggccagactggtcttgaattcccaacctcaggtgatctgcccacctcagcctcccaaagtgctaggattatagatgtgagcgacggtgcccggctccccccacatcttttacttgggcagagtccttagctttttctgtcttgttacaggtgctccagtgaaccacccagggaatgacgaggtggcgagtgaggatgaagccacagtaaagcggcttcgtcgggaggagacgcacgtctgtgagaaatgctgtgcggagttcttcagcatctctgagttcctggaacataagaaaaattgcactaaaaatccacctgtcctcatcatgaatgacagcgaggggcctgtgccttcagaagacttctccggagctgtactgagccaccagcccaccagtcccggcagtaaggactgtcacagggagaatggcggcagctcagaggacatgaaggagaagccggatgcggagtctgtggtgtacctaaagacagagacagccctgccacccaccccccaggacataagctatttagccaaaggcaaagtggccaacactaatgtgaccttgcaggcactacggggcaccaaggtggcggtgaatcagcggagcgcggatgcactccctgcccccgtgcctggtgccaacagcatcccgtgggtcctcgagcagatcttgtgtctgcagcagcagcagctacagcagatccagctcaccgagcagatccgcatccaggtgaacatgtgggcctcccacgccctccactcaagcggggcaggggccgacactctgaagaccttgggcagccacatgtctcagcaggtttctgcagctgtggctttgctcagccagaaagctggaagccaaggtctgtctctggatgccttgaaacaagccaagctacctcacgccaacatcccttctgccaccagctccctgtccccagggctggcacccttcactctgaagccggatgggacccgggtgctcccgaacgtcatgtcccgcctcccgagcgctttgcttcctcaggccccgggctcggtgctcttccagagccctttctccactgtggcgctagacacatccaagaaagggaaggggaagccaccgaacatctccgcggtggatgtcaaacccaaagacgaggcggccctctacaagcacaagtgtaagtactgtagcaaggtttttgg

SEQ ID NO: 12791 - DNA, 1181 bp, Homo sapiens
ttcgcggtcctctcagtctccctagcggggcaagggacccgcccagcgctttgctgatttgcccagcgctcacgcccaacctgggtttctccggagctcgccgcgccccgcgcacccaccccgcaacggcagccgcacgtgggtctccccgcaaaccacccaggcgtcccgggagcagcgctgctgcacggccgcgctgggggcccaacgcctggggttgcaggtgcaaaaggcgccccgagccggggaggccaatcgcgtccgcggagaacgcagagtgcgggcaggggcgcatccctcgccacccgcggtcgcccagcacgccgggacgcgcgtggccatccagctccccgggggcgttggggggctccgcgggcctgggcctcgggattcgcccgccgcttccccggggagccgctgctgcaaagccaggttggggcgccgggcccggccagcgccctctaggcagcggaagtgcagcttgctttacatccgtcctccccgcctcgcagagttgggagaaggcagggtggggggtgtggaaaaataaaaggaaaagtccttgcaccatgtagatcagcgtcccccactttggcatcccggccggccggggacctcccagtctgcggccatgaacgcgagcagcgagggcgagagcttcgcgggctcggtgcaaagtaagtgcttttccgggagcagtgcgcgctccggggcccagtgcgcgctccggggcccgggcccaagcacgtctgcgacgcagccagcaggcccggggccccgaaatcggggtgacggctcggagccgcgtctcggggaccgcggcgggcgcgctgtgcagggggcgccggagtgggcttggggtgggggcgcacccgacctggcgcaagaccgggggcgctctccagccttgcgagaccccttggaagggaacagtgggggagggcacgccgttcagacaatcgccaccccctaagggcattcccgccccatcaggcggagtttggggcgggcaggagaaagggaggaatctagggtaaacggggcaacactgatgggaaaacttctgcctcagtggctcaaaattagagcctggagattgggggaatcaccaggtctcacgaggtcctgccggctcattgcaaagccttttcctcattaagggtggagatctgaatggaaaa

SEQ ID NO: 12792 - DNA, 1109 bp, Homo sapiens
agggcaggggtcctatacatgggttgaacttagtggccagtttacccaaggcagtttgggtgagtgaaaggccccagctgtggtcagtgcctagcagagcttgttgtatgggaagcaatgcctagtgctaggttcaaatgttgaggccaggataaacgttaagtctggaagccagcaggaataagggaagactagaataagttatataaaataacaggagtaagcaattctgactggaggaaagctggcaaagcaatgggtttcatctcatggtaatccaaattgcttagtagtgtctgccaagagctctgtgttggagggcttctggattgtgccagggactggggaggcaggaagtcatgattgattggtaatgtctgccatgagtgtgggagctacgcaggacagtacacatgctacatatttgcaatccctgatttagaggcatggttatgctggagttcacacagagagagagagagaggcatggttgattggtaatgtctgccatggattttggagttatgcaggatggcacacatgctacacatttgcaatccctgatttagaatcatggttacagtgatggcttaagaaaattccctggttgtctttgacatacgcatattttgttttctcacctaatatttattttttcacttaataattgaccattagttgtctcgatctgtgttggggtttagtcatattcattgaactataataaaatgggtctccaaagaacacaagttagacagtggtaagtgccattgagtaagtggaggaactggggggttagcaatgggttcatgaaggatgtggcatttgaatggggtattggagactggaaggatcttgaacatgtggggacgagggacataacatcagtgtggagggaacagcacaggctaaggagtggtagctggaaagcatgagtggtttggaggcatagcaaggaggtggattttgcaggagcaaaatgtactagaaagcctagggagagagaagactgagattgaatgatacccactggggtatcctcccgtgggctgcaactgacaaaataaagaacttggacttaaccacctgaccatatggagcttagttgc

SEQ ID NO: 12793 - DNA, 1715 bp, Homo sapiens
aacaacaacaacaaatagaacccattgcatttctaggtcagtttggttctatgtattacgcttttttaaagaaagaattttctaaactgtattcagttttgatcttaatcatttaaaaaatgttgttttccttaggtcttggtggatgtcagtgcttactccccatgaaattaaattttacttcatcctttgagaagcgaatggtgaaagctactgaaataagctgtgattgtactgtacataaaacatatgaggaatctgcaaggaacactacagttgtgtaaagttgttctgttaacttttgtaccaaatagcaatacaaactagttggaacagttggaacttacatacatggggactggaaatctctattttgtccctgaataatatttttcttagaattgaccaaataagaagtggaatttttgcatacttgagcgctgctgaaaagaaatcatttgggttgggtggggcgggatgggggaaaagtatataatgcttgcacctcaggtaaaaatctgtaaatatctaagttgtaaacctgcttgttcaaatactgtgtgtattccttttctctaatgcagctcatcacttggagcagtttctgctattgtgctctttcatttaaaatgtatgtttttttttttttaaactgtcaatgattttgtattatgttgaatccacccaaatctattgttgtcttaaaattgttaatggaagtattgaccctctatgatatgtgctgcagatatcgaggtcagccattcggaagctggcagcattttatcgcaactttgagcatctcagatggggaaggcaccttcttcctcgcctctccagattgtcctggaacctccaggatccttgactgagggcgttgggatggcttgtaggatttttaagagagtgtgtctacagacaagcattttctctgtagagcagccacacgttgtataaacataaactgtatgtgcagttatttaaatttgtttctgtcaaattaatcatttttgttggacgattcagtggcgggggggttttgcctaaattagtatataaaaacaaaaatgctaaattatatctgtgaattgcaggtattggggaacagttttaagggaaattttggggggaacattttaggtttgtatttggtagtcttaatgtatctggcatttgggtgaactgtggacatactagagttgattatagacacattgattttgaataaggaactgctggccgagcccgctgggagtctagaaagagaaaatctgtttctagacctcagttattttcccatttttggttgttttgaagcagtaacatttttctcagtgcacatgcaatttgggttttagagaagatggccaccagctggcttcctagatattttaaacttttgttctttaatatgctgtccatggctgagtttattagtacatgggcttagtgaccacaaaatattttattaagaaactgtttcaaaaataaatttgcactgttcatttttctggcctcgctgttctccatagagcaagggtaatcctagaaaaaattttttttttttaaattatgcaacgtaagatgtcctccttgatagaagtcttagctcctgtgttacaagggagaactcatttgagatcagtctgttggcattgcaatgaagtgctttgtatcaggaaagtgtacactattgaccttttttcctgttcaca

SEQ ID NO: 12794 - DNA, 1281 bp, Homo sapiens
agggggctaattgctatgttctcatggataaactttgccagcaaaaatcaggcttttgaacaattttaattttttgcctcataaattttgtgaatgctattcattatagggcttgtatatataatctaaaatgtcagcaaggcatcggagatgggttaacatctcaaaacaaaatagcctacaaatgttccttgtgggagactttggcgagggtctgtgggtaaaagcaccagggggttaatcttggctcagtttcctaaaaagcattgattaatttaactggcttttaaatatccccttccgctgatatttgttgtcagctgcctacagtttaatatgcagcgttcacaaaacagctgccagtgctacaattaatgaagcaaaacttaatatgtaatcacaatctaaattagcatcaatactttgacattcattacattggtttgggggaagaaaagtagttctggtatgtttcattgatccccagataccttccaatctggacatgatggggctgattccagatggtttttctgaaatttcattaaggtaggtcagcgtcatttgtctctgtttaggtaaaatataaaaaccctgcccagtagcagtggcatcgcttggttcctgatgcccatgttccagaggaattcggataccacaaacagctaagacaatctcagcttttcttagacaatcttctatctcaaacttcagacattccagaattgtcatgatgtttacactgtctgagttaaaaatcctgttcaagaaaaaaaaagattttgtatcacttcttaaaaaggaatattcatagcacttgtcacaaatagaaggcaaccatgagataatacaagccagggagaggcttgtattacatgacaggtgtaattagtctgctgagccagctttacccaatgaagggcatatgtgttagagagattagctaagagtagaaattcgagcatagaggccaggtgcggtggctcacgcctgtaatcccagcactttgggaggttgaggcaggcgtgtcacttgaggccaggagttcgagaccagcctggccaacatgatgaaaccccgtctctactacaaatacaaaaattagccgggtgtggtggcacacgcctgtagtcccagctactggggaggctgaggcagcattgcttgaacccaggaggtggaggttgcagtgagccaagatcacaccactgcactccagcctgggcgacagagggagacactgtctccaaaagaaagaaatcccagcgtagatccaaactg

SEQ ID NO: 12795 - DNA, 1668 bp, Homo sapiens
tgagcctccctccgttttcaggaggaccactctctgtggcaccctggactacctgccccctgaaatgattgaaggtcggatgcatgatgagaaggtggatctctggagccttggagttctttgctatgaatttttagttgggaagcctccttttgaggcaaacacataccaagagacctacaaaagaatatcacgggtaagacgcaactgaaaaggacccagcacatctgctggaattctttccttatcagcctgaactgcaggccaagatccgaacatctatactatttgatctctctaacctgtgttttgtgatattttatcatttgttgtactccaggttgaattcacattccctgactttgtaacagagggagccagggacctcatttcaagactgttgaagcataatcccagccagaggccaatgctcagagaagtacttgaacacccctggatcacagcaaattcatcaaaaccatcaaattgccaaaacaaagaatcagctagcaaacagtcttaggaatcgtgcagggggagaaatccttgagccagggctgccatataacctgacaggaacatgctactgaagtttattttaccattgactgctgccctcaatctagaacgctacacaagaaatatttgttttactcagcaggtgtgccttaacctccctattcagaaagctccacatcaataaacatgacactctgaagtgaaagtagccacgagaattgtgctacttatactggttcataatctggaggcaaggttcgactgcagccgccccgtcagcctgtgctaggcatggtgtcttcacaggaggcaaatccagagcctggctgtggggaaagtgaccactctgccctgaccccgatcagttaaggagctgtgcaataaccttcctagtacctgagtgagtgtgtaacttattgggttggcgaagcctggtaaagctgttggaatgagtatgtgattctttttaagtatgaaaataaagatatatgtacagacttgtattttttctctggtggcattcctttaggaatgctgtgtgtctgtccggcaccccggtaggcctgattgggtttctagtcctccttaaccacttatctcccatatgagagtgtgaaaaataggaacacgtgctctacctccatttagggatttgcttgggatacagaagaggccatgtgtctcagagctgttaagggcttatttttttaaaacattggagtcatagcatgtgtgtaaactttaaatatgcaaataaataagtatctatgtctgtgtggagtgctgtgtaattctttccaccatctgttcattgttggcctggaaatgagcaggggctgagaggagcaggtctcgccctcatctagtcctgcctcttctggtctctcctgttgggtgtactcctaatacttcattatatatattgtttatatatttgtcatatctttgtcatctgtccatcgactaaagatacggtgaaagtgactgtgatgaaggaaaagtagaagtgttgaacttagagctagtagagaaatctgcttgcatggccaatgctcagtgcaagaaactggacagcaggtatgtcaggatatgtcataacaaagtggccaatatagagaaacttaaaaacatgactcagtaaaactgcag

SEQ ID NO: 12796 - DNA, 1215 bp, Homo sapiens
cctgccgcgctgccacctccagcagtccctgcgtcatgggcgggctccacgagatagctctgcaccgggcgtccggctccttcgccccgggctctggctccttcgccccgggctccggccacggacttttctggcccaagacccagggttcggacttggcgcctccaagcgcctcgggcttgggagcagcgcctagaccttcgccgccgggctttgagaactcgttcccccaggtctttcaccagactctcctccctccccgcactctttgcttacaacgaaatcctcggggcgcattgcccccgggtaccttccgaccctgggcaagccccgccgggcggggtgcggttggtcccccggggccctctgcgtagcccggcgatgccggccagttcgcagtagcggggtttcgcactaacggggtctcctgtttttttttttccctccaggatcgccacgacgggagcagcaatgggaatccgcgggtcccccacctctcctccgccgggcagcacctctacagccccgcgccacccctctcccacactggagtcgccgaatatcagccgccaccctactttccccctccctaccagcagctggcctactcccagtcggccgacccctactcgcatctgggggaagcgtacgccgccgccatcaaccccctgcaccagccggcgcccacaggcagccagcagcaggcctggcccggccgccagagccaggagggagcggggctgccctcgcaccacgggcgcccggccggcctactgccccacctctccgggctggaggcgggcgcggtgagcgcccgcagggatgcctaccgccgctccgacctgctgctgccccacgcacacgccctggatgccgcgggcctggccgagaacctggggctccacgacatgcctcaccagatggacgaggtgcaggtgagcggcgctgcggctcctgaccggacctgttcaccctacggccttctgcccccaccccgcactcctctaggctcccccgaacttaagggaattttgtcctctctcccccagaatgtcgacgaccagcacctgttgctgcacgatcagacagtcattcgcaaaggtaaatagcaaggtggcatcgtctaactctggtcacacgatctgggcttgtgaagttgactggcaaggttgggggtatttggtggccagcgtgggacatttgtggtagaaggga

SEQ ID NO: 12797 - DNA, 1302 bp, Homo sapiens
aaaggttctatctgcttagcaactagttaataagtggtatctgacacactctaaaccccgtgttcaaacgggggccttctggttttaggaaacttgtagaaacgaagcctgctgattgatttttttctcctttttttttttttttttttttaactttgaaagttaactcttcaaatgggagactctttgaaatgacatgttcctttaaggtactgaagctttatttgcatatttatttcagatgtttcgagtaaacttgaaaagggtaggcacgaagcaatttgttgctgcttgtcacccccaagtccccgtggaggttctgtattttaagaaacagtgcgttgagtgtacagattttatttatgcgtaatttaatggggtctgtaaatactggtgcacttcttacgacttttttgagacatgggatccaattttaatattaacttttaatggtgatggggtaatctataacacatcataaggttttattcatatatatacagggtattaagaattaagaggatgctgggctctgttcttggcttggaagattctatttaattgaaactctctgttcagaaagcaataactttgtctcgttcctgttgggctgaaccctaaggtgagtgtgcagtacagtgtgtgtgggtgaaatggagatttggaattgaactctctgcctgtaaatgttccccaaataattgttgtgtgtatgatacgtgtataataaaagtattcttgttagaatctgaaagtctggctataggtttttgtttttgcttttgttttaaagtcttttgggtgaatggaattagggcagagctgatttatggcttgactgtggcttggttaatgccctgagcaggcaagttttgtgtgctgttggggaggaacctgaagtttcaccttttctccctagcgacactgttcagctaccccaggccttatgctgtcatcagtgtctctcaactgcagagggatagaatcatcctccccaccctggaggtgttgggaaatgtctgagggacagtttattgacattaagaggggccaatgttttgggaacaatgtctcatggaaggttactgtattgaggacaggtacactggcatactgtactcagcatactgtatagtggtcaagaatggaagtgaaatgattatgggtgttctttgggcagatgtttctctcttttttttttttttctttttttaagatgaagtctcgctcttggccccaggctggagtgcaatggtgtaatctcggctcactgcaacctccacctcccgggttcaagcgatt

SEQ ID NO: 12798 - DNA, 1256 bp, Homo sapiens
tgcgccctgggacagcggagagacggcttctctttaatctaggtcccattgtgtcttgagggaggactttaagaatgactgagaactatttaaagacgcaatcccaggttccttgcacaccatggcagcctctccttgcaccttctcctgcctctccacactccaggttccctcaggcttgtgtccccactgctgcatcgtggcggggtgtcacagaccctctgcagcccctggctgccctggactgtgcagagatgcctgactccagggaaacctgaaagcaagaagttaatggactgtttattgtaacttgatcctcccgagctgtgagcgcagtctgaggtgtgaggacacggcctcctgttggagtcccattttctccatcagggcacgtgggcggcttcctcaagcccggaggagctcccaggcgcacaggggccgccggtaacaggggccgccggccaaaggcccctttccagtcatagcactgaagttgcaacttttttcttgtaattgttttgctactaagataatttcagaagttcagtctattttttcagcggatactgccgccaccaagaatccaaaacctatttttgacttggagagacttgcttttgttggttccgcccgtggagacgacgatagtgtttctgtataataaagtgtctgccggctcgcgggccaggatcctctcggtgggatgggcaccacagacaggaggcccctcaggcccgtgcgggccactgtctgctgccgcctgccggggtggcagagtgagttgtctcaggaccccgtcactgcgacgttgacactcctctcccttcccttcctccccaactccccaaacactgtggaaggggagaaggaagtgatccacagcattcaggccacttggggtctagaccatggtggtgccagcctggggggggcagtggccctcagctctgcccgctggagcggttgagtgcagaagggtgcgcctcttccctctacccccgcaccacctgctgtgtgccagcctgagacggttcctgcctgtcttgggggttggtggagggtggaggcagttctgccagccgtggcagggctgctatggggcatccagggctgtgggggtctggaggaggggacatgaggtgagaggtatcctggccgagggcggggggcagcggggggtctccctccggacctacctcagggagctgagcgtgcaggcgctccagggcaggcctgggacagagtcaaggctcaga

SEQ ID NO: 12799 - DNA, 1210 bp, Homo sapiens
agtgagaggaaggcggggggcgcagcaacgcatcgtgtggccctcccctcccacctccctgtgtataaatatttacatgtgatgtctggtctgaatgcacaagctaagagagcttgcaaaaaaaaaaagaaaaaagaaaaaaaaaaaccacgtttctttgttgagctgtgtcttgaaggcaaaagaaaaaaaatttctacagtagtctttcttgtttctagttgagctgcgtgcgtgaatgcttattttcttttgtttatgataatttcacttaactttaaagacatatttgcacaaaacctttgtttaaagatctgcaatattatatatataaatatatataagataagagaaactgtatgtgcgagggcaggagtatttttgtattagaagaggcctattaaaaaaaaaagttgttttctgaactagaagaggaaaaaaatggcaatttttgagtgccaagtcagaaagtgtgtattaccttgtaaagaaaaaaattacaaagcaggggtttagagttatttatataaatgttgagattttgcactattttttaatataaatatgtcagtgcttgcttgatggaaacttctcttgtgtctgttgagactttaagggagaaatgtcggaatttcagagtcgcctgacggcagagggtgagcccccgtggagtctgcagagaggccttggccaggagcggcgggctttcccgaggggccactgtccctgcagagtggatgcttctgcctagtgacaggttatcaccacgttatatattccctaccgaaggagacaccttttcccccctgacccagaacagcctttaaatcacaagcaaaataggaaagttaaccacggaggcaccgagttccaggtagtggttttgcctttcccaaaaatgaaaataaactgttaccgaaggaattagtttttcctcttcttttttccaactgtgaaggtccccgtggggtggagcatggtgcccctcacaagccgcagcggctggtgcccgggctaccagggacatgccagagggctcgatgacttgtctctgcagggcgctttggtggttgttcagctggctaaaggttcaccggtgaaggcaggtgcggtaactgccgcactggaccctaggaagccccaggtattcgcaatctgacctcctcctgtctgtttcccttcacggatcaattctcacttaagaggccaa

SEQ ID NO: 12800 - DNA, 1170 bp, Homo sapiens
ttctacccccaaaacagacagcccacaggcaggagtggtctgttgagcagctactcccattgtgccccgcatgggtttatgatggactttgtgcaggtggctggacagtgtgcttcggaggccgagaactccaagaactctgagagctgctgggctctagtccttccctcttggtggcagcctggaagcctgtaaatttccccgcggagtggggaagtggggtgactgtgcttgtaatatttcaagttatacagtcattcgggggttctttctgctctctcataattacagcatctttaagaagaaatatcaacatgaagtattttcaggggaagagacttttaaaagaaacacacacacacacacacacacacacacacgcacacaggccagaacaccaccaccgagttagtatagtaatgcaagttcgtaatgcatgcagggctgctcgctccaggaagctcccaagcaggaatgttcctgaaggatgggctattaaatattggatcctcaggctggcagatgcgtctgcgctgtaattgggtctttcctggagtaattaaaggaaaatgattatattaacccaagtcaccaggccagcatggcatagagaactgaatggcaacagtattgatgtttccctccaaaaactggcctctctcagcacatcaaaaacgcacccttggcttgagtttagggagctttcctttctttgcactttttataattgatcgcgtgtctcctggccttctttttctttttaaaaagcagtgggggatatccgtgccctctaacgtgagcagcctctacctgctcagggagatctgagcttaaggacaagtgtggcgtaaatgcccccggagactgcggcgtgagagatgacattgaaaaaggtctggcttttagagctcaaacctgggaggcttggactcttttttcttcttcttctccttttctgaagagttggagaagccggagtttcaagaccgtcttggtgtgctgccttatttaggaggcgagctgctgctcatttgtcaggcaaaacagatgtggtggggagacaacatctattttcataattcgaaacaaatctggcgagccgccttccttttcagcggggcctgctcatgcagaaagcccagctcccaggcagcatctagcagaaatatt

SEQ ID NO: 12801 - DNA, 1191 bp, Homo sapiens
gtggacctgtattcatttacactgtatacccattgagaggagagacttgttcagtctcagtacagctcgaaaagtcagaaatacctctgtgcaggtacctatgcaatgattttgctttctgattttgcagatggacgtgcacagagtctgaagtcagttctgataggaaagtggatagtttgtgggcatgtctgtggcaggggaaattttattagctccttagacacactcttacatcatctcccacatagaatgccctttctagttacgaacagccaagggtggcctccttttggagcctattaacgcagcccttagctaaactttaaggttcttgtctttgtacaggaaggaaaagcacaactactgctttggggtatttttcattttatgactcgtgctcccactgagcatctgatcagggatctggaccttgcaatccatatcccattatcatgatcttccttctctgcacagtgctatatttgtattcttccttgcattggagaaattggaaaaaaacatcacttgctgctgttgctgggcagagatttgtgaagctttcgggaagggaactatgaaaattcagttagccctgtgattattctttatccttaaatttatgaaggaaattaaatcaatgtttgctgaaggaatgggcacacgtaacatatcacttctaatagctagagacaaaggtctgtttttggaaaacacattactgagctgccttaatccccagtgtaagacctggactgggggctgggcagtgatgactgtggcccctgaggcccttgtgatatggttaaggggattgtgcaggcagccaccctgtggggcatggcgagggctcggaacggaggggatgcgatgtgtagaggaaatgtctgggagagaccttacatagcaggtgacatttggcctgggctttagagattggctgagaacccaccattcagagaagtcaggggatgagtttcagaaggttctttcagttccctgaaatcattatttgtaaaatcttgcatgtttgtgcatacttaatttctttgtaagacaaggcccatagctttcttcagagctcaaagggatctatgatccccgaagatctagaaataagtgatgcattttatttgtgaactggccacggcaggcaggagatgtcactcaggccattgggaagggcctggt

SEQ ID NO: 12802 - DNA, 1137 bp, Homo sapiens
agttagggaagccaaagtttaaaggactattgaacaaatgaatttgggaattataacattgagttcaattaaaaagcctttttagctgaaacaattgtttatagcgccatatttaattcctataaaactgtattctgaactatcttctgagagacatttcagtgttacattaaaagtttttgcctttggtaattactggttcatttgctttaaagcagcatgtcattttcttggcttaagagaaagattactttttgtgcagggataatgggcttataaatctagtataaaacatatttaaccagttttcccaattttgtttatttttccccctcctctgcagtttcgtgccttagcaccaatgtactatcgagggtcggctgcagctataatcgtttatgatatcacaaaagaagtaagactatatagttttctttagattgttttgaaaactcttttggttgcttagatctccagttgctctcttttttgtgtgttacaggagacattttcaacattaaagaattgggtgaaagagcttcgacagcatggcccacctaatattgtagttgccattgcaggaaataaatgtgatcttatcgatgtaaggtaagttattagaacgagagattacaatacctattatgtgttccttttcttaataagcaatatccagtttaagaatcttgcttttattttatctctgacattgaaaaattccttttggttgtgtggttggagtcctaaatttttaaactaaaattaagatttcaggcatttggagctaattatattatgtatacagacaggtgtgcaatttacggaaatactggttgcgttgcatccaacattatctgagatcagagcagcccccaggctcccatgacttagaatacttgaatgcagaaagcacatttattggcagtttccctgggccacttccatcattcccaaagcaagggctttttgaaaattttggctggggaagaaaaccctgccatccctaatcattccattagctacattactagtggtaccgagttttgtttcactttgtttgtttacccatggatgtggtgtaatcgagaagaccatgtctcagggcccatccagcagccatttagtccatcctttgtc

SEQ ID NO: 12803 - DNA, 2097 bp, Homo sapiens
ctccgtttgcaaaatgcggttggaccatatcatgtcatccaacactgggcataaacagcccatcccgttaagctgtacagttgactcccctttctggtgccttggcttgtctttgaaatgtgcgtttgctcccgtaggaagaagatggactgcggatgaggaagacagtgcagagcaacagccccatttcagcattagccccaactgggaaggaagaaggccttagcacccggctcttggctctggtggttttgttctttatcgttggtgtaattattgggaagattgccttgtagaggtagcatgcacaggatggtaaattggattggtggatccaccatatcatgggatttaaatttatcataaccatgtgtaaaaagaaattaatgtatgatgacatctcacaggtcttgcctttaaattacccctccctgcacacacatacacagatacacacacacaaatataatgtaacgatcttttagaaagttaaaaatgtatagtaactgattgagggggaaaagaatgatctttattaatgacaagggaaaccatgagtaatgccacaatggcatattgtaaatgtcattttaaacattggtaggccttggtacatgatgctggattacctctcttaaaatgacacccttcctcgcctgttggtgctggcccttggggagctggagcccagcatgctggggagtgcggtcagctccacacagtagtccccacgtggcccactcccggcccaggctgctttccgtgtcttcagttctgtccaagccatcagctccttgggactgatgaacagagtcagaagcccaaaggaattgcactgtggcagcatcagacgtactcgtcataagtgagaggcgtgtgttgactgattgacccagcgctttggaaataaatggcagtgctttgttcacttaaagggaccaagctaaatttgtattggttcatgtagtgaagtcaaactgttattcagagatgtttaatgcatatttaacttatttaatgtatttcatctcatgttttcttattgtcacaagagtacagttaatgctgcgtgctgctgaactctgttgggtgaactggtattgctgctggagggctgtgggctcctctgtctctggagagtctggtcatgtggaggtggggtttattgggatgctggagaagagctgccaggaagtgttttttctgggtcagtaaataacaactgtcatagggagggaaattctcagtagtgacagtcaactctaggttaccttttttaatgaagagtagtcagtcttctagattgttcttataccacctctcaaccattactcacacttccagcgcccaggtccaagtctgagcctgacctccccttggggacctagcctggagtcaggacaaatggatcgggctgcagagggttagaagcgagggcaccagcagttgtgggtggggagcaagggaagagagaaactcttcagcgaatccttctagtactagttgagagtttgactgtgaattaattttatgccataaaagaccaacccagttctgtttgactatgtagcatcttgaaaagaaaaattataataaagccccaaaattaagaattcttttgtcattttgtcacatttgctctatggggggaattattattttatcatttttattattttgccattggaaggttaactttaaaatgagccctatcactgagaaatacgtgtttcatgatttaactctgtgtgtgtgtgtgtgtgtgtgtgtgtgtgtgtgtgtattttttttttggttgtcttcagctgacagtatgaaaaatgaaactgctgaaaaagctgagcacctggtcacccttggccttccattgctttggccttcagtaaaaagcagcctcccttctaggtcagggaaccatgccattgagactagtaacgggcgttctgggcacagtcccactgtgcacaggtttgagaggacaagttcatcagaaggaaggcagtccttagaagtcacatacgttgagccacgttgctcctaagcctggctctgtcaagctgggtcaggggccttgaaactggagaagtggaagtctat

SEQ ID NO: 12804 - DNA, 1230 bp, Homo sapiens
gctccttctctaaaggaatggcccatttctcattgtagtttgagaaatacatgtatgaagagataggggtcttgggcttcccagtgtcactttgaacacctgaataacatttaactcctgagaccttctcggtgtagaggccactgcttccccctgctggagatggcatttcattgaagggcctctcgtggctttccctgcccccggctgtctggcctgaagaaggagaaagaaccaaactgaactatgaaaagttaccactctgaggagacctctcttaattaacacttggggccatgtttgctgttgttgagaaggagtgttctcaaagatgagctggaatggaattgtatttagaaaggcccctgcaaagtatatagatggatgactctagttcatgacatacaaatcccataaggccaacgaccactcttctggaacaccaagagcagctctgagatcatgctggccctacgcgaattgagtttctgtggcctaattggatttggagaacgccttccctggccccttttcctcagacagatctgctctgataggaaccttttcaagaaagttactgttgtttcaatgccactccttacctgtatagaacatttccaatacattcgctcattgaacttaatccttgcaactgtgactggggggtagatggctctgtttgcatacgaagaaataaaggctccaggaggttaaatcgggcaactttttagaactaaatcagtctctgtaaggcctacattgctaagataccatttcagctctgaaaatctgcttcagggaagtgagtggatgaggccttcctgcctcagctactctgcccgtctgtacatcttttgtgtctgcctccgtaccttattcagttattttcacactaaagtaagtagaattaagactgtagttcagatgctttttctttttctgttggaaactgaacacactacagacagtgaaaaaaggtacatattccattttctcattgcctgaagatctctgctgatgctcctggagaatgactttgggggctttagaaagaatattgccagtccgtctcggcaaggagatgatgggagcgctttatatggaggctttacatgacttgtaaattaaatgtgaatgagggcagttgattaaaattggtattacagaagggccctgctgaggtttgaaaacagctgagctgctgatgtctcaggcctttccctgaattag

SEQ ID NO: 12805 - DNA, 1243 bp, Homo sapiens
catggctcactgcgaccttcgcctcttgggttcaagggattctcctgcctcagcctcccgagtagctgggattacaggcataagccaccatgcccagttaatttttgtatttttagtagagaacggttttcaccattttggccaggctactctcgaactcctgacctcagatgatctgcccgccttggcctcccaaagttctgggattacaggcgtgagccaccgcgcccagccgatttccctcccattcttaaaagctttctaccgcagtgtgttatatagttaaaataaacaggaaccatcgataccatttcaaaataaggggaaatgttccctgtggacatttaactgaagaaaagaaatgacagtgtaagattgcattgagatcttaaggattgcttttgccaaatggtagataatttgctagcggttttaggcagttgtttcacacatcttaacacatggttaatgattgtgtgactgagataactggatcagccctatttccaaaataagctaagtgtatttaagtaaaccttgctactattgagcattttgtagttgtttcatttactgcctagttttttttttcacttgcaactgatcacaagaatcattgaggttcatgccgttctatcacagtactagtagtaagaggtctttattttaaggatcttttgttgactttttcattacatttctatagccagatcaagtcaaatttacgttctgaagtatgtccaaggaaattaagagctggtgcatgaaaagataggaaaacaatccaaatcctagcagttatcaaaagcaagtttataatacaggcaagtgcattcactcctttctatatattttcagggagcaacatttaagagagagtaaacattcactcctttctgtatcttttcagggagtaacatttaagagagagtaagagtatttgtatctaaattggattagaataatttttttcatgtccctttactttcctgtagcttgctgatgaccgtatggcactggtgtcaggcatcagcttagatccagaagcagcgattggtgtgacaaaacggccacctcctaagtgggtggatggagtggatgaagtaagttccatgttagtttcatagcatcttgtttttttaagtaattatgacaatgtattttaagatatctgtcatataaacgaatttggctacacttgaatgtatatttctagaaatactttagctttaggttaagttgt

SEQ ID NO: 12806 - DNA, 1243 bp, Homo sapiens; identical to SEQ ID NO: 12805

SEQ ID NO: 12807 - DNA, 1432 bp, Homo sapiens
aattgtaaatggaatattcctcatttaaaatttttgcactgcattttctactgtaaaccaaaagaggttactaagcaaaaccacctaaatttaagttggtgatttaaatgaatctcacattaaaagaaagcttgacagtgttatgaaagccaccagactcagccagtgtgtccccatgggtatccccagccatccttgctcaatccattacttatatactaactacataatgacctgttcaaaccagactctatttaatgaactgtgaatttacacagaggccattttaaatgggtcaccccatttaggattagtggatctcaaattattaaccaaacatcactccatttcaaagtaaaatattccaccagcgatttgatttattggctcttccattgccactgagcaatgcccaggaagcaggcacattgccaaggactgggggcatcttgactaggaagctcctcgtttgtgtgagcgtgggtcagaccgccaaagtaggacttcatcgtttacctacctattatcaatatggtgcttgaatatattcctataactgtagaacagtgtggaaagtgatggtaactttgaagttgttcatgttttattggctttgttttaattgacactagtagagttttaatggtctttgtgtaaattttaatggcttttccattgtttttgcttctcttaaaaagtttaagaagaatatgacctcattaaatgtgctgttttatttggaccagtcacacaaaatgtctctctagagttgactttaaagttgtttacagaaatttaaactcaattccagagattgaagttgtccaaacagctcatgggcttagtgtccaaacccctgcccagccttccctttccaagttggtgccacctccaggtagccattggtggttttcctattactgatgtggctgtggaatgataaggtcctagaggggccctggcatttcaggaagcggacctggtattccctgacaaacattgcttaggaaagagggccggagaataagaagccagcacctcatcagtcagccctgcaatgtgagacttccgtagctgttgagagtcactgcaggtgttctttcatcccatctgattttaacccatggttgagacgttccaagttagatctgctgctcttaggtgtggggctgtccacattagggaacttgcctcaaaaacagtccacagtggcaataccggacttctgttcaagctttttaaagtgctgagccttacaaacccctgaaggaaagtgaccctttaagagaggatcatctttttttatatttattttcaccaaatagggtgatgagggttggtttttgttccctcaacccatttgggtaaaataacggatctgattagaaactgttttaaggaggggctgggctcggtggctcacgcctgtaat

SEQ ID NO: 12808 - DNA, 1235 bp, Homo sapiens
tgcctacgcctggcctgccagccctgaacgtgtccagccagcagcatggaaggctctgggctccggctggtgctcaggatctccttcctgagaaggggactgtggggcacgtggaggggacccaggaggtgaggggtccccaggaacccctcctgtgctgcagccccacgcccagagtctgtgtcctgccctttgcttgcagggtgagcgagccacaggcttcggtgtggccctcctgctggcgctcttcggccgtgcctctgaggaccctctgctgaacctggtgtccccactgggctgtgaggtggatgtcgaggagggggacctggggagggactccaagagacgcaggcttgtgtgagcctcctgcctcggccctgacaaacggggatcttttacctcactttgcactgattaattttaagcaattgaaagattgcccttcatatgggttttggtttgtctttctggtcgtcagcgtggtggtggaaacagctgaagttttaggagacagcttagggtttggtgcgggccacggggaggggaccgggaagcgctggggcttgtttctgtttgttacttacaggactgagacatcttctgtaaactgctacccctggggccttctgcaccccggggtgaggcctcctgcctgcctggtgccctgtcccagccccaggtcctgtgcagggcacctgcgtggctgacagccaggctcttactccagccggggctgccagcgcatccagccagcccagccctgtgaaagatggagctgacttgctgcaggggacctgatttatagggcaagagaagtcacactccggcctctcagaattcacttgaggttcaattaaatacagtcacaccgccccctcacctggcctcgttcttctttctccccctccattttagaaacgggtcctggagcccatctagggaatgtagtgcagggctgcctcctgcttctcccagaccggctctggctttgagccccagctggtcaacccagtgttgatgacaggagcccaggacctggggaggacagggggccgctgggcctaggcctggccttcctgaccattttgattttctgggtgcacacagcacagactccaggtggaagtgctgtgggctcctgaactctctacagcccggcagcctgcacggaggccgttctgtctctcgagggtcctggagcctgcgctgtgtgaggtcgactgtgcttccgtgcc

SEQ ID NO: 12809 - DNA, 1235 bp, Homo sapiens; identical to SEQ ID NO: 12808

SEQ ID NO: 12810 - DNA, 1034 bp, Homo sapiens
ttgtctccagcgggacgcacggcgtgcgccccgccgtccaacaagcctttggccaccagggcgcccctggcatcctgggaagtttgggggagccctcgccgcctcaccctgacccccgatcccaggctgaccagctgagcctcctctcttcccactcgcccctgacctgcctttccttctcacctcctttccacctgcgctgctcccacaccgccctcaggctccccagtttagcggtgggcaactaacctgaatccatgaaaacaaggagaatctggacggcgtcctccattagtgacgccggatggggatgggtccctttttggaaggggactccggggacgcgtcacggcgggtgggcttctttggcttgcagcgacgccgctgcttctcctccttgggctccttcgactcttcggggtcccttggatctttgtcctcgggcttgagctcctccccttccctggggctctggggctcctgagtgctgggcggcgcgcgacttggggaggcgtcggggcttcgcaacttgagagcgtgcagacgctgggtgagggactggccgaaggtggagtgcttgggcaccaccgggccgcgatcgtcttcaggctcggtctcgggctcagtggtgggggcggtctcaggctcggtctcgaagtcggtctcggactcgatttcggactcggtctcgctctcggtctcgtagtcgaactcttcctcgtactctaggcactcggggagggacagctcaaggtctgcctcctcgtgctcgtggtcagattccgattcgggggactcagggaatacctgggcgccggagcggtggtgggcgttaaggaagctccggcgctgttgggcagccgcgcgctgctgggcacgggcgttggaggtggcaagggcgcggaggagcgcgatggagcaggagagccagaggagcgcggtggctgcccggcggcctatgggcgggcacaggtcgttgtaattatggcgagctcggcgccactgctgagcccgggacctccgatccatcctct

SEQ ID NO: 12811 - DNA, 1202 bp, Homo sapiens
gccgccgccgccgcggccgctcctcggccctcctcctcctcctcctccttccacccccctcgccgccgccgcctcctcctccccccgcctccccccgcccgccgcggcgcttttggctcggggcggcggcgggggcccggccgaggcaataagagcggcggcggcggcagcggcggcagcagctcccgcagctcctgctctggtccgcctcggcccggcggcggccatcagccccctcggcctcggctcgaggggcggggagctgcgcgcgcccctcggtccgaccgacaccctccccttcccgcccgtccgcgcgccccgcggcccgcggcccgcagtccgccccgcgcgctccttgccgaggagccgagcccgcgcccggcccgcccgcccggcgctgccccggccctcccggcccgcgtgaggccgcccgcgcccgccgccgccgcagcccggccgcgccccgccgccgccgccgccgccatgggctgcctcgggaacagtaagaccgaggaccagcgcaacgaggagaaggcgcagcgtgaggccaacaaaaagatcgagaagcagctgcagaaggacaagcaggtctaccgggccacgcaccgcctgctgctgctgggtaagggcgggcggggggcgccggccccggcccgggggccctcgaagggcgccccgcaggccgcgcgcgccgagcccgccccccgccccgggcgcgcgctcccgagccccccgcccgttcgcgggctctgtctgtggggggcgaggccggaagggggacccaggggcgcggattcggccgggcgggggctcaaaaacggggcggggggccgtggcgacgcgggcgcgggtccccctcccccggcctgcccgctcagtgtctctctcttgctctcgctctcgctctccccctctttctctctttctctctttttccgcgaggcctacacgacgccaggggtttgggtgcgtgttggggagggggagggggagcccatggggctccggagactgcgacaaaaagagggtttcggggacaggaaaccgggtggcgggtagagggagggggacccgcctccgtggggtgtgagatttgttgggagagggaaagaggggaagaaaggggcgaggagaggagggggtgacgctggggggcgccgtggtggcggagggggcctcgccaaagggaggctttggcgggg

SEQ ID NO: 12812 - DNA, 1250 bp, Homo sapiens
gtatcagaacaataactttttattagtcctactaacatctgaacttttatgttcctacctacaagtcccccatcatcattttttttggtaagattcacattttcccaggaggaaaatttagtcccagcacatcttacaaatgaagtttcttattttcacaacattgaaccatttattggcatattctaacacatttagtgtatattcttcctaaacaattctgtgaagaaactaaattactcagtagcttaccccattccccctacacacgagaaaagaaactacccaaaaccagtaattcacaataagacccagcagctaattgcgtgaacttttgaatatgtttaacgtgttgaattaaagttctttgtgagcattaattcattaattgggctcaaaattcaaaatcacaccaagtgtcggtcacatagggaactctggtctcagggtttgaatgacagtgttgttgattagttcaagctcttgcctttctctaaactttcttgtgttcactttcaggaattctatgagcatgccaaggctctgtgggaggatgaaggagtgcgtgcctgctacgaacgctccaacgagtaccagctgattgactgtgcccagtagtaagtaaccgccacccaacccatcagcacataaaacagacaaaaacaagaaaacatgaaaacctgtgatcctgctttgaaagttacttgttgatgattcctttcttagaagccaaccagttaccccactggcagaaagttctaatctgattcaattgtttatttataaagtccttaattgcattttttttcttttagtgcagcgacattattttacataaacatttaaagcctgttagagcaaaatgatgatgagtttcatagtattcctaattagtaggaagtaattaattgaattgaccctaagcatttagggaaatagggctgtgctcacattttgaataatgtaaaaatactatattttattgctgtaattttaaaacataacaaagaggaatggtgaagacatagctacgcctcctctctccttggtagttgttgattgatctatttctgctctcaggtaagcgactctagtagctgcctagtgttactagatcctagtgactctaggtagagtttgtttttgtgttgtcttgacttttgaactctatttcatatccttatttattccttctcaccgggtcttgattcaaggatggtaagtggtcaatggattttaaatcctaaact

SEQ ID NO: 12813 - DNA, 2851 bp, Homo sapiens
agcaatttgaaaattaaaatgtttttgtcaggcattaccaaatggcacagaatgtgataggccagcctggttttggggtcctttctctactggttgatatgcataaaaccttctaaaaatcaagaatattgccagagagcaacaggaataaagaagctaagtaaagaataaaaaagaaaaatagaaaaaataaaaataaacacgaagaacaaagccccaccaccgtgctgtgctgtttgtgtggccccactgcgtcgaggccacaggctagctgctagacgcatctagagttccctgattcctaaaattatttatcttaaatcctgtttgccctaaccttcttaaggcatcagctttgagttacaaatgtaaccaacacacaagcaaatgtgccattgacttagtgctgcataactgtgggacggtcacttccgttgagcctgaccttgtagagagacacaaatagttggcaaattgatgtgagcgctgtgaacaccccacgtgtctttctttttctcccagcttcctggacaagatcgacgtgatcaagcaggctgactatgtgccgagcgatcaggtgtgcaaaacccctccccaccagaggactctgagccctctttccaaactactccagacctttgctttagattggcaattattactgtttcggttggctttggtgagatccattgacctcaattttgtttcaggacctgcttcgctgccgtgtcctgacttctggaatctttgagaccaagttccaggtggacaaagtcaacttccagtaagccaactgttacctttttatataacagagatcatggtttcttgacattcaccccagtccctctggaataaccagctgtcctcctccccaccagcatgtttgacgtgggtggccagcgcgatgaacgccgcaagtggatccagtgcttcaacggtaggatgctgtgggcttggctgttcgtaaagaacgctttgcttctgtgttgttagggatcagggtcgctgctcacgctcttggctttgctctctttggttaagatgtgactgccatcatcttcgtggtggccagcagcagctacaacatggtcatccgggaggacaaccagaccaaccgcctgcaggaggctctgaacctcttcaagagcatctggaacaacaggtttgtggagtgaccgcccaccccctgcgcttgcccaggaggccctggtctgcactgtttatagagaagaaccccgtgcaagcattccagacccctggccgaaagcgcgcttctcccaagcattcacacggcctcccttcttgtagatggctgcgcaccatctctgtgatcctgttcctcaacaagcaagatctgctcgctgagaaagtccttgctgggaaatcgaagattgaggactactttccagaatttgctcgctacactactcctgaggatggtgtgtatggcttccactcttgctggctgttcattgcggtggttctttttcaaacggtcaggctgaaaacccccatccccctcccaccaccaaaccataaaggatctataagagaagcaagaaaaacgcactcccactaattctcatatggaaaaatcagggttttgaagacttcaggagctacagagatgctagcaccccagctctgcttgaattttaaattacattaatatgtattccctttttatatagctactcccgagcccggagaggacccacgcgtgacccgggccaagtacttcattcgagatgagtttctggtgagtcgagcctgtctttagtttcctctcttgttcctcctctttttctcatggatgtaaatttacttaattccaaattcaggggttcagctacccagttccatggttttagttcacgcacatccagtgtggatttgagctctttgcgcccctctttttgcttttgttttcatatgacatcagaggctggctgacagccgtccctggtaggtgtccccatcagggatagggtggttcctggcgagggtgtcactgacaagtccccttgtttgtgcccgcagaggatcagcactgccagtggagatgggcgtcactactgctaccctcatttcacctgcgctgtggacactgagaacatccgccgtgtgttcaacgactgccgtgacatcattcagcgcatgcaccttcgtcagtacgagctgctctaagaagggaacccccaaatttaattaaagccttaagcacaattaattaaaagtgaaacgtaattgtacaagcagttaatcacccaccatagggcatgattaacaaagcaacctttcccttcccccgagtgattttgcgaaacccccttttcccttcagcttgcttagatgttccaaatttagaaagcttaaggcggcctacagaaaaaggaaaaaaggccacaaaagttccctctcactttcagtaaaaataaataaaacagcagcagcaaacaaataaaatgaaataaaagaaacaaatgaaataaatattgtgttgtgcagcattaaaaaaaatcaaaataaaaattaaatgtgagcaaagaatgatgggactcccgtgagttatttgtggttctgagcaaattcccgtcattcatggttttgacttggtccttaggtcaaaagttgggaggccccaaggtgaagtgggtataaaatctcaccactgtatgttttctggtgaccctaatctgtaggtgtcttgaaacaatttgcagacaataggaaaagtccactcctgttcctcctaaatttcaccccatagtgaaccactatgccccagtcagtcacctctgcattttgatcattgccatcctatccaaagattctaccaacaactcac

SEQ ID NO: 12814 - DNA, 1187 bp, Homo sapiens
acaaaaaaaagtacaactagaagattctttttgtttgtttaattatagccagaccattttttgtcatatgtggtaagaattgcagttttattttctcacagcaatatgaatgctggcccatcttggaataaagtgcaacattcaaagaattcttcaggaaaaaggcagagtaaatcccaagtaccccacgcttcttcccagccgagaagcagcctcacagctgtcacccagcctactgaagaaaaacttaaagaaagcatttccccggaagcaagacgcaaaaggaatccactcggttccaggtgtcagggggcctcagggaataaactgtttcttgattttcagtcaatgaaaattattaaagagaatgctgatgaggacagtgcaagtgatctctctgattcggaaagaattcccattcctccttctcccctcacacctccagatctcaatcttcgagctgaagaaattgatccagtttactttgatcttcaccctggtcagggccatacaaaacctgaatactattatcctaatttccttccatcccctttcagctcctgggacctacgagatatggccctgcttctgaacgcagagaacaaaacggaagccgtgccccgagtgggaggacttcttgggaagtatatcgatagacttattcagcttgagtggctgcaagtccagactgtacagtgtgaaaaagcaaaggggggcaaagcaaggccccccactgcccctgggacctcaggggcactgaaaagccctgggagaagtaagctaattgctagtgctctgtccaagccactacctcaccaggaaggggcttcaaagtcaggcccttcccgaaagaaagcttttcaccatgaagaaatccacccatcacattatgcatttgagacttcccctagacccattgatgtgcttggtggtaccaggttttgttctcagaggcaaacccttgaaatgaggacagaagaaaagaaaaagaaatcaagtaagagtacgaagctgcagcgctgggatctgtccggcagtggaagcagctctaaggtggaaaccagcggtcacattcgagttcccaaacaggcagctgtgattctggactcagcagattcctgtaaggcctccaaaacacaagcacatgcacatcctaggaaaaagggaaaggcagagagctgtggtca

SEQ ID NO: 12815 - DNA, 1154 bp, Homo sapiens
tttctgcctcagattgactattttaaccaatattgtcacgactagatcatagctcctagtgaataacatgaggtgttttaaagttaggtctattacagaattaacataagcacaattttaattttatgatatctgatatgcctatctaatacatcttaatgcattaaatgctgcagataagaatcttgctatttttcaagtagacaacattagaaagttgaatcatgaactcattcaattcatcaagtcaaaagcactgagtgttttgctagtctagtgacatgggttattgtatttccgagaagtgcctctcatttctggggagttgtttacatataccctgcatttaaaccaattaaaacaatccaagtttctttaaaaaaaaaaagaaaaagaaaaagaaaaagaaaaatattttaggcttagaattatctaatggaaaaaatgtaaaaaagtacaaaaatgaactaaaagtatatcagtatttgcagtatttgctgtgattacttaggtttagactttctcaacttcttagatgactaaatgggctgaagacttgtaactaacttgaataggatagacttcataccctgtgacaaaaaggatggggaagagaatatcattggtcttgccatatacctcctagctaaaaggaaaatggtttgtagttgttcttgggcctactgtgttgcttttcagaaggacataagactttctactttatctgatatggatatcgtctacttcctcattcctttatgctcacttatggagtagttacatagaaatataactcttggtggtactgtattttaaggtaattcagaagcagtatgtattatttatgtacatgtacaggacaccattcaaaatggcttgaaaatattcagcatgtttgttatttgctgttatattgtatgtttagttttgtatgtgataaacagaattgatgtaagtttttgtggacttgaatttctccttccttgagatcaattaaacagcagaaaaatattgtctggatttttctggtattgttttgttttgcttttcatgcagttctcttctgaagcttgcctttattttctccctggttatttaaaggaattgcccaggatgaaatgctgttacaactcctgtcttaacactaagcgaca

SEQ ID NO: 12816 - DNA, 1210 bp, Homo sapiens
ctcaagtgccatttttccactgggaagctcctggccccaccctgcatccacgtggtcaggttgatctcagacccaggtagatctctgtcacctaccggcaaaagggtttggagcatccacttccatatcaaaatgtcaatctttagaaatctgccctgggcagaaatctgacaaatattttttaagcacttgctatgttctagggactgtaacaagcacagaggaactggcagtgagcctgccctctgccttcgtggagctcatcttggtggtcaggcaactttttaacatgctacggccaggctgtctgctcagattaagaggacattggagtgactgtcctctggtctagtcactcccctcccaaatatccaaatcccaaagagccagttctgcaggcgacatcactacttcccatctgagagtgggtccaccgcaggccatgtgggctgtcagagacagccctgtgtacttccctgtgtgccagttatccctgagtcgtcttccagcactgcccccagatctgtcccttctcccacagccaccgaaggaataaatcttgcttaaaacgcgtacatcccagcgctaagaccctggcaggcgatgcaccctacctactcccaagatttacatcctgagtgtgaaagtcaataaaaactaattaaatgtttacctcatttccttggtaatgacccttacatgccactaattgtcaaactgaatctatatgcaggcgttccctctattggggtcagggctaatttctgcatacacaaagaaacatcaccgcggttatttacacctgcggccggtatgttctgtgcagatgctcgtgagctcatttccataggaggaggagttggtgccgagatttcagcgcaatgagcagggaattaggtatgcaacaaccatgaacaataatgagagccatgcacctaattccccggcatcatcttaaaaatttgttgtattaaataatgctgtaatgttatgttaagtaatgcaatgttaagtaacattgacttcagcctcattaaataatctccttaactatcatactggaaaactagtatcattagacaaatgctatttgtcatcagccatgatgtaattgttgcagaagattccatgctaaggaaagaattaataaacaaagcaccacaaatagagtgccctcctcaaggagcacaaaaagaaaagtgagaggatc

SEQ ID NO: 12817 - DNA, 1150 bp, Homo sapiens
atctgcctgcccccttagggaggagctgagcttcagccacatggcccagccctcacctcccccacaccaccccttgccctctcccacacccccctgcccttcccctataaaccctcacagccccccaccctctcccacacctccaccttcccccacaccccttccccacaccccctccccttcccccacaccccctcccccacaccccctcccccctctcccacacccccccccccatctgcccttgggttgggaggagctgaactccagccacgggccctgcccaaccctccgcctcccctgcccacagactgctgctggatttgagtttgccccttcaacactcccacgctccatcttcacaaatgcccttttctactcggaaatgcccttcagttaaatgcagagagcccttattggacacctactttatgcaacgtcctacctccctacctcttcttctgggcctcgctttccgttccatctgatcccggggctgagacaacgcgtcctgcaccctaactctgtgtctgtgacccccagggactccgcgctgctgacaacgaccccacggcacccccctatgactccctgctggtcttcgactacgaggggagcggctccaccgcaggctccgtcagctccctgaactcatccagttccggggaccaagactacgattacctcaacgactgggggcccagattcaagaagctggcggacatgtatggaggtggtgaagaggattgactgacctcgcatcttcggaccgaagtgagagccgtgctcggacgccggaggagcaggactgagcagaggcggccggtcttcccgactccctgcggctgtgtccttagtgctgttaggaggccccccaatccccacgttgagctgtctagcatgagcacccacccccacagcgccctgcacccggccgctgcccagcaccgcgctggctggcactgaaggacagcaagaggcactctgtcttcacttgaatttcctagaacagaagcactgtttttaaaaaaaaaaaaaaaaaaagaagaaagaaagaaaaaaaaaaaaaaaagaaagtgccttttggtatgtatcagattccctcaaactcaggagtgtctaaagcagacagaccgtccccaccttccca

SEQ ID NO: 12818 - DNA, 1232 bp, Homo sapiens
tccatgcttcagtccttcggagtatgcgtggattgttcgaagtgtgactatggcccgggagccagggcagcatgaactcctttctctgaaatttcgaggcctccttgggttccctgaactccgggctgatgttcccaggacccagcaccaggagaccccagtcccgccagcagccgccgctacccaggagggctgggcgacattggccgcctcccactagctccccctcctcgcccacagcctcttgtcactgccaagcccccgttccttttgcccaaatcacgcaggcggaagctgcagtgccagctggagggatgttcatagggcttcctgtgcccatccctgctccaaacagctggacagcttcccctctacccccaccctggtgagcccctgggggccagagaaagatggggttcctgcaccttcccagctccacctctgaacttgagttagcgttagctaagcatacaatcagtgtcgaacgtctctcttccttaagcttgtagatacgactgcctataatcaggggactcccactggaggccgggaggccaatgctggccaggtgcgagggcatggtttggttcctttagggaatttttgttttgcaaacaggagaaacctgtgctgcaggttggagtggcaggaacgactggccttggtcagcaggcagcccccagcctagggccacagtcctcttcagggcctgggcagccccaatttctggcccagcaggtttctctttgtagtgtctttcagcacatccaaaatgctaggcctcctgccaccaacgtgtcagagcaatgtccaactgtcaggctctcagagatgcctcagtttccctagcatgagcaccagccgacacacacagtccactgagatgataattctgttctctccaaagcaaaaagctgggcgaggggtagtctcaatttctgtcagtgctcaaaggaataacaccaaaagaatcaacacagaatctcccagacacacgtgacccagctcgtggcgccgtgggtccgtaggagggacagtacctcacaacaggcccagcgggggaccacctctctgtacaattggaatgcgttttacttttcttttctctccttttttcattccgattttttttgcatgtttctttttgaaatgggcaaaatgtgtagcagcctgcatgagcacagttgttttggggaaagatactggagtatgatgtactcacacctgcaaat

SEQ ID NO: 12819 - DNA, 1368 bp, Homo sapiens
gtgcattttggtttagttctacctaacttactatgtaggtgtatgtctacagccgatgacctcatttcgtttattttatttttgtaatagtcagttggcaaagcaaactgattttttagactatttatcttccttcccttcccctcccaccccgctctcctctctgccccctgccctcccctcccctcccttcccctccactccgctgagaatcctggaggaatacacaattcatcgttgcacccccacctcagagtgtaatcgcatttctgcttggtagaggccgagcccagcaaaggtggctccttctgaatgtgtggtcagcatctgtacaaatgcattttatttgctatagtttgtaaagctgtaaagttaaaagagatgaaaaccttttcagcataaatatattttacttgcactgtgttttttagctaaaagtgaaaacctagattaaataaaatcaaagttgagaagaatcatcaaaagactgtttctcggtgtgaatcaagtgttgaaaaatggttggtgtattttgtcagtaattgtacataacttttggcacatgacatagaaatggctatgtaaactataattattttgctaagagactgtatgcaagccttgggccgactttacagacgtccagagcaaagccccttctttgtacctatttttttattacaaatatactaattggttctttctattttcagaggttattgtatgaaattgtctattgatagtacttttatgactgtaaatactctggctttctccgtgtgaattctcacattagactttaattcgagcgcgtgtgaactgaacgctgatcagtattttttatcaacacctgagaactgttacaccttttattttgtcttttaggaaatccctgtctttccattttttcatgtaaattttgcacagttacttgttcatatgtaaatattttactttcagaaatgaagtttttaattgctattgttttatataggattgaaagaaaattaactcctttattaaaaacaaatttatctgtatttgttttgcctatttttcctccgttttccagttttagattctactgccagattgcactccggctctgctgaggtgctggtttctgagccacctgttggaatctgtagctgagccccatcagagccgggagaaagaactttctctgtgaggacaggggccgagctactctctgcgtggagtctgggggctggcggctgcgcttaacaccttctgctgtcacaggtggagatgagctgggcacagctaggaggggcggcgggaggcccagtgctgggggagatgtacacagaaacgcacgtggcgagcccggctgaggtgcccagaggg

SEQ ID NO: 12820 - DNA, 1600 bp, Homo sapiens
gtctcaatggcatcctgcttctggaggggatgcccttgtctgtaggaaacacgtgcagaatgttccgggtggaggaaagtcaggttagcaactttcaggtgattcaggaaaaaattgtgcgtactcttcttccaacttctgagcctttaaaaagaatttaatgctgcctctggctttaaaaagctttgcatagatcagacccccacaagtccccgcgctgctcccggctttgctttctctggacttgagtcccctgcgcatctgtgtgtagatgttaacccggcgccaactcacagctctccttccgcagaacaatcgagctttccaggaaagcagcgaggcaccctctctgctgtggcagatgcagcaggtgcaggtgcggggaggacagaggcctggcctcctcacggccctgccttccacgtggggtttcctgcccttaccaccccagcccacctcccgatgaattccttgtacagttaaagtgatcttcccttctttcctcaagggacgatgatgacattaatgatgttgcatcgatggctggagtaaacttgtcagaagaaagtgcaagaatattagccacgaactctgaattggtgggcacgctaacgcggtcctgtaaagatgaaaccttcctcctccaagcgcctttgcagagaagaatattagaaataggtacgttggtgtttaatgactgagttcttattaaacagctgcgctgctggggcatgggagcttcaggtgagcacacctgacacctggtcatgtgttttgtctgagtttgtgatttccacatggttgctggtggtggttcttgggtaaaatatgggtaccactgccttccaccccaccagcctttctgggctccccttgggttgtataaaagcagtaactgctggatcagagattagccgtaaagaaagaactgtgcttaatgattttaaaatactgtttttcttgcctgacctttaggtaaaaaacatggtataacggaattacatccagatgtagtaagttatgtatcacatgccacgcaacaaaggctacagaatcttgtagagaaaatatcagaaacagctcagcagaagaacttttcttacaaggtaacaggctgtttgccgaggagagcgtctttatgttgttggcccccactctctgctggctgggagcctcctccccacaccgaggcagagggcggtgggtcccaagtgcctccatgttccttacgaacgtgttttggatttcttataggactagattttggaaagatttctttttgaggtagggtctcactctgttgcccaggctggagttcagtggcgcagtcttggctcactgcagcctccgcctcgtgggttcaagcgattcttgtgccttcgcctcccaagtagctgggattacaggcgcacaccaccgtgcccaactaatttttgtatttttaataaaagggacagggactcgcgatgtagcccaggctggtcctaaactccttgcctcaagtgatcctcctgacttggcctccttaaatgctgggattacaggcatgagcctctatgcctggcgggtttaccttttggaaggcacctgcctctctctc

SEQ ID NO: 12821 - DNA, 1125 bp, Homo sapiens
ggcagcctcacaaccggatcatgctcaccacgcctcagcagatccagctgaacccactgcagccaggtgagggcctcgcgggcccctggccgctcaacaccaagggctgctcccagagccagctgccattgggcttttatttaattgggtaaaatgtacatttacataaaattggccattttaagtatctagttcagtggcactgatttcatttactgtgttgtgtaaccatcaccactgtcagtatgatttttaattttatgtattttccatggttagcttctttatctgtaatcattcctgcactttaaaaaccttgatgaaatacaggaaaataaatgctcgagaggtacagcttacactttgtactgtaatttagagttattaatatgaagtttttggaaactttcttgtagctaattaggagagtggtagctgtgcccttgagcctgtaaagcaccaaagcacatagttgatctaataaaagccttgtgtggtttccactgtgtgtttgttttgtagtccctgtggtgaaacccgccgtgttacctggaaccaaagccctttctgctgtctcggcacaagcagctgctgcacagaaaaataaactcaaggagcctgggggaggttcgtttcggtaaggaatgggcctgtgtacgttggagaagcgtggccagagcggagaagagtccagagtccgtgctgctccattcccgcccacgggtctttcccacgtggccctggcggccggggctccaaggctcctgcttcacgctcactttgacctcacgttcacacaagtgtgttttcccatacagttggctcaaagaggttttgcttcatacacatagccagaaagcgaatcaactgattatttttatatgaactaataggaaattcattttttagtataacatcgtattttgagttcattgcattcctagtatagaatgcttcactttccatgtattcaacttcagaaccctcagaaatgctgtactgctccaggcgtagtggctcacgcttacagtgccagcactacaggaggctgaagtgggagaatcgcttgagcccgggagtttgagaccagcctgcacaacatagtaaaaccttactcaacaacaa

SEQ ID NO: 12822 - DNA, 1100 bp, Homo sapiens
ggggtctcaggagtcaggcagggccagcacagggtggcgtggggggcaggggtgggtgggtggagggcacggaaggggttttcccatggatcatgttgtataagtgaaccagaccaccctgatggcatccacagtgatgtcaaggttggggctggccaggggtgggtggactagaagcatttgggagtagtggccaggggccctggacgctagccacggagctgctgcacagagcctggtgtccacaagcttccaggttggggttggagcctgggatgagccccggcagcgccttggcccttctgtggtccctgccagcctctgacctgggccggtcagtcattgctggactctggccacacactggcgttctcatccacttggaaacaagccagtcttttctgcaaggtcagttgaccaagagcatatttcccctctgttgtacatcgttgttttgtgtttgtgttgtaacagtgggtggagggagggtggggtctacatttgttgcatgagtcgatgggtcagaactttagtatacgcatgcgtcctctgagtgacagggcattttgtcgaaaataagcaccttggtaactaaacccctctaatagctataaaggctttagttctgtattgattaagttactgtaaaagcttgggtttatttttgtaggacttaatggctaagaattagaacatagcaagggggctcctctgttggagtaatgtaaattgtaattataaataaacatgcaaacctttaaaattttcttttctgatgctctaagaatcctgttgactcttctgcccaagtcacctctgcatcatgtccaggtctggagcacacacttaggctggtggaatttggggagacttgggccccatcaggtgatggaacgaggtggctgacccaattggtcgggtgaagtgcggccagcagacccgggttctccctgtgggccacccttctgggatgaatggctctgctctcagaaactggatacaaagttcttttaaaaacccagctcacagataacacctgtatcataagcagtggcccctttgccaccttcctgctgcctccaagctccccagctcaggag

SEQ ID NO: 12823 - DNA, 1203 bp, Homo sapiens
tgccatgtcacttcaggtgaatcagaaaactgatttattctggggcgtgatcctaatcttgacttgcacaagtgtaacttgacctagctcaccaatttcagtaacattgttctgttctcagttcctggcatgggatattccaaattcctgtgtctggagggaaatgatagcttttgtcttgccatcctgagtgaccagtcacaaagcagttgaagggggctggaagccaccctatgaggacacgccattagtatgtaagcagaatgtgtgtctacctgtcaaagtaatttccagtaacctgagttcacaattctggtcctaggtgagtttttctaggagtgaaaatgcagaaaaggatgttgaaagctattggctaatgtatcatttgaactgctgataacctgagaaggggctcaggcatggtttaaaatgttcgtatcttcactaagtacggttctttcctcacatgcagtttcttaattggatggcactgacctgtttcttttcttgctagcgttatacgcagagcaatgggcgcaggccgtttggcatctctgccctcatcgtgggtttcgactttgatggcactcctaggctctatcagactgacccctcgggcacataccatgcctggaaggtgagttcgtgacaaaggggctttggacagtcttgccagaaaaaggctttgaggggtgggaggtcctgggcttcctgctgtaggccctgtatcagtgaatgagtcagtttaagttaacctagtcctatgagagcaagaaaatgattaaacattgctgtttggaagaaaatcaaagggcagcaaggtgtaagcgtagtccacataaattaaaattcttgggtgggcgtggtgactcacgcctgtaatcccagcactttgggaggccgaggcagttggatcacctgaggtcaggtgttcgagaccagcctggccaacatggcagaaccctgtctccactaaaaatacaaaaaaaatttgctgggcatggtggcacatgcctgtaatcccagctactcaggaggctgaggcaggaaaatcgcttgaacccgagaggcataggttgcagtgagccgagatcacaccactgcactccaggctgggcaacaagagcaaaactctacctcaaaaaaaaaaaaaaaaaaaaatctcccattgcctcttgatagcgcagtaaaacatacaatcgt

SEQ ID NO: 12824 - DNA, 1484 bp, Homo sapiens
gcacccagaacagggctgcgttttccttttgggctgagcatcttctgacccccctcccttgtatccggcaggtggttctacccaggcaataacccctacactgggacccccgactggttgtatgcaggggattactttgagcggaatttctccgactgcccagatatctactgagggcctggaggggcctggggcccgggaccggaggctgacgaggctggacttcctcgagtggccactgtgagcctcgtcacagcagaaaccaacttttctaacgactgagttcgcggagatagcatcatccctgatcaaggatgtaattctaattaactgttgattgccaaacatttcactctgctgtgccgtctcttcataaagcttcacttgggatcatcgtcttcattaaggtttcaacagggaaattcttcacggcgcccttttatgtggcagaaatcagctggggcttgtttagcttccagcacactctcagtcatagcatgtgtagctaaaggaagtaatgggaaggggttcatgttctctttataatgcagtggcaaaaggttctgaaagccttttaaactcgaaccagtgggggaaagatggatcttgaagctaatcctgcagagagttttatagaggccagggattgccttctaaattatgataaaacagaagtgaagagtttcagagcatcagattgagtgaaaagttgtcagattctgtattttttaacaatcttcaataatgtaaagattacttttaaaatatttaagttaaaactacttgaatagtattttgctgaagagcaagatatgcattaatcaccggttttatactgtccaaaatgaagcatccccgtgacaaaccagagtgggcagaagcatcgagagcgtgacaggaaatcccaagactgcttccgcctcagaggcgtcccggctgcgattcgctgccctgttgtcagtgaggcctggctgtcaccgcacaccgcgtccgtgtctccagggggttcctttcttctcacacgtcgcgtgtacccatagcactcttgtgtttctgtttttcccagtatgcatgtttaaaatagaagtgacaagaatcacatccggttgtgtcctgtgggagggtcagaggcagaatctacttacagtggtgtaattaaagttatttaaccaaaaataggtatgtgtccatctcagcattcacctttatcaagtgactgatttttttttcttttctttccttttttttttttttttgagacggagtttcactcttgttgcccaggctggagtgcaatggcatgatctcggctcaccgcaacctccgcctcccgggttcaagcgattctcctgcctcagcctcccaagtagctgggattacaggcacgcgccaccacacctggctgattttgtatttttagtagacacgggttttcaccatgttggtcaggctggtctcaaactcccgacctcaagtagtctgcc

SEQ ID NO: 12825 - DNA, 1496 bp, Homo sapiens
tgacactgatctgtgcacatgtgtgtgcacacgcgtgtgctcgattgtgagcgcctgccgtggccctgggccgcggtgtgctgagcgggccagttcgctgccttccactggttgaaggaaggagacgggtgtgtaaagaaccgcaccccagagggcaggagggtgagagggcttggtctggcagcagctaagtgccttcggagctctaggctccccatttgtgaaatgggcggagggggacagggcacacccgggattgcggcggatggggacagggcgcagagcatcgtgctcaggaggcgccactgccgtcccctcacctgctgggccgggtcctgtctcctcagcattgtgtggccaggcacacgcgcctctgcgtctcaggtccctcacctggaagccaggtcagaggatggctgtggtggccctgggtgagctggcgccagctcctgcccttacatgcccttcctcttgcaggaacccaagacagaccaggatgaggagcattgccggaaagtcaacgagtatctgaacaaccccccgatgcctggggcgctgggggccagcggaagcagcggccacgaactctctgcgctaggcggtaactgtcacatgtgtcacgtgagctcagggtttcctgggaggccagagtctactgtggatgactcgccccctcagcacaggttgtttggaagtggaaatagaagattctaaaagttagagaccctgtgagctccctgggtcactccccactcccaccttcacggggtaggacgggtctgcatcccaccgtcgcctcacttcaagtggtgccccctgtagggttcaggggcagccgagtgcggtgctcagcagaggcgcaggcagtgcggtggggcccgcgtggatctggctggggcaggcccgcctgagctgcagtgttttccaggtgagggtggcctgcagagcctgctgggaaacatgagccacagccagctcatgcagctcatcggaccagccggccttggaggactgggtaacgtgcgccacccgggctctcgggcagcttctgctgggaatgctttgaggcccggtctctgtttcctttaaacttctgctggctctgtctgcgtagtgtcggggagcctgtgtgtccgcaagctggttcccctttgggaatgcgcttgtttgcctgtggctagagctgggtaggcgagggcttctgggcccctggtgaggaccccagctgggtacttcagaggagggtggctggccgagcggtggggctggaggactggagggagctggggttcctgcgccctgggtcccctggccctacatggctgcctgcctgctgccagctcatggagtgcagacccgtgtgcttggcccttcagaaatgcttgtccctttgggtgggatctggactgaatcttctaatctaagcacatgaattgtgtaatgggatggaacagaaatgaccttgcttccagaacacagccgcaagtgtccacccg

SEQ ID NO: 12826 - DNA, 1053 bp, Homo sapiens
cgccacccctcatctctccgtgcccactcgccacccctcatctctccgtgcccactcgccacccctcgcctctgccctcaggactctccagtttggccacatgtccgtcacagtggagagacagatgatccaggaaaccaagggtgacacggtggcccctggggcagaggggctgctcaacctgcggccagacgacttcgtcttctacgtcggggggtaccccagtaccttcacggtgagcccgcccggcctggggcagcctgggaggggctccgcagccccgagtcgcttgtgtcctggagagccgcgggttcttttggtatcttgcctcagtccgtcctgctgtagtctgaagtccccttggtccatcctggaggggaggcgcctcaggccaggtgccctgacccagccctgtgcccacagccccctcccctgcttcgcttccccggctaccggggctgcatcgagatggacacgctgaatgaggaggtggtcagcctctacaacttcgagaggaccttccagctggacacggctgtggacaggccttgtgcccggtgcgtgtggcctgccctccccgtctccacccaccccaccccaccctccgctgaccccagaatctccgacctgcagctccaagtcgaccggggacccgtggctcacggacggctcctacctggacggcaccggcttcgcccgcatcagcttcgacagtcagatcagcaccaccaagcgcttcgagcaggagctgcggctcgtgtcctacagcggggtgctcttcttcctgaagcagcaggtgcgccaggcacacccgtcctgccatccccacttgcactgaccctgccccacactaaccctgccctgtttctgcagagccagttcctgtgcttggccgtgcaagaaggcagcctcgtgctgttgtatgactttggggctggcctgaaaaaggccgtcccactgcagcccccaccgcccctgacctcggccagcaaggcggtagggccagggtggggaccagggtggcagggagaggagatggaacgatgggggcgg

SEQ ID NO: 12827 - DNA, 1171 bp, Homo sapiens
cagtggtcagcgtggctggaaccaaggggctggcaagaccttgggcggtgaggaccagggctcccaccctgagaggcttggagcagaggacgatgtgcctcacccagtttctgagggacccctgtggctgcggactgttcccagcaagcccaggagagatggtgggggccaggtggtgggaggtgacatggggcacatgtccagggaccagctgtggcctgagaggctgggtgcctgtcctggcatggagggggcgtctggtggaggcatttaggatgggtttggattgcactgagcagcggggtgtgagggtctcacacgatccatagggggttggatgtccctgttgctggcccaacagaaagacttggggacatgaagccaggatggtccccgctggcccctgctgagcctgccctctgcccaccacagacgagacaagcaagaagatcgcacatgccaaggctgtggctgctgaagcccaggacaccgccacccgtgtgcagtcccagctgcaggccatgcaggagaatgtggagcggtggcagggccagtacgagggcctgcggggccaggacctgggccaggcagtgcttgacgcaggccactcaggtgcgcccatggccctcgcggtgcccctgatggaggcgggcacggtggggggcaaaggtctcaggtctccctctctgcagtgtccaccctggagaagacgctgccccagctgctggccaagctgagcatcctggagaaccgtggggtgcacaacgccagcctggccctgtccgccagcattggccgcgtgcgagagctcattgcccaggcccggggggctgccagtaaggtgggtgagagtcccaggggaaggtggacatcagggagggtggtggtggacgctgatggaccgtgccccgcaggtcaaggtgcccatgaagttcaacgggcgctcaggggtgcagctgcgcaccccacgggatcttgccgaccttgctgcctacactgccctcaagttctacctgcagggcccagagcctgagcctgggcagggtaccgaggatcgctttgtgatgtacatgggcagccgccaggtaccaggctggctgggtggatgcggcccgagctcaggctctgtttggaaatgagcggtgcctggtccctggtccccggtccccat

SEQ ID NO: 12828 - DNA, 1246 bp, Homo sapiens
gcctccccaggaaatgtgccggttagatgttcgcgctcacagatatcccgtagtgcacactgagacatgggactcaggagagatttggctccctgagcctgcctaacaggacctgccagcccagcctgggggtcggcagggggtgccatgtcagagagagctggccagggagcagggtgggccaggcggagaggggcaggacgagaaggctcagaagctggctgagcagactggtgtcagggtgttggaggcactgcaggaggtgagggccgggcaggtgaggcagctgtggcctttcgccaggtgctctaggggccacccaggtgcgctcaggttccgggcccctggcctgccaaggatggcagggctggggtcttgggcttggaagccagcaggcagaggtgcactagtacgggcggccccaggctctgacgaacccctgccccacagagctcatgtcccagacgggccacctggggctggccaatgcctcggctccatcaggtgagcagctgctccggacactggccgaggtggagcggctgctctgggagatgcgggcccgggacctgggggccccgcaggcagcagctgaggctgagttggctgcagcacagagatgtgagtggtgttgtccctggcaggcggggtggggagaggcagggacctgggagctccaagggggaggtcagcatggagtggcatcaggtgggcatcacggggcagatggatctggcgggcaccaagtggagaccaggggtcatgaaggggcctggcttccagagtgaccaccctcaccctggtctcggctagtgctggcccgggtgcaggagcagctgagcagcctctgggaggagaaccaggcactggccacacaaacccgcgaccggctggcccagcacgaggccggcctcatggacctgcgagaggctttgaaccgggcagtggacgccacacgggaggcccaggagctcaacagccgcaaccaggagcgcctggaggaagccctggtgaggaccccggacttgttcttcctcctgctcctcttcccgcctcctccctgcaatccctctcctctccggctcctcccctcccctcccctcgtcctcccctccctccgtcctcccctccctcgtcctccccccctcctcctcttcttccccccctcctcctcttcctcccctcccctcgtactcccctccccctcctcctcttcctcctccccctctccccttctcctctctcc

SEQ ID NO: 12829 - DNA, 1204 bp, Homo sapiens
gagggctgggcccagatctggcctctccctccggcctcatcagctgaaagtgtccttacgggcctttcggggcagctggggcttcctagaagcttttgggagagtcatccccattggcaggtgggtaccaggaacccggggtcaggcacctggcacctgccgaccactctcactgtcctctcatccctaggagaacgtgcagggccccaaatgtgaccagtgcagccttgggaccttctcactggatgctgccaaccccaaaggttgcacccgctgcttctgctttggggccacggagcgctgccggagctcgtcctacacccgccaggaggtgcgcctgcaggactgagggcattgccttctcggggaggtcttaggtgggactggatgcaagatggggccctgtgatgtgtgggcatccacccgtgtgcagccacacgtgtgtgcccacagttcgtggatatggagggatgggtgctgctgagcactgaccggcaggtggtgccccacgagcggcagccagggacggagatgctccgtgcagacctgcggcacgtgcctgaggctgtgcccgaggctttccccgagctgtactggcaggccccaccctcctacctgggggaccgggtaagcagggcatcaggtctgggggaggcactttgaggatggccaggacgcctgagagggttgggagccaggagcggggtctgtccagggagggggagctccatgggggtccgtgagggtgcccaggccctgtcccggtagggaatgagcgcaagtatccaggcccagcacagggctctgtgctgggggtgcccagaccactgctgacgggctctgagcctgtggccagagtctggccaggtcacctctgtctgtcctgcctccaggtgtcatcctacggtgggaccctccgttatgaactgcactcagagacccagcggggagatgtctttgtccccatggagagcaggccggatgtggtgctgcaggtgagggagctgagatgatgtggcagggtggttgggtgggcgtggcgcagtggcaccgtggtccaggcccgtgccaaccctcacctccccatgtgccttcccagggcaaccagatgagcatcacattcctggagccggcataccccacgcctggccacgttcaccgtgggcagctgcagctggtggaggtgaggggagctggcttgggc

SEQ ID NO: 12830 - DNA, 1151 bp, Homo sapiens
cagggctgggctgggctgggctgggctgctgctgccaggactctgagctgcctgcaggaccctggtcccagccagcctctgggggcctccccgctgcaggctctgggcccgcgggagagtgaccaggcctcaccccctaggattatgtactcgtggtccctgagaacgtctacagctttggctacctccgggaggagcccctggataaatcctatgacttcatcagccactgcgcagcccagggctaccacatcaggtgggcagggctctggcaggtcaggggtccggggtgggggtctgggccgggagctggcctcaccacgtgcccctccatgtagccccagcagctcatccctgttctgccgaaacgctgctgcttccctctccctcttctataacaacggagcccgtccatgtggctgccacgaagtaggtgctacaggccccacgtgtgagcccttcgggggccagtgtccctgccatgcccatgtcattggccgtgactgctcccgctgtgccaccggatactggggcttccccaactgcaggcgtgagtaccccagtccttgggcgcccagtggcagggagttggtgccagagcccaaggtggacgggtcgaccagaaagcagggtcaggagaatgttctagagcctggcagggcagcattgctgccccatctgcgggcctgggcccaggactccagcttgcgggccatgcagaaggtttcagggaccagcaggtggtccacagtctctgacgatgatgttgattctgagcagctgcctccatgtcaggagctgtccaaggctcagcacccggggcaggggtccctgttcttgtctcccccgcccccgtcacactgccacatcccctagggctgcattctgggcctctgagaggggcgggactgggaagaggggtcagtaaaccctgtacccgccccacagcctgtgactgcggtgcccgcctctgtgacgagctcacgggccagtgcatctgcccgccacgcaccatcccgcccgactgcctgctgtgccagccccagacctttggctgccaccccctggtcggctgtgaggagtgtaactgctcagggcccggcatccaggagctcacagaccctacctgtgacacagacagcggccagtgc

SEQ ID NO: 12831 - DNA, 1173 bp, Homo sapiens
gtgcctgccccaaaatagccgatttttaaaaataactcaggcagcttttgtttggcttttgctttaaaagacttttttttttctttctgcacagaaccatgtagcagcggaaaggtcagcactggcagctgagctgagcggggcgtggagggggaagggcggtcccgaagccaggggtctgcgctcgctccgggtcatggcgagggcggccggtgtggccctgggagccgcgaccaggtcagagacagatgggagtcctccagcgcgggcttcccttcctgtgaccatctgtgcagccaccaggccctcgaggacagctgtccagggcccctgtctgacagacagatggttgggatgggggacagacaggaggccaggatcttcctgtgcatcccaggggtggggagggcgaagtgtctgtgtccccctcatcctgctgatcagtgtcttcaagtcaatatttgtgcaagtgctctcagctgggaaaaatgtgactggcctgctgaaggggagggaggaggacagatcgggccgaggagagcgcagcctccatccaggcactcagggaacagcgggggcggctcccagggggctcagtcgggacctttagtctccttcggagcctttggtgggaggggctgtgttgccagctccccgagaacagcctgtgtccctgcccctgtccacctctagcgggtccttccctgtccaggcacaggggccactggcccccacctggggctctctggaatgcttgtggtcaggcccacagggggctgctgaggcccgggtgtggggctgggtatagggtctgtccctgaagaggctcatacccctccctgctgggcagggcatgtctccctgccccccacccacagggaggtagacgatgacctcagagcctggcagccggtgaataggcctgtgccccgccccaaccccggaaggctgcgcttggctcccacagtccccgcaacgccaagccctccgagaagggtgggatttggacctgggatgtctggagtcctggaaccttgccccctacctggagtctgggcagctggtgcccccaagggctgaagctatgaggggtctgtggtcttttcatgggggaccccacagcagtctcagtccggctcagtccagtggggtgactgtaggtcttgtgcagct

SEQ ID NO: 12832 - DNA, 1365 bp, Homo sapiens
cacaatggggggcacgcccgtatctctagcccggccggcagcgggcagcgaggctcagtcctcgccccttctcccagctgctattcggggctcccgaggcgctcagaggggtcgactgcgtccgtggggcacaacccaggggccaggctaagacgccacacacggcaacgaccctcaacgacaacgacccccacgacgccccgcgccccagggccagcaggctggggtccgagaacctccttgccggaagcggaagtgcgtcacggcgacggccggcaagcacgcaccgcgcagactcgctgtggtggcgtgacccggaagcgctcgccgaggcccctccttgcccgccgatatctctgccgggtgactagctgcttcctttctctctcgcgcgcggtgtggtggcagcaggtgtggcgcgcggcgcgggcttcgggctcagggctggggctggggcgggagtgggggcttggacgcgggggacggggtgcggggtgctgggtgcggctggggccgtgaccctaggggccggtttgcgccgggagccggggcacggttccggccgtactcacggcgccgcgcggtgactccccaggcgcagcccagcctcgaaatgcagaacgacgccggcgagttcgtggacctgtacgtgccgcggaaatggtaagcgccccccacatgcctctcttccgtccttacctaaccaccacgtcccctcgcctgcccttgttcccccacacccctcccgtccttacctcgtcacgtccctaacttgtcctgcccccgacgttactcttttccattcatatacccccaacctccctcgtcccctctttcattcttaccgcccaagtcccctctgctcactgcgccctttctccacagctccgctagcaatcgcatcatcggtgccaaggaccacgcatccatccagatgaacgtggccgaggtgagctgggagcccgggaggcgggaaggttgtgatatatgtgcgggaaaggcaggctgtcccattgtggaggagcccctggggtgaaggtacaggcagaggctggctttgaggattggtgtttcccaaacctgggggagtggtttgtgacccttcttctctttctaggttgacaaggtcacaggcaggtttaatggccagtttaaaacttatgctatctgcggggccattcgtaggatggtgagtgtttccctgggctttgctcatcacttcgggacatcgtggactttaccgtgcgcattggagtgtgtgatggtgcctgagtagatctgctggcagagtagtttgagccagctggactgggctggccgcctgccgcttcttgagggtggaagaggggtgctctgagaagacac

SEQ ID NO: 12833 - DNA, 1218 bp, Homo sapiens
ccccccaaacctgtcccctctccacctgtcccctcacctgtgccctcctcacttgtcagcccagaagctagatgccagctaatcgcaattttttactgttggtggccactcaggcttcgacaaatgtccttgtcacagcctgcagggactcggcagaggcccctgggggaggagggggtgtggctgccctggaggggggtcagtggaggagtcattggcttcccactggggcaggggccgctgaccttggagcactctgggctctcctcctccccccgccccgccccgcccccccgctcccccttccccttccccttccccttccccttcccctctgaggcatccccgctgtgggctctggacagaggtccctcctagggctctatcagcgcaacagctaagcactcaggtgtggtgttgagtgctgccatgcaggcaggaattgatccctctatgcctcagtttccccacctgtaaagtggacccggctgatccaccaccctctcccaccacggccccctgcctgagtccctggctgaatccctccctctccccagggtacctggtggtgccagcgggtggtggcggcaccttcctgggcggcttctttgtgaacaagctcaggctccggggctccgcggtcatcaagttctgcctgttctgcaccgttgtcagcctgctgggcatcctcgtcttctcactgcactgccccagtgtgcccatggcgggcgtcacagccagctacggcgggaggtgagggccagatggcacctgggtacgcgtcggggccccaagcacccgcggtccctgggcatggaggaggagtggtgcagcacttgggagaggtggttttgaaaagggctacgtcacaggacagcggcaagggcaacacccgctcagcagggcacccggcagcatccacgtgaaaaggcaccatgccagcccccagcagtgcctgcgcttgggtcccggctgtgcccccgggcagtcatatgcctctctgggcctcagcactctgctctgtagctgtgtcaaatggaacaacagccctagtgttcggggtccttgaggctggtctctcggtgacataaaaagtgtcccaggatgtgctcctggagttgccatgtgctgggagtgggagggacacctgctggtcaggtggcaattagggaatatccaaaatacacgtaggtagcctgcacctcggccctgccctgc

SEQ ID NO: 12834 - DNA, 1243 bp, Homo sapiens
cctgtggacacgtggcccctccgggggttatcctccaagggacattcttctgatggggacatcctctggggggatttctcttgggggacagaaatattcctggaagaggggattctctgcggggcaggcatcctccggggagagaatcctgctgggaggacatcgtcgggaagacatccttcctaggtacccggctcatcttccggggagaccgtcctctggggggcgggcaggctttggggacattttcgggagggaggatctcctagggcgggcatccttgcgagacggggtggggcgaatcctcccgggtgggcatcgtggggtgggggtgggcgttccgcgaggggcatcctcccgggcggacgttgggggattctcgggggagggaggggcgcggggcgggcgtcccggggagggaggggcgttgcgcgcggacgcgggcggggcctgggccgctccgtcccctccccccgcccgccccccgcgcttcctctgctttcggtttcgcttccgcctccagcgcgagccccgccgccgccgagcatggacgaccccgactgcgactccacctgggaggaggacgaggaggatgcggaggacgcggaggacgaggactgcgaggacggcgaggccgccggcgcgagggacgcggacgcaggggacgaggacgaggagtcggaggagccgcgggcggcgcggcccagctcgttccaggtgcggccccgcggcgcggaagaggcctggggtccccggcgccccccgcccggctgcgtggacgggagacccccccatcccgggcggagacacctggagcctcctggagctcccgcagccccggggacccccccccagaccggccgacccccagccccagggcccggcggggaagtgcgggggccgcgcgtgggtgacagcggagctgagcctcccgggccccatcgtgtgtgggcgccgttccccccgggggtgcctcgggcgcgtcccgcccccagccgccgtggccgcccctgatggaacccctcccgcctcgggcccgcgcctcggcctcctggcggcccctgcgcaggccccgcggcctggggctggggctggggctggggctggggctggggcccgggccgggtctggcctgggaggcttcgcgtctgcacctgcgggagcccggggcgggccgacggggcctccgcttgttacttttgttaccgccgggcgcctgtcatcgccggggttacttttgttg

SEQ ID NO: 12835 - DNA, 1328 bp, Homo sapiens
gagattgtcctgcctcagcctcccaagtagctggggtcacaagatgcttgccaccacgcccagctaatttttgtatttttagtagagatggggtttcaccatgttaatcaggctggtcctgaactcctgacgtcaggtgatccacccacctcggcctcccaaagtgctgggattataggcgtgagccgccacgcccggcctgaaacgttttaatatatacactctaccttctctcacacgctgggtttacaggtttattagctagggcccattagcggttgaaacgttcatgtcatgtatattttaccacaataaaatcaatacagtgtggccagacattctgagtattggaaaaacaaaagtacatgtacagtgtaactgctatttgaaaaaaaaaaagttaaaatctgtttattatataaatccccttgtgaggtaagacacaagtttgtgaatgacaccttaaaacagcgtattctaaagtcatttacttagctcttaatttgaaccttttgcactttggaagacagcagttttcatgtcagttaattcagtatgttaaccgtcacttcttcactgcaggaatttgagagcgtattttgcggtaaaactggccgaaggctaaagctgaccagaccggactccttggtgacctgtcctgcacaggggagtttacagagcagcccctcgatggagatcaagtgatcggactgaacaggaatcctcggggggtgaacagccattccttcgtgacctgtgcacgccttctgcaaccctggagctctgctcggctagtctgactcgaaaagggcgtgactcaagctgacgggactccagtagggactttgagagcacattttgtaaaaatatttatctagacgcaaatgcttatccatgaatgtcctcttagaccatttggggatgaagccatcttaataattagtaataattaattagtaataattagtaagcattttctcaatgctctgattccatcatgttttcttaacatgataacttaaaaaattgacatcctttgtactttctttaatcttaaaaagtacacggctttttacttatttaccttttaaatatgcccctttagcaattggaacaagttaaattgttaactaaaaacagtttggaaattttatttcattcgttatatcacacccccttgtcatgactctgagtcacgtgctgctgtattgcaacgtgcaggaccattttaaacctgtgtgctaaaaattttccagatacttgctttaaagctacttttgtccacaaatgaaatactgtcacagtagacgcttaaatgccacgttttc

SEQ ID NO: 12836 - DNA, 1812 bp, Homo sapiens
gccgggagcggagcaggaaccgagagcgcgagcgagaccggaggcgcgaccgggaccggtcccggagcagagagcgggaccgagacaaggccagggacagggagcggggccgcgaccgcaaggaccggagcaagagcaaagagagcgctcgggacccgaagcccgaggcctcgagggcctccgacgctggcaccgcctcgcaggcctagacgccccggccgggcagagaccctttttaaagccacgttcgtaagatgcgttgaacaaatagcttttgaaatagccacgatcttagattcaggatagaatattctggacttaaacattactgtaattttgtgtaaatggtttcttacaagatttcacatctttacaattctgatgcttttttaaaaaaactaaactttaatatttccatttaaaattaaaagaaatgggaaattgcctacggagcatattgcttttcagatcatagttatcttttccaataactttattgtaaattttaagggagtttcgttggaccctagagccataccttcactgacatctcatccgtttgtgtttccaaaagctgcttttacaggtcttagccgccgccccggaggccggtgtgggcgtgacctgcaggcgtccaccctgcggctacgggagaagtcttagtagcttgtatctggagtcttgagaaacacaaaccttacaaatgcatctttcttttgtcataaaattggaattacaattttcaactgggaaacagaaacacatttcttagcgtgctcagattttatatatcaccttatcaattttttccaaaacatgatttaaagcaacatctgtcctagtataattgttgcattttaaataacaatttattgaaaaatgttaagttttaccagcctaaaaaaagtaacaaaccaattaagtgtactttgggggcagggaggagtccttgatttgaataatcaggagttttgttggtccagtttcgccttctgagcagttcttctgtatcccgggaaaagtacgctcggccccaaactggtatttgtcagacgatacatgtaaaagtttgtccttgaacgtggaacaagacttgtgtaaagtctgagacgggaactagtgatcactagctcaagaactgcaaatgagacaggaagctgttcactgtgaaacagtctcttgcttgtcgtgtatttttcgagtacttctgaagtgtgaagtaaaaaaatctggctaatttatttgtacaaatacactttgataattttttatattttcataaacttttacagatgtaaaattaaagaacttcacttgttctttggagtctgttattccattgtacgtcactacagatttttcactttatagcacagattttttaagttaagaaaacattgagaatgtatcagtttgagatgtttggtgttgaaagccaagtgtccataggttaaattacattaaagtaggtgtcacgttccaacatctagtacgatgagaaggttttgtttgtttaacatataaagcaaatttttctaatttaaatacacaaatgtaaaaatcaagtgtgtttctttagtttacttgatagagattcctgtacattgtattttatattgcggaggcttatatcactgtacatgagaacatggaacgacctaggttttgttactcgcagtagaataaacagctacaggaagtttctgtctcgggtcttcatcagcctttttctaacgcggagaagtttggggtcgtgcacggacgccctggccacccagtttcttgttgctggtttgcctgggcgtgggcagg

SEQ ID NO: 12837 - DNA, 1199 bp, Homo sapiens
caaccgcacgtaagcttaaacacgcagaagggccagaatgatttcctgccctgcctttagagtattgctttcggctttgtgtgagaaacaccagtgtgccggctgggtttctcacagagcctttcctcgccttcttcaggccaggttccctccgcagaagatgagccagctccgaaaaaacaaaaattgtcagcttctgttaagaaagaagacttaaaatcaaagcatgacagctctgcacctgacccagctccggattcagctgatgaggtgatgccggaggctgtgcctgaagttgcctctgagccaggcctagaaagtgcttctcatccaaatgtggacagaacgtatttccctgggcctccaggagatggccatcccgagccctccccgctggaagacctgtccccctgcccagcctcctgtgggagcggggtggtcaccaccgtcacagtgtccggccgggaccccaggaccgctccaagcagttcatgcacagccgtggcctccgcagcatcccgcccagacagcacccacatggtggaagccagacaggatgtgccgaagcctgtcttgacttctgtgatggtgcccaagtccatactagctaagccatcctcatctcctgacccaagatacctgtcagttcctccgtcaccaaatatcaggtgcgtacttcaggtgtggtctgaacaagccaaactttttttttagattaacgaaaggaaagataactggtgattaaatagttgaacttggaaatgtaacctgaaatacagcttcactctttcatcttttaaaaagccccagttgtagggtgccttattgtccttttggaagtagagatcttagaaattgacatttaaatttgtgctcatccagttttgttgcctattcactttatttttctttaaccaaaatgtctgtatcattttaattaaagtaagtaattggcaaaagtaagctaccaaaaacgtaaaacttgcaagcgttcacttttgcttttacatataaagtctttgtactcttgaagccgggcacagtggctcacacctgtcatcccagcatgtgcttgagcccaggagtttgaaaccagcctgagcaacatggcaaaactccatctctacaaaaaagacaaaaattagctaggtgtggtaatgcacgcgtgtagtcccagctacttgaaaggctgaggtggg

SEQ ID NO: 12838 - DNA, 1233 bp, Homo sapiens
cgtccttactcacatccttaccctgctatactgtccaatatttcctatttgtccctactgtctggcttgtgaagccttgtcctgagcagttaaatgatgaaattgtacatttgatttgttagctgtatttttgtctaaacgttagttgtttaactatattaaaattatctttacaaatcatcttgaatcatctcacatagcacacattaggaaacactggtcagaaggacttgctttatgtagagctccactgtttgtagggaggtggcccctgctgcgcgtgtttggcggcaatgtcaccttttgttctgtggtcagttggtcactatgtgcttacactttaccgctaggtatggacgacaaaggcgacccgagcaatgaggaggcacctaaggccatcaaacccaccagcaaagagttcaggaaaacatggggttttcgaaggaccactatcgccaagcgagagggcgcaggggacgcggaggctgacccactggagccgccacccccacagcagcagctgggcctgtccctgcggcgcagtgggaggcagcccaagcgcactgagcgcgtggagcagttcctgaccattgcgcggcgccgcggcaggaggagcatgcctgtctccctggaggattctggtgagcccacgtcctgccccgccacagacgccgagacagcctccgagggcagcgtggaaagcgcttctgagaccagaagcggcccccagtctgcttccacagctgtgaaggaacgaccagcctcttctgaaaaggtgaaaggaggggatgaccacgatgacacctccgatagtgacagcgatggcctgaccttgaaagagcttcagaatcgccttcgcaggaagcgggaacaggagcccactgagaggcccctgaaagggatccagagtcgcctgcggaagaagcgccgggaggagggtcccgccgagactgtgggctccgaggccagtgacactgtggagggcgtcctgcccagtaagcaggagcccgagaacgatcagggggttgtgtcccaggctgggaaagatgacagagagagtaagttggagggaaaggcggctcaggacatcaaagatgaggagcctggagacttgggccgaccgaagcctgaatgtgagggttacgaccccaacgccctgtattgcatttgccgccagcctcacaacaacaggtgggtcatgtgtgggcacccacagaaatcccagggttgcaa

SEQ ID NO: 12839 - DNA, 1100 bp, Homo sapiens
ctttgtaggcagtggaaaacttgcaaggaaagctgccgtctctttggcagtctgatgcagagcctgcactctggcactcgctgaagaatctggaaggttgcggtttgctcttccagtgttcgggggcctctggctgctgaaggattcggtctaccacggagggctgtgctgttaggctgcatcccactcaaaatacaggaaaagcacgaatcatgattctgctttctgttagcttaggcagacattgggccttcacctacaagtttttccttacccctgtggtttttgtgtttttttttttttctttttccataggaaagaatatataaatttgtaaatcctaattcaaagatggctcatgtgtgagggcattgagtttgatttgttttccctttggtctgggttgtgtggcttttgggggatgcgtgtgagggggctatgtgttttttaattttttaaatatatattttggtgctgtgtgtggtaagagacttgttcctagtggatcaatgaaccatctcttctgggcagttttgttgaaaataaaggtttctctttgatttcaagaatgaccaaaatggcctctaaaagatgttaatcatctcaaatgaccttttgtctttggggcgttcttccccctgtgatagcggcagtggctttttctggtacctgcagctggaaaggccacttggccctgtgctgagtgagcggccttcattagagcgaggcagcccttggccggtggggacgcagagccccagcaggtggtgcacgactgttggcggaaggaacgcgtgttcatcctcagtgatctgccctccagcatctcggcagcatctcatcctccatcgtcagctggctctgccgatgtcctgcttctgttcactcacagaactgtcccctgctccgtggtgggcaggagggaagtggtgcagggctgcgtgcattgcctgcgagtcgggacagttgatgggcacatggccttgtagctctgggcacagatgtgtttggattcattgcagcggaccaccgggcactgttgaccccactgagcagtgctaagtgttggtttagtggatgttcgtggaattgctgaccca

SEQ ID NO: 12840 - DNA, 1778 bp, Homo sapiens
tgctggggaggtggtgcttccctaccccctagaaatgctgccttccaactaccactctcccagatgtgacccttgcgattatttcctctgaggtttgaggatgaagataagttggagggaaagagagtaactaataggggatgaaatatagcagaagctagaagaaagcggtgaggtgagagagatgcatctgcacgttttcttcaacagcaccaggtgattcagcatattcctaattacctttcactattcgtgtatataagatcgtttacttgcataatatatcatcaatttgacatattcttaaaactagagggtgtgagaagcacagcaataggaagtctctccacaaactaggggaacacaaatggggtcattcacgtgcctggactgtcactatgtggctgtcacgtgaagtgctggtgttgatttccatttcagccagtgggtagctgataagccagtgccagcatccagcatgagcagatgtcggggagactgggaagtctccagcgttactgctctccttcccttcatgataagccagtgccagcatccagcgtgagcagacgtcggggagactgggaagtctccgatgttactgcctgccttcctttcgtgtgaggggctgcacttgcttttcttgtgatctgttagtggacgaggtcttccaaggaagtgctttgcacactttctttgctcctttttacagtctttgtctttgcagcaagcaaatgaaattaagccactttgggataatgaacattcagtataattctactttgtctcattttggatctcactgttgtctttataaaaatggcacattttacaaagtagtttattcttattatactttctgctggagagtgccttgaaataaaatgtgagagtattctggtactctgtgttccagatgcatgaaattgggtgaggaataacccctagtctggaatctttgtgaagcatagggttattgcaaggcaaatgggaactaacacatcttgccatttgaatcagggtctccagtttctagaaaaggcagacactggttgggaccaaagtctccatggcacatgactgaagactggtggtcgtgtgtgtgcggagtccacggaagcctcggggaggtggagctgctccttccattccgtcaggacgtgatctgaaaacatgtagagaagatgagttgaggacagcttttctaaggcaatgtgatgtctttgctttcttatttctctttctctgcgttgttagttttgaagagtggaggagctaggggctccagaaagaatcttacacatgtgttgaagacattgatgtcatagggagcggggagctgcattcccttctgggctgttactgctaaatctcagtatgaacagaccaggcggaaagcttggtggccaagcagtctgtgtgcttccccgctgatggagaacgttgcgttgttcacaatagggcctcatgggtgtagccgcatggcagacccatggctggcgcagctgcctgttgccgtctgtcttcagtaactgctgctctgttaactgttctattctgatactacgcgtgttgttttttacaacaggtatgtttttgtttcagaaatatgtattgcttttctcatattttttgcaaattgtattgtcaacatgggtcatttaaagtcctgtatgaaccataacctgctgtggtacctttgtacatgtttgattctgtattctttattccagtgtggcatatgtgcccctctgtatcttttgagaagtgcggaatag

SEQ ID NO: 12841 - DNA, 1270 bp, Homo sapiens
agccagcacccactggcctctgcttctggaaggctgcgtgcctccctcttgttgggcctggcccacctaacttcttgtttatttcaagtgctgctatagggagacgatgctagagattttcctaaagcaaatccacacctcactacgtatggcgcccgttgctcagcctctgcatccacaccccccacagacgccccaggagaccccgcacagcttcttgtaaaccaagacaagccagccctgggcctggggctcctccctgcaccccacttagccctgcaaccttccagcccaactacaattctcaagatgaggagtccatgaaaaggagactgacagatgacactttcctctgccatgactgacaggcagcagcaagagggaagaccgcggtactggacatcacgtgcgggaactgcctcaaaggtgggggcacctttcgggctgagctaacccagtcaacagcagactggaaaaagacaaagaactgtgtgagatggtgctcaaaaccagaaagatgaactctgcaatgacgacaaatggattcggtgtgatgtgggcgtgatacagagaaacattcttgaaggttctggagcagttcatttttctcagagctggtaaactcattgttcgaatcttacaagcactagtgttcaacatttctaaaactgggagggcccagtgaggactggatgggcacacaaatctataaacgagcacagacgaaccctgggctgctgtgaccgccagcacctcttcccgttcttccatgaccctccatggcagagaattcttggtgacgggtcagcctgcttcactttcaaagccagctgggaaaattaccaaagctgtcagtcacacaccgtgatccacaagagggagaaaaccttgtttgtgtgaggaacgcctacagatgtgtctccaggaagcagaagtcacagccaggcggagaccttgcctgacacgggcagctcaaggcaacagcagctccaccgcttctccctggttcccaagctcatcaattccacctcaaatacacagagacccaaggacaggaggcgctgctgcacccagcactcttcatctccgaagtgagcctgcggggtgaccaactgccttgcatggacggacagctggcggaagagcctgcaacgtgacctgcatttacaaacatgaggaaacccactcaccttcagttgttactcctttcatgaattcttttggttatagctgtgcctatggctttacgggcttcacctgataaatggtc

SEQ ID NO: 12842 - DNA, 1132 bp, Homo sapiens
gtctaggcgcagacttgcagagagtgccgagaaggccgtatacctgcccctctgtccacagcacaccgtcatccactcactcatctggggcaggttcttgggagcacacacccggggtgcagccagctccccgcaggggcagacaggaccttttgggaagggtggggtgagactctccagtgtccgactcctctgccacccatctcctggtcaccctctcccctgttctctttgaggggaacaagcagggcccggcccaggcaccttttgtggggatgagtcgttgctgtgacctgcccgagtgctggccactcagttgctcccaggagccactgtgcctcatttctggctgcctgtgttctcccaggggtcagcagataggtgcgattaggtgtttgaatgcttgccaagttgccctccatcaaagctgtccccattcacagtccatgtcccccagccctgagggaggtctctgagtgatgaactcgaagcagcagggccgtggggcctccccagggcctgaccatctcctgtcccacaggcccgagtgccaggcatggacggggacgctgctgctgggcacatgccttctgtactgcgcccgctccagcatgcccatctgcaccgtctccatgagccaggacttcggctggaacaagaaggaggccggcatcgtgctcagcagcttcttctggggctactgcctgacacaggttgtgggcggccacctcggggatcggtaactgcccatcttccccatctcctggctggtgggggccgccccactggggcctccaggggcgagtgggctggctgtgctgctgcacgcagaggatgcgactcctggggaaggagcttggtggacacagaggatgcgactcctggggaaggagcttcgtggacacagaggatgcgactcctggggaaggagcttggtggataaatctgggcagaagacccccccagaggaagatgggagctgggaggggagaggccaggcttggcaaggccccagggccctgcaggcagaggaggcaggccgctcccctggagtacctggtctcctcacgaggcagctctggggtcatgagcaggccctgtagaggcagacaggccaggcccagctctgagc

SEQ ID NO: 12843 - DNA, 2209 bp, Homo sapiens
ctccttgagagcctggtgcgtgccagctcctccctctgagtgcagagaatttcacattgctaagtgtctttccatgtggaatgatagtggcacatgagggaaagacagctgtgggaagtgaggcttcccagcagacaggtggcccatgtgaccgttgtggttgatgcttttctcctggtagagggggtggggagaatgccatgcccagtgtggccagtcccccacagagcaggccccagtgcagctcagagttgtgtgctggtgtggcttgggtaccattcagggtcccgcctccagatttgcaggtgctgctaaggggcagcctcggatctcacttttgggagggattcattggtgtggttactctgcgttcaacttttgttttttctttttacaggaacggcagagtcgaaacaaacaatgagggcgaaccagtttcttacatgttctaacgtttgactttgaaaacagtttaaaacacgtgtgcttggtcagctccagtgtgtcgtcccgtgcgggggttgagtgttgcatctttgcctttcttgtcgttgatttttgcccagatggatctgcatttatttgtactttttctatgtattataatcctgtagaagtcactaataaaggagtattttttttgtcagcttatcaatcagactgatctaatgtgaaatgtaagtatccttaaaaacaaagcatctattttggcagaaattgtgttcttaaattcagtcatttgatattctgtgagacttcatatttctcatccctttattgctttttagcaaacataagaaaccatgagtcattttgtcatttagagtattctgataaaatctcttgaaaatactgaaatcaaaaggttaatgattttttgttcattctgatttgtcattttattatctgttatcggtctaaagtgctaatttacccatttgatttttctgctagacagataacttttaatttttcaaatttggcagacactttttttttttttttgaaaatctttccttccagatctgttgcccactgaacagccacccgtccctcactgtcctggtgtccgattgggctggatggtgttggggcatgatgtgtggaggaactggaaggtgctttaggtctggttcagggtcgggcattctttgttgtttgcacatctttttaaattttacaccttttcttaagaattctaatgccgtcttaagtttttataccaataatgctgagctttaagtgtaggatctggtagtacagacagtgtgatggatgatgctgctggttgtaaatttcatcgtgtgtgtctaattttttttcctgttgaatgggtaaaaacaaaacaaaactttttttagaagatgaatttgctgtcatgttttgtggaatgagggaccgttgagctcactaccacctggagtttgagttgaagcatgaaaatggtgcccatgcctgacgctccagcgcctggatctgcacgtgcccttgtagaggatccttaccgtcctagagagcagacgctttctgaaaactacttgctccaaaagaccctctgagttaacgtttcagctgtatcattagacttgtatttagagcgtgtcacttcctctgaactgttactgcctgaatggagtcctggacgacattgggtttttcctctaggagaatacaagccttaataaacaatactatttagcaaacttggtgtcacctcattcttcaccctacttgatgagtttatgtgttggagctttttaagctgcagagccattcggggagtcaccgtagaaagccctgtgtttctcaaggtgtgggattctcgttccctcgctttggaagagggagctgttaatttccttaagactataaactacatggcaccgtcacccacccctcatcacatgaatgtgcagacgcagcggtgcgtgcagcacctgggcaccgctaccccctttctggacttggctcctcaccgtctctctccattcatcctccaatgcctcttattatttatgcaataagagtttaatacctgtttagtttgttttccttttgaggtaaaatttataagcagtgaaatgcacattgtgtacatctgcagaagttgacaagtatgtgataaagttatgcaatattagcctcagcccagaaaatcctgagctcaggcaatccgcccgccttggcctcccaaagtactaggattaca

SEQ ID NO: 12844 - DNA, 1173 bp, Homo sapiens
ggaccagtgccaccttatggcaaagagctcccgcagtgtttgttagagtgcacatccctacgtgcccactggcacacacacgtgctcacatacatgtccgcatacaggcgtacacatgcacgcttgcacacatgcacacagaccacatagcacacatgtgcactgaccacacctgtatagaccatgcacagtacacatacgtgcatacacatgcctgcatacaggcatacacatgcacgcttacatgtacacgtgcacagatcacacacatgcacacacgtgtagctcacacacagtatacacatacacaagtgcacagaccacacacagcactaacacatgcacacacaaagtgcataggccacacagcacatgcacacaggtgcacagaccacacagcacacacaagtgcacagagcacactgcacacatgcacacacacacgcgtgcatgcacactcctcgcacttccagccttggagcccttctgtctctggtctttctctttgaccctgctgagtgtaagctgcctggggaggggctacaaggagtaattgtggctttaggggtcgtggtgatgctggaatgtcaagcgccgtcgtggggtatccgactgtccgggctcctggtccgcagtggcagagcgccaggcagagcccaatcagggtctcgtgctgcccttccctcccacagcctggcagccatccagaggaggggctctaccagatgccaaggtgccccggtgtctgtatgggtgtccggttgggtcctgtgtttggtctgccctggaggtgctgggccctcctgggatgggtggctcagcctcgaatcccaggccccagcccaggcaggtgctgctgcctgttgtggtttcctggcccagcttctccttctccctctgcataaaatcacagtccgtgagtcttccagctgccaccacggctgggacacgctgggggagggctcctcccatgcctcctgcacacagccgtctgagcagggcaggtgcccaacaccccccaccggaggacacgctgcccctcagcgatgcccctaccttttggggggcctcgtctcaagcccccccttggaggctgaaatcaccccaggcactgtgagggcttctccagggggcaccctttgagctgtgggtctgatcaccccaagtcccgcc

SEQ ID NO: 12845 - DNA, 1222 bp, Homo sapiens
ctttgcccctaggggtctgggaaggaggaagagctgctcctgggcctcctcttcccgctcctccagcttccagggagcagggatcccccctccctgtacctctccagggagcaacccaggtccccccacctcctgggaccagcccaagtcgaccgacttcctgggagtggtccaggtccccccatctcctaggaccagcctgggtcccccccatttcctgggactagcctgggtcccccatttcctgggactagcctgggtctctcctgtttcctggaaccagcctgggcccccccatttcctgggagcagcccgggtccccacatctcctgggactagcctgggtcccccgtttcctgggactagcctgggtctctcctgtttcctggaaccagcctgggcccccccatttcctgggagcagcctgggtccccacatctcctgggacgggccctcgcaccccagcccagcagccccttttgcaggtcttgtccatggagaagaagctggacttcctggtgaatatctacatgcagcggatgggcatccccccgacagagaccgaggcctactttggggccaaagagccggagccggcgccgccgtaccacagcccggaagacagccgggagcatgtcgacaggcacggctgcattgtcaagatcgtgcgctccagcagctccacgggccagaagaacttctcggcgcccccggccgcgccccctgtccagtgtccgccctccacctcctggcagccacagagccacccgcgccagggccacggcacctcccccgtgggggaccacggctccctggtgcgcatcccgccgccgcctgcccacgagcggtcgctgtccgcctacggcgggggcaaccgcgccagcatggagttcctgcggcaggaggacaccccgggctgcaggccccccgaggggaacctgcgggacagcgacacgtccatctccatcccgtccgtggaccacgaggagctggagcgttccttcagcggcttcagcatctcccagtccaaggagaacctggatgctctcaacagctgctacgcggccgtggcgccttgtgccaaagtcaggccctacattgcggagggagagtcagacaccgactccgacctctgtaccccgtgcgggcccccgccacgctcggccaccggcgagggtccctttggtgacgtgggctgggccgggcccaggaagtgaggcgg

SEQ ID NO: 12846 - DNA, 1180 bp, Homo sapiens
ctcagcagtttgggccgtacgaagccttcctggtaaagatgaggatgagcggcagccatggccgttggtgctgtcctgcgccctcatcactcttcttggctgtctctgtgcctttagaaggaggaaggttctcctggaagtgatttcccaccttcctctgcttcagaatgagtcacgcatgatgcaggtggactgggcccacctttgttagctgtgggtcactcccttggggctggggtagtgggacatcccagaaaggcccagccccacagactctgacgggcacctccaggacacccactggccagcgcttgcccccttcctggggacagtgccgtagcgtgggcctgggccggctgcttcttcagcagcagggtcctgcacgccgagctcgcgctaagagggaagtagagcccaccctgccctgtggagctgccagcgcctctgctaggcctgccccacgcaggtggatggcccaggtcagggtgggcgggccaggtgccttcggctctggggccgacctggacgctccatgccactgtctgtcacaggaagatcatggactccggggaactggacttctaccagcatgacaaggtctgctccaacacctgccgcagcacaaagattgacctctcaggagcccgtgtgtccctgagcagccccacgtcggccgagtacattcccctcacgcccgccgcagccgacggtaggtgcacagggctgctcgtcctgacccagccccaccctggccatggccacagagggtgacatgcccctgggtggcctccttggccccaggcgtttgctcacgccaggactgccggtctcctgcctgggaccctgagttgtctgggatcagcctcctcctgcctcacagaggagatctggcagaattgctgctttcattgacaaggaagattgaagcacttttctttttaagccattttggttgtaatataataactcacgtgtggggaagggtatagcgagtaacagagagtgcctgggcgcccacccggccccctccctcccacccccacggcccagccccaaatctggacccgcttccctcctgacctggcggtttacggaactgcgcgcctgtgctcccgccttccgtgctgggtgccttgctgcaggtattcctgccacttgggtttttgggtgacgctttaga

SEQ ID NO: 12847 - DNA, 1162 bp, Homo sapiens
aaaaacccaaaaacccaaaaaaacccagggcgtttccctcctctctttctgtcttgaatgggtttcccttcccgttccacagaccagcgaggacttcttggagtgctttctgcacctgaaactcagttcagggattggggctggctttgagttcaggccaggagagacggaagaactggcaagccgggagcctgcgtccagggaagttgcttggaattccaggcccctcctgtcctcctgctctgagccccacgtggagggagtggctctgtgctttctacccaagggtttcggcttatccagtgggaaaaacgggtggagtgcgcttacaccgccctcggaaccagagcctggagtagcccttctgttgccgctcgtttttgtcaggaggtagcagtctgggactcaagggtgggtctttggagctgattagagatgcctttgtgagtgctatgttgtgtggatgtggagatgactccatccctgtgccctgccttgcttcctccaggacttgggaccctggaggactgacgctgctggcctgggcgtccccttccgctgagccatggcgactcccgacgtgagtgtgcacatggaggaggtggtggttgtgacaactccggacactgcagtggacggcagtggtgtggagggggtgaagaccgtgttggtgacgaccaacttggcccctcacgggtaagctcgggcctcggtgccattggggctgatgggggcttgggttgggctgtccttggcacagctggcattaacgtagtaagggacaagtgtcaggatttttctagttccagttcttctgagactggactcaaatgtgtgtgtaagtagagagcgaagaaaagcagaaatggcacggggaccagaagacccagctgcagctgcggggaggcctcccgtacctgcatggccacgtggctccacgtcctgaaaggccgtgatttctcatgtgagagggagtggtagggatgtcagagagctggcctttcataaatgaagtgaagagtcagtgattttcttgacagtcttcatgaaactgtgagtgttttcttcctcatctctgtaccagatgtccgattcaaatgttagttggcaaaaacgctaacatttgcccaaactgccagctttgttttgctgcccgtaggtg

SEQ ID NO: 12848 - DNA, 1158 bp, Homo sapiens
gccctggccttgctggggcccctcctgcctccacgcccacccagcgtcgacccttgacccacgaagtgcgtagcatgcagtatttaaagcagtgtagctacggtcttctgtttttttcccttttttaatagcatgtatggggttctgttccatgtctgtgttgtggacattccgcggcatgaccgcgtgaactgcacggtggagctgcctcagggctgtcggtcaggttggtccagtgaggggtgactgcagccggtcaggtgggcgaggagaaggggggctgcccctttcctacctgtgcttgaggggccggaggcaggtgctgcctggcagagctgtgttaccgtcttggcctcggggtctggtccacactctgtgctcccagccttgaggctgcagtaggactctgatctcacctgccagaagagaggcggggccgcgtcctcctggcgtcaccggcgtcactgtcattccttggtgtctgtgctgggcatggttggcttgggggtctgtggtttcctgggccttgtggcagggtttctcccgtgggagaatttggtgtggaaagcataggaggccccttccgaggttgacaccgtgtcctccgcggtgtttctcgcctggtcgtctcgtcgtgtggacgctgccgttctggttctcggaggtgtgtccttcgccgtgttggggttatttgtctgtgttcctgcacttttcccgggctctgagctggattgatggggccagtctcccccctcccatcttgaggtcgttctccacattccttccagcacacctgtcctttccatagccctttttggacctttagaaccacagatgataggaccagcccaatgagccacagtcagagagtagattgtgcatgtgtgagcacccagctactggggacgggggctctcccacgacccctcctcctgtgtttgccagagctcccatctgccccactcgcctttgccccgtcatcgatgattcaggcagagccagattcgttaggtccctggaggaaggactgactggaccagagggaccctctggctcaggagggttgggtccctgggaggccggcagccaggccacagaatccacacgtggaccattgtgggtccctgggaggccggcagccaggccacggaatccaca

SEQ ID NO: 12849 - DNA, 1214 bp, Homo sapiens
gcagaatgtccatggtggccgctgcagagttgcagaggtccctgtagagataaagctgaggaggaggctgtgtgtgatggctctggctcggaccaaccagatgagcctcctgaagcccccttccctgcctgcctgctgacccgtggccccagctcactcattgccctcagcagccacccgaggctgtgcagaagggtaggttcaggttgaccaggaagctgccaaaagggacatggatatgaggatacatctggacgtgcttaggaacagggtgctggttgagggcccccagctgacccctactgcagatccgcatgtggaccatgagccggctgccagcactaggtcctgggcagctttgtttgtcccacttttctttgtttcttctcactaaaatgatcacgaagacctttgacaagaggagagatatgcactgtgatattaaattagaaataatttatcaaaatcagacctctcctaaaagaataagaaattcattgtttggcccatcctgaaaggtgaggtggcgagacagtggggtgcctccgtgccgcttcgtgcagcagcaagttcagcctgagatgctggctgtactcagcctttgcaatttttgtagatgtagcttaggacgtgagttatttttccgcagactggccaagagccaggttctaagcttggacctaaggtagaaagctgcccatcgggggccctagctcagccccaccaggccctctgttgggcctgcacacagctctgtggctagaacactccaaggcccttcggtacccatcagagtgggccccttgccaggtggcttttcagttacagagtccagtggaccattttgtagaaccatgcagctccctgcggaaggtggggtagggtgggaaagaggagcaggtctggaggtttgtggaacccagtcccctgcagaatctgtaaaacctaataaatcatggttgtggccattctcacggtggtgattgtgattagacgacccccgggaagcccagacactcggggcctggagttcctccccctgcctgacctagaagcagaaccgttttcagcgctctgccctgttggctttaaggctttgtcttaatttaaggaaaaagatcctcccgggttttatttctctctttcttgagtggactgtttccctataattaaaagaggtggtgagtcctggggcagcttccgcgcctccctgt

SEQ ID NO: 12850 - DNA, 1184 bp, Homo sapiens
ctgtgagcaagtgtggccatgggcacagaatgtccctttggacgccgctgctgggggctgccaggggccctctggggtcgtgctttgaggcccgtccggttcacgagggggtccgggcagcactgactgcttccgacctgcaggaggcgtaggagcggccctgcgggccctttcacggcagctgctgctgtatagatttgtctccactcagtgacgtgggatttttttgtcttccttttggctttatttttaaactgctttagatattactgctcagtgtttgtgaactttcctagttctctatgttgttagtgcagccagcacccagtggggacctactagaaaaaggaactggcatgcacacgtgcccagcaggaaaagcttcgtcttcacgtcggctgctgccatccagaagaggccctggagcctcacgccgtcgaggctgctctcaggcgttctgttccgggcgaggcttgtgctgcaaggaagggcaccagcatgcaggctgccactggagggtccgggtgctgcgggcagagttcagcgcttgtccaccctcccttagctctgactcagtgcatcctactgtggggacatctcgtgaggggacacgaaatgactgatctcaccctttcccagtattcagagctgtgaacccctgtggcgcaggactggcctgtgtctgttattttggttgtaaatcattctcctgtggaattggcaaaagctacatttttactgtccttaccagcaacagtttgcgtcgtcacatgctgtgagtgtgggctgtggtgtgtccgtgtgtgtacatatgtgtatatgtatatatcacgcagcaggagtgtcattcatgctgctgtcccctggtgaagtgacaagtacaattaaaggtggctctgaaatggcctctggtttcttgggagtcgggcagggacctgcaggaggctttcccagcaggtgcacagaaggaagcgctgagcccactgtgtgcagagggtgtgtgcccagggcactgccacggcccccaccagcattggcctctgctctgcagggtggggtgcccatcctgggggctgtgtgtcatgctcacctgacccaggtgtgtgtcccggtgtgaaatcgaggaggggactggaagcccttccctgccttgaaacatgaaagctgattttctgagcagcaga

SEQ ID NO: 12851 - DNA, 2357 bp, Homo sapiens
gtcctaaaggctgtgtccagccctgctgcaggtgcttgcctggtcctgaaggctgacaggtcttcagctctcaggctatgcctggctcaggtgctcagcatccagtcccaggtcttcatcagcgcttttctctccccagaactggttccgaacatcagcagacccacctcccaaacacaggagccaggactcattggtgcccaagaaggaaaagaagaaaaatctggcaggtggaaagaagcggggccgaaagcccaaggagcggaccccagaggagcctgtggccaagctgcccccgcgccgggacgactggcctccaggatgcagagacaagggggcccggggctccaccggccggaaggtgggagtcagcaaggcgcctgaaaagtgagcatggtgcgtggggcctggcccccatgcagccgccacaccgccctctgttcaaggcagggccagctccgggacctctgtcctccagttctccatcccccacccccgcctcttcatccgtccagtggggcagccagccactctcccttccctgaaggtggcccttcccctgttaaggctgccacagggcacacctgggttggggctccccaaggtgtgcccagcagaagtgcaatagccaggagggttgcccctcctcatgggaatgtgtctggggtcttggtgccacaggggctgcagcgcagagtaggcagatggcctttggccccccggctccgcttcctcaggccctgccgggtcccttccctggctaccccaaggctcaggcatccctggtgacctgtggttctgggctggtgagggcacctgagcaacctggcacgggcagccaccatcctggcctcacctccacccaacactggaactccagcacccccagctacctcccaggacagacccctgtctgaccactgccatgctgacctgacaggctccggcctgcccttggccacccacttggtccccttgcttctgttttctacctctccaggcctgcccactacccccacccctgctcctcctttgtcagtgcgatccctgctgtgctcaggccctgccccccaggcctgtctgtaattctcccagcttggggcaagggaggggttttgcttcttgtacctacagggcagcagaagcttgatgcccttcaacacagctgccagccctgggggtgtggggcccctggagtgtgctctcctccagtgttcagccttctggcactgcaggcctaggttggagcagcctcgtggagtagggacggactagttcgggccctggggtcttgctggggcccataggcatgtggggcaggaagctgggcagagctggcctggctctgagtggccactgggggaaaggcagccttctgtctgccaatctgggtaggcccagtggccaagctctcatgggagccccctccccacttttttttttaacctgcccccattgtttctggttgtgtggtcatttgatatgggaactgaaggccagccaggggaggggcttggccaaagtcacagcaggttgatggcagctccagagctgtctttgcccctttgtggccctgaggacggctgggtctataggtagggcaggggtcaggcagggagtccagggtgcctggaagaggtggccacagcctgtggctccctccctggggtcctgccttccaaccacggcattgcagggaggatgaggctcagagggggtaggtttggagggaggccattttccagggtgggtgggagtgggctgagggctcggccccactgaccctggacgatgagaattttgatgtttgcccgtgtgcgtgtgtctcctgggtgtagtggatgccagtcttgttgctgtgacaagtaacaaccttttttttaaattgttttttatacaaacactcgcaatccgacatttggtgctaagggtttcctggtgcagacggtgggcctgggggctgggctggaccagggcgtgggtctctggggttggggtcccttgctgctcagggaggcagtactgactgggcactgcctctgcccccagcacccaccctcccccattccccagggagaaggggccccactgggcttggcctgcagtagtagggagacaagttccaggagcactttggggactggggttgcagaacacttcctgtctctggcttcatccttgggccagaaggctccaaccctcagcagcccttgccagatgtgccagggagtgggtgtggagacccggactccccccacccacgcacacctcggcctgatgagaggatggaggctggggcagagatgggcgtgacccagcgtcagagggtcgggggaggcattccttcctgtgtccca

SEQ ID NO: 12852 - DNA, 1215 bp, Homo sapiens
gtgaggacttccagagaactttgtccccggacactggcctcccccttggcaatgggcagtgactgtcctgacctctgacctcagctctctggccctcctggacacagcagccccttcccatcccctcggatccaagttaattagaagctatcaggagggggccacctgcccactcaaccctcaccctgcttcctgtcccacccccttccgtggcttttccacagggctgggcccagagtctcctctgctccccagctctcaggatggggttcccagcagcacaggccctcgggggccccagccttgggcagcagggcgttctctctggccagcatcctgggccttcactgctggtgcttccacgacttgtttggctgaagtggtagtggtgggtctgtaggcagaggactgagaggatccagagagaggtggggggcgggtcagcctgccaagcctggagacaagtctgcgaagagcatcaggtaggatagttcagccggcacagggacgggagcttggtgcagtgccagattgggccaggggtcctcagtgcccaccttggctgttttccatctgtgtctggagagaagattccaagggtacctgcctgggtaggctggcattgcatcaagtcagcatgggaaggtatgagggccccagtgagaagctgtgcccccactgctgggcctgggcagcttgtgagccagcagccatcatcagagacataattggcccctggaggaatgttgccagcctccttcctcctgcgcaaggcacctctcccaggggcacaccccctcccagcactgggtaggagtgcatcaccttcggcatcatcttcgcagctgtggggctacgcacactgtggagctgcgtacactgtagagctgcgtgttgggaagggggtctggaagttggtgagggtctcaggacaggactagatcctatcaaactgatgatgactcctgggttatctggggagaccttggctggcagcccctcccctaagtcagaagcccccatcacttgcttttcccacgtgaacaaaaccacaggaaggcaggcccctcttccctgaccagagaggacctgccaagggcagggctccagggcagcctcaccacgtgttccaagtggggcccgtcaggcttcacagattgtctacttgctctgcagagatgacggatcctttctgcgttggaggccgtcggctcc

SEQ ID NO: 12853 - DNA, 1848 bp, Homo sapiens
ggcactaaagttagtaaagaaaagtttaccatctgaaaaagctggattttctttaagaggttgattataaagttttctaaatttatcagtacctaagtaagatgtagcgctttgaatatgaaatcataggtgaagacatgggtgaacttacttgcataccaagttgatacttgaataaccatctgaaagtggtacttgatcatttttaccattatttttaggatgtgtatttcatttatttatggcccaccagtctcccccaaattagtacagaaatatccatgacaaaattacttacgtatgtttgtacttggttttacagctcctttgaaaactctgtgtttggaatatctctaaaaacatagaaaacactacagtggtttagaaattactaattttacttctaagtcattcataaaccttgtctatgaaatgacttcttaaatatttagttgatagactgctacaggtaatagggacttagcaagctcttttatatgctaaaggagcatctatcagattaagttagaacatttgctgtcagccacatattgagatgacactaggtgcaatagcagggatagattttgttggtgagtagtctcatgccttgagatctgtggtggtcttcaaaatggtggccagccagatcaaggatgtagtatctcatagttcccaggtgatatttttcttattagaaaaatattataactcatttgttgtttgacacttatagattgaaatttcctaatttattctaaattttaagtggttctttggttccagtgctttatgttgttgttgtttttggatggtgttacatattatatgttctagaaacatgtaatcctaaatttaccctcttgaatataatccctggatgatattttttatcataaatgcagaataatcaaatacattttaagcaagttaagtgtcctccatcaattctgtattccagacttgggaggatgtacagttgctgttgtgtgatcaaacatgtctctgtgtagttccagcaaatcaagctgagctttgaaaaagtttgtcttagttttgtgaaggtgatttattcttaaaaaaaaaaaagaaagaaaaagaaaaaaagataagaaggaggagtaaagggactactcctccttgccaaatgtgctaaatatcattttaggagaagaaagtgggtttattgtatttcccttaagattgtgagggagtgtggatacagtagaatgagccaacagtttctttataataaatacggtctgcaataaattatttcactagctctaaaacctttccctagattttagtagggagttggtttctgttaatatctttgggtgctgtggtggtaaatgctatattatgaacggtggcatgtatttacagttagagtattgtgtgtacactttttaatggtaaacttaagctgaatgtgtaatggatttgtgtatagttttacatatttggaagcattttaaaaacaggttttaaccttatgtaaaattacttttatactcgtgttaacattttcatctgtgccttttggtaatttaatttctattatgaatttctggtgcctatgagctagctatcacctacctgaaaggtgcttagaggtgaaggtactgtttctaaaaacacatcactgtgatacctttctatcctcacattttcaagcttgcctcttttctgttctttgtggatataacttaagcaattgtgttattcataaaggtttagaaatttcaatattcccaacactctatgtttctgattttataacagtagccatttttgaaagtcagatgtttggcctgttttatatgaataaagtttatttataaa

SEQ ID NO: 12854 - DNA, 1416 bp, Homo sapiens
caccattagatgaacttccaactctgacactgaaaaaaaagcaaagaacaagaacgcgagacaaatgcacctcaaatctccaaggagcaaaaagcttaaactgagaagggaccaaggctgtactaaaatctgagacctgacttccagcacgagtcttgattgcttttttttttctcgagttcgaggcggagcccgcgaaccccatctcctcagagcgccaccccctcagcttcgcccgttgggcagaattttccaaatatctccacccctaggctgaaaagccagaaagaagttttgagccaacgaggggaagaaaggagttggggcaaaacaggaggcgtttccctacccgcatacatccccgtccccgagacacccaatccccccacccccagcctgcccgcgcctcccgcccccagctcctcgccctggggacagctggcagccccgcgcggaccagacacaaagccgatcaatcccggaggcgtgggggcggagggacgacccgccggggctttcccgggcgctgctctcctcctgctgccccctcgctaggacccggcggacgcctcgtctggttttcacgccctctagcccctacccccacacccccaaaacagaacagacccccatccctgggctggaggacccgcctcttggcagccagctgagaaggcgccccggggagggggaaactgacatcccatctagagccgtccctcctcttcctcccctcccgactctctgctcctttcccgccccagaagttcaagggcccccggcctcctgcgctcctgccgccgggaccctcgacctcctcagagcagccggctgccgccccgggaagatggcgaggaggagccgccaccgcctcctcctgctgctgctgcgctacctggtggtcgccctgggctgtaagttgctcgggttcctctacccttcctgcctggaccagcctgcccccaccctccagccccccacggggcgctggctgacagtgtctgggcggctctgggccgaggtcgccgcggggcgtctgaccttgcgcccaggcgagcgggaaacccagggtgcccgcgagcggacgctgggagcaagggagcgcgaggtcgtgggtttcttgtgaattgcgtctgattttgtcagttctagatacagaaaattaagggttcccactagcaggttctcatctgtttgcaaagttggggtaagttttcagacagagggacgtgattcgaatgcaaaactcactacccactggtaagatgctaagaccccaagaaagatggcatcactgggaggcgggcgccggccacactttgagtccccggggagggggcagcgtccgcgtggtctgggctctgtagcgtcccagctgagccggcgatatgcagcgcacttgtggggcggaggtgg

SEQ ID NO: 12855 - DNA, 1146 bp, Homo sapiens
tgagtttctctctgtcgcccaggttggagtgcagtgacacaatctcggctcactgcagcctccgcctcctgggttcaagcaattctcctgcctcagactccccagtagctgggattacaggcgcccgccaccacacccagctaattttttgtatttttagtagagacagggtttcaccatgttggccaggctggtcttgaactcctgacttagtgatctaccggcctcggcctcccaaagtgctgggattacaggcgtgagccatcatgcctggccttttgaacattttaaaaactgtcctttccaaaagaaaaattttaaataacagcatctatatacaacttttaggctttaaacttgagtttattaaaagggaaataaatgctttggttactaaatgaactgattagaggaaggtattacacagaaagctacttggattattactaacatcaatgtcttctttttctaaaaggtgattttaaaaatcgagctgagatgatagatttcaatatccggatcaaaaatgtgacaagaagtgatgcggggaaatatcgttgtgaagttagtgccccatctgagcaaggccaaaacctggaagaggatacagtcactctggaagtattaggtgatgtgcatgtatgtgtgtgactacgtctcccactccttctccaccacccagccctgggggcaagcaagcactggtccataaacatgccagcatcaactgggagcctcaaccagtcaagttacagagaccataagcatcaccttcctggcaatctcctggccatttctccccctctcctcattggctgctgaaattttagtaatgcgttatcacaaagtatctctttgttaaaggtggaggcaattcctaatgatcctacaatatacataggagtatctttcctgagagtttatttttcaatagttttcagcatatacacagtttctccaaccatttaaagtagtatcacatgagatggtggagaagcaataacacacaaaaaagtagactgaaggtaggattagaagtcatttggtaaataaaggaaattgacattgattatatacctgatatgttagcccttttcacataagtaattttacttcatcttcattaatatgatttttatagatgac

SEQ ID NO: 12856 - DNA, 1549 bp, Homo sapiens
ttggctcactgcaacctccgcctcccctccgcctcccagattcaagcacttctcctgcctcagcctcccaagtagctgagattataggcgtgtaccaccacacctggctaatttttgtattttagtagagaagggtttcaccatgttggccaggctggtctcaaacctctgacctcaaatgatccacccccatcagcctcccaaagtgctgggattataggcatgagccactgcactgggcaggttaatcttctttcaaaagagtctgctctttctacccaattggcgaagcaaatccccaggattcaccgaacaaatggattaagcacccactgagtgcctagcatgtgcctggacaccaggccaccgggaagatgctccccctttgacttgtctatgacatgctatgtctctcaccagatcccttcctggaggtcgggcttctgtaacatggctctgcccccaaaataaaattttcaccacgagtcagggatcggcaaacattttctgtaaagagccagaaagtagatattttaagtcataaggtccctgttaacaactacttgactctgccattgtagcacaaaggcagccacagacaaaacaagcaagtagtcatgtctgtgttccaataagactttatttacaaaaacagcaggcacagacaagatttggcccacaggcatagattcccaactcatggtggtgaagtacagaaaaaaacacctgtctacaagcttttgtaagaaatcaggctaaatgttacctatgttttggttggaagatttctttggtttgaggaatgctttcctcttgcattggcatgccaagaggatagatgactctgaaagacgcctcttcagacatacctgtcatcacacaagatcaacttcttcagtttaaatgacacaaatccatattgtggaaggaaaatatgtagtgccttagcttcactaatagttgtaaaacttctttttaagacatcaaaggctagaggattcattttatgcagtgcgaacatctaataacactctctgtgtcaaatatatattgtacattaccttaaactattgtaatagctaggtaaaaatccttgtataaaagaatgttttcccccacacaaagggcagagtattgagcactaatttcctattaaaagtatatatatgtatctgtgggtcactggtgtccagacttgtatttgcatttgtgtttacttgaggaacttgaacactaacaactggtaaaatcccattgtaattcttacagcattttgactttattttcctgcagtgaattgtgttgtgtaaagattagggctttaaaatcttattagcaagctttgttttgttttaattattgttgctgttgtaactagatttaatttatttttagttggaggtttgacctaagtctggaccaattgattgcttttcaatacaactttgcaaagaacttcctttttccacaggtggctttgttcgattaaagtctacactaataaaaatagctgaacttgttaaactttttagccccatataacagtgca

SEQ ID NO: 12857 - DNA, 1157 bp, Homo sapiens
aatgaagttgtcatgtcaggttaataaacaccagttttttaaaaaattagtttataaatgtcatttgtggattttctttattttatttttcaaacagggtctcttgtcgcccatactggagtgcagtggtgcgatcatggctcactgcagcctcagcctcctgggctcaggtgatcctcccacctcagcctccgaagtattaatagctgggactacaggcgcgtgccaccacgccctgctcatttttgtatttttagtagagacaggatttcgccaagttacccaggctgatttcaaactcctgggctcaagcaatctgcctgccttggcctcccaaagtcctgggattagagacatgagccaccacacccagctgattttcttctatatgtaaagactacttccccctcttctgcttggcgtttgctttttatttggattgggtctctacttcttgtgtgtcatttcgtttatgtggatagttttaaaatatcttaaaaagtcactcttgcaggactgatcctttgaaatactccagccatgactaaaagagaagcagaggagctgatagaaattgagattgatggaacagagaaagcagagtgcacagaagaaaggttggtgtttctgaatttatcattttttttcaaaatatcaatatacctaattaaaaccaggaaacaagtcatagttcttttggactgtctttttttaactgttctcagtattttagggaataatgtattgttttatttcctctgacttaatgtggttgtagctgagagggaaagacagttttaaactaatggtagtaaaagggtaaatgaaatcaaaagcaattgctttcaatagttttctcctttggggcatttgattctttattcttttcctcagcactggttgctttaatttcagaaatagtttaattcaacctgaactcatttaacaaatatttatgagtaactgttgtaaacaactaattgacaagaatatgtgaataaataagatactaatctgcccttataaaggccacgttgtatttgaggagacatacaggtatatgagtacttacgggaccagtactaagcataaaatgtagtgaaaagtgttaattcttggaataatagtggaatcatacttatttgaaaggaggacag

SEQ ID NO: 12858 - DNA, 1212 bp, Homo sapiens
ctgaacttttttgttattttgtttgaaattgtggattgaggctttctgtagtgaagtactttcttgggggtaattcatagggcattagttaaagtgataatgtctttcagtaattttttttttttcctgcttgtattggaagaaaaaaaatttctccttgtctgtctttgcagctgtgcaaattattccagcatcagtgcaatctgctacacctactaccattaaagttataaatagtagtgcgaaagcagccaaagtacaaagagcgccgaggatttcaggagaagatagaagctcacctgggaacagaacaggtatttttgtattttcttgtatttataaaatatatctatctaattaggtatattttgttgtattttactgtatgaaaaatgtgaatttggactatccctctggcagtttttagacagcatttctagaaaaacaaaaattgtttttgccatggctgagatttaaaccacgggaccagtttgttgtctttgccttgggctaatctataacactatagctaatgctttgttcctcttaccaatttaggaaacaatggccaaatccaactatggcagtttttgctagaacttcttactgataaggacgctcgagactgcatttcttgggttggtgatgaaggtgaatttaagctaaatcagcctgaactggttgcacagaaatggggacagcgtaaaaataagcctacgatgaactatgagaaactcagtcgtgcattaaggtaagcctttattacttttttttctgttatcaaaaatagaaactttctaaaaaatagtttcttattctagatgtaataagcattgttatgtaatgatattaaaaacttgtttatgtttttttctttacatattaaaaaacctttttaaaaagatcttaataatttcgaggtacagttttttttttacaaaattactctaagattgtttgtttttatctgatttgaaagctataatactctgtcccaaaaaaaaatgtttaatttttgaggtttttattatttgcatagatgaattgagtgttagtttttaatgagtaagcagaaactgtcctctgtttttacaattacaagcagaatattgacccattttctacacaatctgcctaaatctggatatccaatctttacattgatacaaactctccgtaagtagtataaggttttttgacagaaattactat

SEQ ID NO: 12859 - DNA, 1067 bp, Homo sapiens
gagctaaaatgttcataccgaataaatttatattaataaattactaaactaagagtatcaggttatttatatatttgcaagcaaaggacagtaagaagttgactggcaaaagagcagtgctgaaggaggagatccaggtttaaatctggcttattaactcaagccaattttaaggattttctgtatagattactcatgtcagaccaagaatttaaattattttgagagaggcatttaattctaataaaccagctgttataaaaattataaaatgatctctgtttttcctgtcagagatttaaaaaactgaaaaggtatacctcaacccaaaaataaaggtttgttttggtttgttatggcttccttttttaaaaaattaccctgtagtgccagtttattatgcaaagcagcttatattcctttgtttctgataaaatgaagactttaaatcagtcagtagtactttacctttcaaggcattagtaaattacttgcaaatagttttaaaaggaaaatacgacctttgttataggcagtcttctctttaagacaatacttttccacttgttttccttttccatattatatatgtgtattcatatagctgtatacatattcagttgatcattttataaacatatgaaggcataaagatatacagaagaaaaattattaaacaactcattttaagattcaaattaactaattcctgcatatatgacattccttacataagcgaacactaaacaaaaatggctagaaatgtctttttctttcttttctctctttgttgtttaaggtattaagcacgaattattacatgagactggcagatagctattaatcctcttacagatttgagaaagttgattctcaaatatttatgcaccttctccttcattgttttctttaaatctgtcctcttaaaaagcttcttaagagctcagttaatgcttttgacttaactaggagaaaaaggcatgataatacaggcaagatggcattgttagcaattctggtagtggtttggaatgaatcctaagaggcagggatcttaaggacaagga

SEQ ID NO: 12860 - DNA, 1182 bp, Homo sapiens
aatagtaatttgattatttcattcatgaagcggagtggtagttatccttctattgagagggaagaaataaatgagtattactgaaacttaaagatcagtggaaaaaaaaaacatttaaaaatgttgtaggagactttcaattttggaagcaaactgagctattcttaccagccaaagttatactaaataagagacttgggggagcaaatgtttttcagccttcagaaatgaaagttaaggattttagcactaggtaaaattcagtataataggctgaagtggagtaagtgaaaacctgccttttgccactcttaaaaattgtgcccaaaatataaaagtgtggaactttagaacttggaataattttattgcagtcttccattacatggaaatagcatatctaatatctaggttacttgagagaccagctaatcatctctgttgcacatgtttaattggcaaaaagcaattcatgataaataaaattactgctttccatctactgggtaaaatgactattgaaatagtatgaatgtggtcagaggattatagttgagagtgaagtactatgtgtgagttatagatctctcgaattatatttatagatgcagtgtcctgcccagttttgtttgcctcctacattttactgtaaaatatttattgtcttctagccttgagcctctgagggtcagtaagtgaagtacagatagcaaaattttactacctcgttaacccttttcttaaaatattctctatctttctatgtctctttctgacatagtaatcccaaaggattgtgttactccccgtgaaagttattacttttcctttaaaaatggttttataataagactgtttaaaacctttccagtattggtacatcttggcttctggcccaaaccccaagcagaaaagaaaatggaataatggagcattgtttttccacattagtattagggcatcagattcttggtgaaacactataattaagtagttataattaaataactgttcttcatacttaggactcttaatacatttctttaagacttgtaagtataattgtaaagcttgttaactgtttatatactaaagaaaaagctttacaagataagactgaaattcagaataccacatctgtacagcgttgacaactctaactaaaaggattacagcccttaa

SEQ ID NO: 12861 - DNA, 1237 bp, Homo sapiens
ttcaagcaattcttgtgcctcagcctctcaaatagcaggattacagatgcccaccagcatgcacgactaatttttatatttttggtagagatgcggtttcaccattttggccaggctggtctcaaactcctgccctcatgtgatccacttgcctcagcctcccaaagtgttgggattacaggcatgagccactgtgcctggccgattttcttattttaaaataataacttacaacttgtagggctactgagaagattataaatgtgtatttaatgtgtctgacttagtgtttccttccatgggttagaaattaaaaagggtacttgagaataaattgtttattaatgattctattcatggtatttaattttgaagaaaaaagttattttgatgtaaaattttatgtttctcctgagattacacacctcaactgcttttcgttttaaaattcaaagaaatgaaagtggggcttttctttatattggctttatttgtagtgttctggtagaagtctgtttacctatttcatttttattgttttttcagacaacaagtgagaatcaggcattgtattctattccacttgtgcaactgtttgcctgtgtcagctgtgatttggcctgtgacctcagtgctttctttgattccacaactctggataccattggcaatcttcctgtaaatctaatcagtgaatggaaagaatttttttcccaaggcatccacagtttgcttttacctattttggtgactgttacaggcaagtgaaaaagggaataatagtgagattgattcattggaaatgacttactgaaaaattcaaaagcaaaaattttgatgtttaaatcaaataatactaaatagtaaaagaaaaagccagaagagaaagcttggcttctcagaagcatcatctatgctttactttacagacagaaattgaaaaatggcaaggtatccaatgactgttgcaaattaaaataataatacttcagataacatgaatggatgatgtgaatagaaccttgctattgaacatttgctggatcagataaaagtcattaaaacagttgagattaactggaatatatattcagttcatgtttctagttaagactgctttattgtttatgtctagtttttatttcattttcttaaatgacatttgattgtttgtgaatcatttaagctatactaactttcttttgagacgtgcatgtttctttcctttttgtcatta

SEQ ID NO: 12862 - DNA, 2404 bp, Homo sapiens
gaaaaaacagctcacaacttggagaacgtactgatacatttctgggaaagactgtcagagatctgtgttgcgaaaatcagtgagccagaagctgatgttgagtccgttttgggtgtatctaacctattacaggtgcttcagaagccgaagagctcattgaagtcaagtaaaaaaaaaaatggtaaggttagatttgctgatgagatacttgaaagcaataaagagaatgaaaaatgtgtatcttcagaaggagagaagattgaaggctgggaattaacaactgaaccttctctcactcataattcttcaggccttttgtctcctctaaggaaaaaacctttggaagacttagtctgtaaactcgcagatataagtattaattatgtcaatgaacgaaagtcagagcaacatctaaggtttctttctactctgcttgactccttttcttcaagccgagtatttaaaatgctacttggtgatgaaaaacagagtattgtccaagccaaacctcttgaaatagccaagcttgtacaaaaaaatcctgcggtgcagtttttataccagaaactgataggttggctaaatgaagatcaaaggaaggattttggtttcctggtggacattttgtacagtgctctccggtgctgtgacaatgatatggaaagaaaaaaagtcttggatgatctaaccaaggtattcctgttgtatatcttttcaaactatttgaataatagatgagtagaatgagcctgcttattgttttctggttgtttcttcactgtgagtgtcaattttaggacaagcaatatattcttgatcatgatttgggaagtatctagggctgctgggtagatgttcagcagtaccagggtgacaaatacttgtaattaaaaggtgaattcttttaatctatacatttaaaaagttggataagaacattttagttttgtattggttacatgggtacttcatttactttttaaaagttttagctgggcatgttggcgcatgcatgtagtcccagctactcaggaggctgaggtgagacattggcttgagcccatgagttctagactagcctgggcaacatacaaaaccccatctcaaacaaaaagttgttctagcagattgtttctaactctttttcttttttcaggtggacttgaaatggaattctcttcttaagattattgaaaaggtatcttagggatttttttttctttttttttttgtatttatgggaatagaaatattataaccgtagtcctatttacacaataaatatggtcagatagtcaggttctgtgttagagaacttcctcattattgtaactttcttcctataatgtgggaagatatttgttcttttcctttcctgtagtagtatttttctggttagtaatattagggaaaaatgaacaggctctggaaaatccagtgtttctttcctagaaggtaacaaaggcagatttaaacattttattatcttttaattaaagctacaactttctgctgttattctagttactttttctactgcagaaatggattggaggttctagctttgggtagaacacatgagaaaattaagttttctctactctggaacactatgtaggtaaataaaaatcttccagtctttgtgtgattgccactgactaagaaaattagtggtaagaataatgaaaagaaatgaaagaacataaacaatttacaaattttcaaaacggcttaagtattctttcctaatgaggatgtaaatgttataactaacacttttccaactgtagagatgttatgactagctacctgaaattcttactcctttttaaagcattttcaaattatttttctgttttcatagctaactcttgaatttgcaagtttttttctattttttaaattgtagtaaaaaaaacacatagcatgaaatttaccatcttaaccatttctaaatgtacagttcagtagcatcaagtatatttacatcgttgtgcagtttccataacttaattcatcttgcaaaactgaaaccctgtatccattaaacagtaactccccattttccccatagttttatttttacaaaataaatacagaatatttattatttttcaatgaggaatatgacttatcaggcacactatttgccttagtttatctagtgccttctctccctgtagccaagttacatgaagagctaaattatcagaaagctccttgataagccttgattcagagcagggggtgcaaataatttgataagagtagactaatgtatccatttccaacttaggaatgtacctgccgtgaagtgcaaatactcacatctgtgtggaagaaaatcctcttcctgagcagtgattggaagttcctagccagtgtttgctgcctgcgcttccat

SEQ ID NO: 12863 - DNA, 1236 bp, Homo sapiens
gagctgaattctgcataagacagtctgtgaccaaacagtttctatctcttttgatgtacattttaaacttttaaatggggcagttctgtcaggaacattggtagtatatgttaactaattagattttagtaaagtcagtgattccagaatttgactgaagaaagtaatttcttttcccatattcaggaaccattagaaataaaccttgagcctccaggccctcttactttagccatgagccagtttcttaatgagatgcaagagaccaaaaagggggttgtgacaccgaaagaactcttttctcaggtctgtaaaaagtgagtatccacttcgattgtgctttcagtgcctcagtgagatgctgagaaataatattaatattaaatagtaaaatataaaaatattaatagcattacatttagtcaaccctctatatacaaaaggcatagttttttttcatttggattttaaaatatattttatgtgatagttaaatctcccaagggtgttaatggactaaacggaaatttgtagaaaccagaactctctgagatttgggatatgatcctaagattttctaaaaatagcttcagagcttagtagactgaagattgcttttctgtctttttgtttttctctagagcagtgcggtttaaaggctatcagcagcaagacagccaggagctgcttcgctacttattggatgggatgagagcagaagaacaccaagttagcatgttatgaccattgtattttatgatcttatcttcataagctttctgtctcatttgatatcttacgagttaaaacaatgaaagctagttattaaggccatcatactttaaaattttttcttacaccagctttttcaactagtatgttttcaccattagaatgaatccagagaattagcagtaattctctttctcatgatggcttaagtttagttgatgtttacagcattaatgttctttaaagattctgttgtactaacctatacgaagagagctgccaaatattggaaattgtttctcccaaacccaggtgcagcacacccttacttttaattctgagtctgatttaatactgttttttgaacctaggaagtattttcattttgtaagagtcagggaacattggttgcattttaaaatttttgttacttgccaggatataaaaaaatgtatttggggtatgaattaatgagtactaataatagtgataataactaatatt

SEQ ID NO: 12864 - DNA, 1214 bp, Homo sapiens
aatttcagtgttaaactttgtatatacttatgtatcaactactttagattataatggcaaagctggcaggtgggcctaaagctcctaaaccacaaggaaattgggacagagatggttggcaagacacatctcatatataaatagcaaatcaggtgccaaactgaccgacttacaccagtgatgcatgcacatattttcactttcagctttttgagttattgaagtgcatgtcttggaatgttcactaatctctgtggattttattgcggttatccataaaagcagtaaactttctcatgcgctgaaagtttacaattgaatttctaacaagggagctagcaaactctgtgctgtagtgttttatatgcagtacataattataccaagaagactgcttaatcttaaatcatgctaatagaagcattcttttcattctaaaggttaagttgataagcatactcttgtgtgattcttttttatgcagatcatcatggcaaaaccagctggtgggcccaagcctccaagtgggaagaaagactgggatgatgaccaaaatgattgaaattggcttaatttttactgtaggtgaaggctgtatttgtagtagtactcaagaatcacctgatgttttcttattctccttaaattaagagttattttgtgtttgtattcttggctggatgttataataaacatattgttactgtcaaagccttattgtctaatgaccacggttattggctctaaatgacttgtgttcctctcaaccttgttaatcacattagctgtgggacttaaggcaagtcacttatgtaagtagaggcctattacccatgtatatctggcctactgcctgtttgtgtaaataagttattggaacacagccatgctcataccattacatattgtctgcagttgctttctaacaagggagtggcagagttaagtatctttatttttgacagagaccaaatgggcctacaaagcctaaaatatttactatctggccctctacaggaaagtgctgccaacacctggactagatttccagtgtttttgtcacagctctggaattcctgactcaaggtgacttgtttcaatagcaattaataatttgttgaagacactcgacttagcaaagtacaaaaaaaatgcttagaaaatagataaactgacatacaaaattaagtcagttttcataaagcagattctat

SEQ ID NO: 12865 - DNA, 1161 bp, Homo sapiens
aggcaagtgttcatttataatttactcctactaaatttttgcttacatatacacctgcttaaaacataaactaaaatcattattatagtagtagctaacatgcactgagcagtttgctctgtaccagccattatagtacatatgcttcacatgctgtatcattttagtctcacaaaaaccctattagtgaggccttataatcccattttatctattttttttcccactttattttagatgagaaaagagactaaaattagaaaaatcttgcccaagatctcatagctagtgagttaggtagagttaagattcaaatttgggctgtcatctaagcctccattcataactagtagagtctactatatgttttattccgaagtatattctttgtcattttgtatcaaaaataaacatccatatgcattgggttaccaaaataagctactttaagtcatgtcagaataggaaatgttgtttatgttttaggtcatagaaggttatgaaatagcctgcagaaaagctcatgagattcttcctaatttggtatgttgttctgcaaaaaaccttcgagatattgatgaagtctcatctctacttcgtacctccataatgagtaaacaatatggtaatgaagtatttctggccaagcttattgctcaggcatgcggtaagtaaatatcagtaaatgaaaagatccaaaataaaaatacctttaacatgactagatactttctctgttgtcccaaaataatcttttgatatgtctcattttcttaacagtatctatttttcctgattccggccatttcaatgttgataacatcagagtttgtaaaattctggtaagtagaaaatgcattaatgctacatatctaggtcagtttttttgtgtgctttttttgtttttttgtgcaaaaaaaaaaaaatgtgttcatctaaacctaaatgttacttcatgatttgaacacttaggactttttttgaggcattatttttatttatgtacttatttatttttgagacggagtctcgctcttgttgcccaggttggagtgcaatgacatgacctcggctcaccgcaacctccgcctcccggttcaagtgattctccagtcccagcctcccgagtagctgggattacaggcatgcgccaccacaccc

SEQ ID NO: 12866 - DNA, 1133 bp, Homo sapiens
tcccccacaattcttccatagaccctcatggactttattctttgtctcttttacacacatatgaccaatatggtgacttgaattttgctggtatgcaaaacacaacagtgttaacagaaaagcctttgtcaggtacagacgtccaagaaaaaacatttggtgaaagtcaggatttacctttgaaatccgacttgggcaccagggaagatagtagtgttgcatctagtgataggagtagtgtggagcgagaagtggcagaacacctagcaaaaggcttctggagtgacatttgcagcacggacactccttgccaaatgcagttatcacctgctgtggccaaagatggctcagaacagatctcacagaaacggtctgagtgtccgtggttaggtatcaggattagtgagagcccagaaccaggtcaaaggactttcacaacattaagttctgtcaactgcccttttataagtactctgagtactgaaggctgttcaagcaatttggaaattggaaacgatgattatgtttcagaaccccagcaagaaccttgcccatatgcttgtgtcattagcttgggagacgactctgagacggacaccgaaggagacagtgaatcctgttcagccagagaacaagaatgtgaggtgagcaggaatatgttcttaattcattgttttaataaccattaattgggatttactgtggatcagctccctttgcatcattagggatataatcaggttcagggagtggggaggaaactcatacaaaattaattgtaagactgtgtgatagggctgggcgcagtggcccacaactgttaattccagcactttgagaagccgaggtgtgggtggatcacctgaagtcagaagtttgagatcagcctggccaacatggcgaatctccgtctctacaaaaattagctgggtgtggtggtgggtgcctgtaatcccagctactcgagaggctgaggcaggagaagcgcttgaatgtgggaggcggaggttgcagtgagccaggtttgcaccactgcactccagcctaggagacagagcaagactgtctcaaaaaattttttaaaaacactgtgtgataaataccaaaagagagagatgaagtttgaaggactt

SEQ ID NO: 12867 - DNA, 1189 bp, Homo sapiens
aggagtttgagatcagcttgggcaacatggtaaaaccccatctctacaaaaaatacaaaaattagccaggcatggtggcatgtgccagtagtcccagctacttaggaagctgaggtgagaggatcgcttgagcctaggaggttgaggctgcagtaagccatgattgtgccaccgtactcctgcatgacagagaccctgtctccaaaaaaatatgtgtagatcagtgcagatatccttttgagattgtatagaaattgggatagaggcctatgttttctttaatgtaaaataagttctctgaaaaacttagatgtataccttcatcttcctaggtttgactataattataaaatacagcaataattagtaatatttatttcatattctaggtaaaactgccattcaatgcacaacggataatttcactgtctcgaaatgattttcagtccttgttgaaaatgcacaagcttactccagaacagctggattgtatccatgatattcgaagaagaagtaaaaacagaattgctgcacagcgctgtcgcaagagaaaacttgactgtatacagaatcttgaatcagaaattgagaagctggtaagtgtaaaagtttcttgttactatttaaattccaccactttcttttttgtcaaggaaatagtttttaaatttctaggtcagatataatgctcaattacttattttaatatgtatcaattaccattttatcatttttaccatgatatgctgtgatatgtaagtgctttttaaaaagaaggttttcaaattaagaatgactttactgtctacctaatcattagtggttgtgaatagattcaagaaattataaagcactttaggttctctgttttgtgtctatagaagttaatattccaggtgttcatttaaatgaactgtggacctgaataacttgttttggttgataccaaaaccagaccaaccaggatctttcatctaaggaaaaaaattctgatagatatggtgatatgaattgaaaatattaatatctaatgggatcctaagtgagaacaatgcttgcttttgaatcttttctttttcttttttgagatggagtcttgctttgtcgcccaggctggagtgcagtggtgcgatctcggctcactgcaagctctgcctgctgggttcatgccattctcctgcctcagcct

SEQ ID NO: 12868 - DNA, 1249 bp, Homo sapiens
ctccctgtgccagaggaaacagtgagcctggctacgcgcgagggcaggagtcccagcagatgtccacagccacctctgagcaagctgggcctgcggaacagtgtcgtcagagtggtgggatctcagatttctgtcagcagatgactgataaatgtactactgatgagtaaacttgcattcacttccttcaaaccatctaattttctcctgaagttttggcagcgtcttgaaagcctaatatgaccatctgttgctcaacaatactgtttttttcctttagtagtttaccataagggaatttcctttaagtcaaccatgatttctccttgatttctacaagagacaaagaaatgattttgcctcctggatatcagaaaaatccatgtgaaaatgtagtaaacctttaaaactcatgttttaaagaataataactctagtaataactcttcctgctattcagaataagtaggagaatgaaaactgcagcatatcagacagcaatttaacagcttgaaacatctacagatagttcctactaaaagaagtggcctgcagaagtttaataatttgacttttttctaatattttagtttgaaagaaaatttcttcccaagcaatgctaatagagttctattcttagaagcagggtgtcagctactgggaatatttttgtagagctgcattgtgaaaaaaagatggtcttacctgaatcttagggctttgttcttcggctcctaaaatcaggctttaagctacattgggaagatttagtaaataggcaagtggttggcctaagacgggggctgcttctcctcttcagtatggactctagaaagtctggctacatgaatagatttaagtgtcactttccctccctgccccccgcttcagtctctaccatatctggtcccatcatggacttcctatttcctggcatttttgtccctttggaagaagaaataggactcagaatacagtggcatgagtgattacactggcagcattatctcaggctccctagaatctggagagcttaccaacatgtaaagctgttcatttttccaccgtgggtcaccaatgccagaaaaccagacatcacggggaaagaatgttgcttactttttaccaggagtgcagttcatttttttcaccctgtttttgaagtcgtattattcacttgtaaaaatgattgtaacagataaaaaatgtatctgcagcaactctgcaggtttgtgaaataggatgaaac

SEQ ID NO: 12869 - DNA, 1099 bp, Homo sapiens
cagtaggtactttaaagacctgaattttatagtagctttaggagttatattttataaaaatcagttatgactttatatttccagacaatagagagttcagtacatcatgctcttgtgcctctgcctgcttttcctgcgttcccaccctgtattccccccgcctttcgggtttccagggcttcgagcttgatcttttgaaagttttattctattaaatttttgctatatcttctggttttctgaaaaagctttagaatggtttctataccctttgtatcactgcatttttccatatcatctccggttcgatcgcgtccagatggaaaacggaagcagaggcttctaatcgtcgcatttactggctccagtgcaacacatccatctgaaaacactcggaagtctggtgcttggagagggtgccattgtctcttgtacataaggtcatgacgtgtctatgtcaaaagttcttatatatttcttttataagctgaaagaaggtctatttttatgtttttaggtctatgaatggaacgttgtaaatgcttgtcaaacaataaaaataacgaaaagtgtctgggcggttctatgcctttttggatgggaggatgagtatgaattgttggcgggagagcggccgtgggagaagattcctgggaatgccatttattgaaataactcgtgatcatcaggagaacgctgttgtagcgcttgaagttttaacaacaacaaaaggtgcattacagttgcatggcatcttgacctaacgttgcccctactgggcactgtttcttttccagtctcctgcctatcccgatgggagcaggctgggggggttcctgtgaaaatattggggtgaagtgcagagctctgactggcctgactgagctcttgaatcactccacattttatcaccgggggcctgctgcctgagtctttcacagaatcaccaaacaaggtaaatacagtcttgggctgcctttctcttcctgtcagagtccccagatctgagcctctcgagtcccttacaaaccttacccatcaatgttaccccatccatccctgccctcagtgaaaagattgtctcctgtcactagaagag

SEQ ID NO: 12870 - DNA, 1143 bp, Homo sapiens
tgggttaggcgtgaagactttgccccctccaggaaactgaacactgagatctgactgcgtcacctgccccgtagagaatgtgtgtagatacttcctgccctaactctgcccaccctcctgtaccgtcgacaagaatgtccccttaggtcgcgctcttgcacacacggttttggcagctgacttggttctgaagccatgtagccacccaactttgtcattttcaacaacatcagaaagaattgatcagaatcccaaataagcttgagtcctatcttctgtatattactaagggcttttatttattctcaataaatcagggcctgaacaattaaaagaaaaaagattctatagcactggaaagcaaatcaccccaggagttaacggatgtacaacagattaatttaagggatagtagcacacacacgatccttctatctgaaatcagtctcctagctggggaaacctctttcacacacaaaatgaaatgtgtacagcttgccgtgttctgactgtacccttccctcttccatgtctgagaatctccgtgtattttaagaatgtgtgaggagagggtggcgattcatgtttcaatgagcctctttttttttttccttcctgttttggtctatggctggtcttactctgtgtccatgttcggaagctctagttttgcatagaattatagagatgccaaactctttgaaaagagatccaaatttatcgcttgagagaaagaaaagaaacactattttttgtattttacctgagatacaggggcacaaatagatgagaattttacagtgttagtgtatgtatccctgagcctaaaaaatgaggatataaccttttacagagagagtgaggcgtggtggttttatatttatatatgaaaggccagcaagctcatgcgaaggatatacttttcttccaaaaagcggattttttttttttaatgtttgaatctatatttgagatgggagtttggttggattaaacatgacaccccggtgggcggtgtgtgtgtctgttgcacatggcagggaggggagcctccttctcatggggttgccatggtgatcattggtttttccatcaaaattgcatcttcatccatagattaccttccccttccctgacagtcca

SEQ ID NO: 12871 - DNA, 1209 bp, Homo sapiens
ctgactaagatggaatagagaatggatattgggggccaatgatcactcgtctgattttaaaacgtgattttatatatcctaagaaaacaaaatagtagagattggtaattttagatttaacctggaaacccaggaaccaaaatctgttgtttttccactattgttgctgacgctttagcaccatttttcaatagaatgcagaaacagctctgtagcatttggagagaaagcctggctcatttcccttgctgtagttcaagcctgtgaccagaaggacatgtcatttttggaaacagaacatatattttattcctatattatgtatttttgctgatgatttcaaacaaggattgaatttgccagcttttcatttccattctgaatccatgaagggctctcaaagtcccaatatgtctgggtcatggattgaatactttaggcattggggtcagggttggctggcatgatggaggagggttttttgaagggtgggacttacggggacctcaaggcacaagtgggtggtcctgatgcatctcccttgtggctgcttgtccttgccatcctcaggtggcagcacgcactggtgaaactggagtgagaagacgtactcaggccatgtccagatccgcgagcaagcgaaggagcaggttttcttctctgtggggtctggatactacctccaaaaagaagcagggacggccaagcatcaatcaggtaggttccagagcagatgaaaagtgagcccgcacaaatcacttctgtggccacctcaatttggggtgtgtgtgtttcttcagtgaggccgagtgttatttaaaatcaactagttggcacaaagaaactagctgtgctagacacttttaatagataatgcatacccataacattgaactctgctattagtctatcaccaagctgcagtttcccacctgcatcctttccaaaccctcattaattacagacctactcaaagcgcacaattcaccctgagtcttcaggaaaaagcagggctctgcaatgaagccaagtgggtacctgagtgcagtctttttttttttttggagacagagtctcgctctgtcaccaggctggagtgcagtggcacaatcttggctgactgcaacctccacctccctgattcaagtgattcttctgcctcagcctcccgagtagctgggactacaggtgcccaccaccatgcctggc

SEQ ID NO: 12872 - DNA, 1442 bp, Homo sapiens
agcccttggaaacaaagcaatgtgaagaaaagggtgtagaagctgagaatggtaaaaccagaagaggccacaacaatcctaccatttcttcatatagtggagaagtaaaggagagaaaaattgtggcgacagagaaaagcaagctgggtgaaggtagtgtgttgtattttagttggaatgaggacattgggtcctagcatcagtaactgatcacccatatccctgattgctgggttagaaatgggaggggaagaaggggcagacactgcaagtgtttgcacatgggggatactggactttgaaagaatattttgaatagctatgatttccagaaagtggttcattagcgaactcaatgggtttgcttagacggtaactgagtttttaatctctggagggaacacctgcttcattggcagctatgaatattattgttgttgttaataagataaccaataacattataaatttaggttaaatttactgaggattcctgaccttgtgctaagcactttgtagagacatcttatatgggatagtgggattttctcttacgctttggggccgttgggtaagaagacattctatagctgaggctctcccatttgttttacgtggactgctgattttgccctagctttagttttataggtgtaaggagacactcagtgttggaagagtcacagaacattccccatccctcaggggtacaccctttctgtgacttcctgcctcctagggccatctaaccacctgaccacacaaactttcccaggggccatttgtgagaatgttccttggagtgcgtgatgatttcaaatcagtggtggctttctcctattgtgggcggtgtgtgtccgcccatgccttttgggactctcttcgtttggttgacatatttgtttggacgtgacctttttccagttcctcttccctgggtttttgcccgctgaggaaatgattctcagatctcatccatctgcaccagtggcaacagaagagagaatttcttttttctatggttcgggtccaactgcccagacacctgtccttcagaggctcatattgttctggttgatgtcacttcctgacgtagacactctttaatattttagttctggaagtcatcaagttggacaagagacaggaggaaatggtggagggtcctcagctgacctgggatgcttttttgattgttcactggacacatagaaaggggccgttgctcccacctccatctgccactggcccctggaattagccctgttagtaagcttttcccagtggtggctgattcattctgagagcttttcatatcctttgggattcttcactgttagattcgagaagaaaaaggacagcttcgcttttgagtctgatgaaaaccacctgcagaagacatgtgtacataagctgtatatttatgcttttcttacggacac

SEQ ID NO: 12873 - DNA, 1186 bp, Homo sapiens
gatttggttttgtagcatttattgaatatagaactaatacaagtgccaaaggggaactaatacaggaaatgtcatgaacagtactgtcaaccactagcaaaatcaatcatcattgtgaaacataggaagcttctgtagataaaaaaaaaaattgatactgaaaactagtcgagactccatttatatgtgtatgttttctgaaagcctttcagaaaaatattaaatttaaggacaagatttttatatcagaggccttgggacatagctttgttagctatgccagtaattaacaggcataactcagtaactgagagtttaccctttggtacttctgaaatcaggtgcagccccatctttcttcccagagcattagtgtgtagacgtgaagccttgtttgaagagctgtatttagaatgcctagctacttgtttgcaaatttgtgtctactcagtcaagttttaatttagctcatgaactaccttgatgtttagtggcatcagccctaatccatctgatgctttttcattattaggcatgttggagacttgggcaatgtgactgctgacaaagatggtgtggccgatgtgtctattgaagattctgtgatctcactctcaggagaccattgcatcattggccgcacactggtggtaagttttcataaaaggatatgcataaaacttcttctaacatacagtcatgtatcttttcactttgattgttagtcgcggtttctaaagatccagataaactgtacttgcagttcaaattaggaaaagcaattttattggacaattacggtgaaaatgaattattttatctaggtcagttaagaacactgttctgctaagatgcagtaaaaagcaggttacatttgaccatattagatctgagtttggaaaacagaagtagtctttagttttaaaatggccagattttcttgccaggattgggtttctcacttgttaaacagaacattttgttaagtttaaaacctgggatggacttaagtattcatgttcattcatgttcattcaggactgcaggttatcatgacttgtttaacttgtgggaagctgttgtcccaagttatcctggggaactgcatctggttcttgcaaaacaccaagtagacaggctctcttttacctccccttgagggcattaacattcagtagtcacttcc

SEQ ID NO: 12874 - DNA, 1253 bp, Homo sapiens
ttgtaaagcagaaaaatcatttataaaggtttgttgaacaaaattcaaaatactgttgcttaaagtattaagattttttaggattataccttacttataggcccgtcattcatttggcatgaaattttgagttttattcactttcactttcctttttttccaaagcaattaaaaaaactgccaaagtaagagtgactgcggaactaaggttactgtaacttaccatggaggattaagggtagcgtgtggtggtctacaacatagttatttgggttttagtatttcatttagacagcaacacttacctaatgtttaaaggtaatgtctttgcaacaccaagaaaaagctttgagtagtagtttctacttttaaactactaaatattagtatatctctctactaggattaatgttatttttctaatattatgaggttcttaaacatcttttgggtattgttgggaggaggtagtgattacttgacagcccaaagttatcttcttaaaattttttacaggtccatgaaaaagcagatgacttgggcaaaggtggaaatgaagaaagtacaaagacaggaaacgctggaagtcgtttggcttgtggtgtaattgggatcgcccaataaacattcccttggatgtagtctgaggccccttaactcatctgttatcctgctagctgtagaaatgtatcctgataaacattaaacactgtaatcttaaaagtgtaattgtgtgactttttcagagttgctttaaagtacctgtagtgagaaactgatttatgatcacttggaagatttgtatagttttataaaactcagttaaaatgtctgtttcaatgacctgtattttgccagacttaaatcacagatgggtattaaacttgtcagaatttctttgtcattcaagcctgtgaataaaaaccctgtatggcacttattatgaggctattaaaagaatccaaattcaaactaaattagctctgatacttatttatataaacagcttcagtggaacagatttagtaatactaacagtgatagcattttattttgaaagtgttttgagaccatcaaaatgcatactttaaaacagcaggtcttttagctaaaactaacacaactctgcttagacaaataggctgtcctttgaaagctttagggaaatgttcctgcttagtcattttagcattttgattcataaagtacctcctcattttaaaaagacattatgatgtaagagagccatttga

SEQ ID NO: 12875 - DNA, 1190 bp, Homo sapiens
atatatataggtgtctgtttctctgcttttctctgctgttgtcagttcggttagccaaaaactacttcttgtttttaatttttatttggtactgtaatagaattaaaattgatatgttaaaaaatgttttgttaattttgaaagataaaaattacctttttgagcagggtgaattgtagagactatcataataagtgaatttatatggaactggcttaaggattggtaaagtaatgtcgattttgggacattgggtgtagggaagtagagaaatcaaagaagagtaaaatcttgggggtcagtagtatcaagagaatggtagttccattatagacatgggaaatttgacaagttagccatttagagagctgaaacattcaagtagtttttaaacaaaagcaatcattggatggatatataaaagtttcataaatgtgaaaataatgggtgtcagattgtgactttgctttttctgtactgatcttacatctttatccttgcagtgtaaaccagaatacaaggttccgggattatatgtaattgactcaattgtgcgacagtctcgtcatcagtttggaactgataaagatgtttttgggccaagattctctaaaaacataactgccacattccaatatttatatctttgtccatctgaagataaggtataattaatttttaaactaaaacttgtattctttaaaaaatattattttaaatgtatgttagatatttggagcctactatattaccagataagattttcatgtagcgatgtctgtgagcttgaaacaaaacagtttttttcttcagtggtcatttcgtgtttattttcttatgagttcttcaggattatcagtcatactgttgaaatatgacaggaacaaaatttatagaatcaaagagtttaatagtggttgccagggactaggggtaagggaaacattaggagctgctaatcaataggtatgacatttcagttaagcaagatgaataggttgtagagatctgctgaacaaccttgtacctatagttaacaattctgtattgtacacttaaaaattggctaagtgagtagatctcatgttaagtgttcttatcacagtaaagtaaaatttttaaaaaataatatgaaaggcgcatcatctttaaagaagatatcgttggaaagatgtgcttgtgtagttgag

SEQ ID NO: 12876 - DNA, 1188 bp, Homo sapiens
tgtggcacggttcatttgggcacttggcaaagccgttgcattgtgggcaggatgacctgttttcgagctgagcaggtgtgcatcctaatggcctatcccctgctcttgttcagcctccgcagcattcctagtgtctctctacataaaggacatctggctgggggctcagcggccggacaccctcttaacccacgtccggatggtgtgtgaggccgcagatgatgccccgagcagtgaagaggaggccatcgtggtgctctgcaaggacgccgccagcgcagcctcagatgcttgactcctgccggccagcaccttgcaccctgatgaccagagcctcgagcacagcaccagcttctagaagtttggttgagtcaagggtttccagagaaggcatgggaaacaacaggttcagtacattggctcagttctttgacaagaaaagttgagaggactttattgaactgcccagtaaatgataaactcgggcctgtaggtgcccagcatcagagttgcaaggaatgtggggacttctaggccatgaggcccatccagtgcctcgtcaggccgccccttcctctctaggggcttggagctcatcacaggaaatagctcgagtttgaggcagcacttctgaatgcagaagagattcatctgtgttaaagctgaaatgtcaaaaggtatcagattttttttatgaaaacgaagagagatgtttaaagtttatttttcagcaggtgaggtggctcacgcctataatcccagcactttgggaggccaaggcgggtgaatcacctgaggtcaggagttcgaaaccagccttcccaacatggtgaaaccccatctctactaaaaatacaaaaattagccaggcatggtagcgcacacctgtaattccagctactcgggaggctaaggcaggggaatcgcttgaacctgggaggtggaggctacagtgagctgagatcgtgccattgcgctccagcctaggtgacagagcaagactccatctcaaaaaaataaaaaaataaagtttgtttttctataaaaagtcataacaaagtattagtatgactttttgaataagttaatttctgccagtgtttaattattttattaaagaaaaggatgttacactgaatccttaaagaataaaagtgatttgacctctgctttgagaagacagcctgt

SEQ ID NO: 12877 - DNA, 1109 bp, Homo sapiens
cttggaattcagggagatctttttcctcctggtggtcatcaggttttggccgtgggtggtgacactgtcccagggcctccctgggtttttctcactttactggtggtctgtgaggcaagggaaactggcaggcctggagtggagccctcgcaggctcttggtaccctggctgtcaagctgtgtgtttggctgccctgtttagccagggtttcaggaggtttctgtgcctgtggggtgcaggtcagactccaggtcccctttgtgccttcctggagtggctcacttttttcttttctgcgtcctgggggcccatgctagatgtctgctgtgcaggaaaacctggttcctggagggactgtgtgcacctctgggtgtgtgatgtcgtcagggtgccgcagtgctgactgccaggcaggggcagcagcctttgctcagtctgtaacattgactcccaaacaggcccaccttggcccccgtccagctgaccaacttcttcgggacacttgactccgtgctgaggtaccgggccactgtcatacaggcctttagggacatgaacagattcaccgtaaatgagacagtgctttccaccaaggacgtccttgtcctcttgcacaagtggagcctcattgaaagagacctcaagctccaggaagacctgagagcagccattgagaaggcccaagcccgggagctcatgagtgagtgtcagaacccaggactggcccagagtagccaacatgtctctctcaccctgtccgtccctccctctctctctgtctctcagccacatttccaaagctaatgaggctcagagatgggacacatccatcttggagccctggatggggagctgggcagcctttgagtttcagcccagctgcttactagctccctgtctttggagaagtcacttcacctaccttagtatcatggtgctcacctgtaaagaggctgggggtagctatgagctacttgccccaacctcctcctgtagtgcagggttaaggaaaagactggaacctggcctcctggactgaagctctgatgctgtcctgattccctgtgtttaaagaggacagtaatggcttctacctcatggtgtgagg

SEQ ID NO: 12878 - DNA, 1339 bp, Homo sapiens
actgctattaataagtcgaagacagccattagccacatcactggtatgggtagtagaaaaactaaaagggctccaccattcaattcaggcaagagtagacagagtagaggctttggtagcacagtcatggggaaaacatgcctggattgaaaatctgtattggcttaacatttgggagggggaatgcgcagggactgaattcagccttgtcaaaggcctaggaagaaaggtgactgtggagatgtcttaattgaaaaacacgtggggggctgggcgcggtggctcatgcctctgatcccagcactttgggatgccaaggaggattgcttgagctaaggagttcagcctgggcaacatagcacgacctcatctcaaaaaaaaaaagaaaaaaagaaaagaaaataataataacaaaaaaataagcggggaagggattagatggcagtccaaacaccagtattattcagaggaggagatttccagcatttcaatgttgcctggaaggctctctcctcttctggtattcagtgtgtctgccccaccatgccatgtgtttcagggttgttttcttgcagaagcgctggtggacctgatgctgacggtggtggagatgtgcccctctgtctgtgagagcagccactttgcagtgcttctcggggcctatggcgccactctcagcgtcctaggtgagggtgtgagggctgggtagtgtgagcagggggagggagtgagggccgggggtgtgagcagagatagggaatgagagctggagggatgtgagcaggaggagacagtgagaccaggcggtgcaagcagggtgaagatatgaggaccgggccatttgagcagggagggtatgagggcaggtggtgggagcagcaggagggtgtcaggggttcatcttcctaaaccgatcctgctttgacttgtagatcagaagattttacttctgcttcgagcgtatgagcagaacaagctcagcctcatcaacttcaggtgagtgttgggctagaggtagactaggccttgaggtcacagcctgctctccacacagtgagctccagactcgagattttctctcattccattttggttctcagggaaagagtgaggcaggcagcactcccctgactcacactggcttctgcatagggtgctctggggaagcttggccttatgccataaggcatctgggcagggccactgcagctgactgatgggtgcctgtctgtctggaattgcccctgttgtgcactgtcagctggactggggtgtctcatttggttgatttttctgaaaacttttctgctcatgcctttaggtagattgacttatgcca

SEQ ID NO: 12879 - DNA, 1113 bp, Homo sapiens
aggagtagcagggtgctgtactcagggtgtttgggtctccagcccttcttctccctcccaggatgggagatctggactgcccctggaacgtgactgccgggacgatttaggaggagagtgcaggtggcggtcaccctgtatgtggtcagcctggtctgtgtggggcgctctattgctgctgtggtggagcagcatgagagtggagatgtggtctctgcataatgcagcggacagatttttttttttcctacttgttaccaggcactaggttcaggatatcttgctgctgccagggccagtagtttcttcaaattcccgtgggccatttcagctgtctggccttttattcagtgacagttggtaccatttacactgttgaagggggctggaacatactacagtttaatgtttctgctgggaagtttggctgtacacatcaaaacttttaaggtgcttatgcatgggtttggatttatgatgggcccgtccccctggacctctcatagtaccccatgccagagcaaactgtagccctgaaccattgcctggcctctgttcccgtaggctgctggcactgaagtgggttgcacaatagataaagaaaaaagataaaaaaacttttaagatacttgatcctgcaattccatgtctagtcatttatcccagtgaaataattaaagatgtgagtagaggttttgttagggaataatatttatattagctggaaatgggtcttctaactatccaccagtaagggattggctgagcaaattggggactggtcataagatggaatgcagcgattaaaaatactctggaggctggccgtcgtggctcacacctgtaatcccagcattttgggagttggaggctggaggattgcttgagcccgggagttcttgagaccatcctggacaacatagtgagattctgtctctaccaaaacaaacaaacaaacaaacaaacaaaacaaaagttagctgggtgtgttggcgtgtacctgttgtctcagctacttgggaagctgaggtgggagaattgcttgagcctgggatgtcaaggctgcagtaagtggagattgcgccactgcactctagcctggaggacagaggg

SEQ ID NO: 12880 - DNA, 1225 bp, Homo sapiens
ctgtgagcctaagtgcagccgtgctagctgcgcaccgtggctaaggatgacgtctgtgttcctgtccatcactgatgctgctggctactgcatgtgccacacctgtctgttcgccattcctaacattctgtttcattcttcctcgggagatatttcaaacatttggtcttttcttttaacactgagggtaggcccttaggaaatttatttaggaaagtctgaacacgttatcacttggttttctggaaagtagcttaccctagaaaacagctgcaaatgccagaaagatgatccctaaaaatgttgagggacttctgttcattcatcccgagaacattggcttccacatcacagtatctacccttacatggtttaggattaaagccaggcaatcttttactatgcattaagacctctgattcaaaacttattagaacagtagcttctgctggaatttgcaatcactgaagtcatagaaaataggtaactatctaattagagaaataattgttgtattttaagatctgagagtgtgtacaagttttagtatacatgccatgccagaagatagtgtatgcaagaagtcttgggaccagaaaatggcaatgataggagactgacatagaagaagaatgcttccctaggaaaaaggtcgctggctttggtgcaagaggaagaagaatgttccactggaagcctgagcacctaatcagctctcagtgatcaacccactcttgttatgggtggtctctgtcactttgaatgccaggctggcttctcgtctagcagtattcagataccccttctgctcagcctgcttggcgttaaaatacaaatcattgaactgagggggaaaaatgtaactaggaagaaaaacccaatttaagaaattacataatgctttccaaaggcacctacaacttagttttaaattacttgctactggggattacccatggatatccttaataggcaggaagtctgggaattctggtggcctctagggcagtgttctcacagcaccgttccgacagggaccagtgaaagaaaagagacaaagttagaacgtgctggggagcggccatttctaaggccagtctggtttaagtagtcatttctgctgaaaaaacagatgatcctggtggaagaaaaggttgaaggcagctgccctcgggagggctgtgatgctcggcacatcctgcctggcacatacacgtgtctgcag

SEQ ID NO: 12881 - DNA, 1139 bp, Homo sapiens
catgatgtcagcttatgaacgctccatgatgtccccaatggctgatcgatctatgatgtccatgggtgctgaccggtctatgatgtcgtcatactctgctgctgaccggtctatgatgtcatcgtactctgcagctgaccgatctatgatgtcatcttatactgctgatcgttcaatgatgtctatggctgctgattcttacaccgattcttacactgacacatatacagaggcatatatggtgccacctttgcctcctgaagagcccccaacaatgccaccgttgccacctgaggagccaccaatgacaccaccattgcctcctgaggaaccaccagagggtccagcattgcccactgagcagtcagcattaacagctgaaaatacttggcctacagaggtgccatcatcaccatctgaagagtctgtatcgcagcctgagcctcctgtgagtcaaagtgagatttcggagccttcagcagtgcctactgattattcagtgtcagcatcagatccctcagttttagtatcagaggctgctgtgactgttccagaaccaccaccagagccagaatcttcaattacgttaacacctgtagagtctgcagtagtagcagaagaacatgaagttgttccagagagaccagtgacttgtatggtatctgaaactcccgccatgtcagctgaaccaactgtgttagcatcagagcctcctgttatgtcagagacagcagaaacatttgattccatgagagcctcaggacatgttgcctcagaagtatctacatccttgttggttccagcagtaactactccagtgctggcagagagcattctggagccgccagccatggctgccccagagtcttcagctatggctgtcctggagtcttcggctgtgaccgtcctggagtcttcgactgtgactgtcctggagtcttcgactgtaactgtcctggagccttcggttgtgactgtcccggagcctcctgttgtggctgagccagactatgttaccattcctgtgccagttgtttctgcgctggagccttctgtgcctgttctggaaccagcggtgtcagtccttcaaccttctatgattgtttcagaaccatctgtttctgtccaggaatcgactg

SEQ ID NO: 12882 - DNA, 1127 bp, Homo sapiens
gctccagagattggcatgcaggagattgcattgcattcaggtgaagaaccacatgctgaggaacacctgaaaggtgacttttacgaaagtgaacatggtataaatatagaccttaatataaataatcatttaattgctaaagagatggaacataatacagtgtgtgctgctggtactagtcctgttggggaaattggtgaagagaaaattttgcccaccagtgagactaaacagcgcacagtattggatacctaccctggtgttagtgaagctgatgcaggagaaactctatcttctactggtccttttgctctggaacctgatgcaacaggaactagtaagggtattgaatttaccacagcatctactctcagtttagttaataaatatgatgttgatttatctttaactactcaagatactgaacatgacatggtaatttccaccagtcctagtggtggtagtgaagctgacattgaagggcctttgcctgctaaagatattcatcttgatttaccatctaataataaccttgttagtaaggatacagaagaaccattacctgtaaaagagagtgaccagacattagcagctctgctcagccctaaagaaagtagtggaggagaaaaagaagtacctccccctcctaaagagacactgcctgattcaggattttctgccaatattgaggatattaatgaagcagatttagtgagaccgttacttcctaaggacatggaacgtcttacaagccttagagctggcattgaaggacctttacttgcaagtgatgttggacgtgacagatctgctgccagcccggttgtaagtagtatgccagaaagagcttcagagtcttcttcagaggaaaaagatgattatgaaatttttgtaaaagttaaggacactcacgaaaaaagcaagaaaaataagaaccgtgataagggggagaaagagaagaaaagagactcttcattaagatctcgaagtaagcgttccaaatcttctgaacacaaatcacgcaagcgtaccagtgaatctcgttctagggcaagaaagagatcatctaagtccaagtctcatcgctctcagacacgttcacggtcacgttcaagacgcaggaggag

SEQ ID NO: 12883 - DNA, 1189 bp, Homo sapiens
ggctggcaccgagtggccaaaacccgaaatacagatgtggcagcggcagaagctctgtttagcaggccattatccgggatggctaagctccgctagctaaaagttacttcccattacttttgctttccagttttagaagccaaactgactgaggagtgggacggttcgtttgaatggaggaggtgttgagtgagcaacacgcagaagctcgcctacagtttcgtttccattcacgacgcgttcactgatcgccacgagtatactgcatatacgcaaagacacagacaatcttcagaaatgatcttttgccaccggagcttggaaattaataagaatagctggccattgcctgaaaggaacttctttcgcatcaacatttcgggttttggctgtttggtaccagccattggcgataatggccggccattatcagttcttcctgcggttcgggttttggcagtaacatatatattttaaacacacttatttttgtttttaaaagtttgatcttttcaattgaggcttttttggggctttgttttattactatttttttggtgtgggtggatggggggagatgctaaaatattgctgctaggatccagaaataccacactgtttcatatattggaacttgttattggctagccttatgccagcctgccactgtcaatatattctgttccccttggttacaagcttaatatactcttgtgtttttggcgaaatgagctttttatcctattgtaatattttcaattgataatagatgtcattaaatctactgcttgtatagagacaggtgtacccaaatttactcttgacctttttataaagccaggtaatggagtctgttcctttgcatctcaggaaggaattgactttgctttatgtatcagacctcatcaattgcaccctctccatcatgccttattttcctaagttctccttaaagaaactcaacccacaaaacatttatggagagacatgttgctatctaatcctgttgcaaatatttcagatcttttgttttgccatacatctgggaaaatgtaaagcttctgaatctgtttcctcacttagatttattacaatatgaattacaactttttttaaaaaattaaggaccttgtaaacgcttctattgcttatttacctaatccaagctccttatccaaaatgctaagga

SEQ ID NO: 12884 - DNA, 1674 bp, Homo sapiens
tatgtttttcttgaataggtattgagaaatggagcccttaccagacccaattgtatgtttttcttgaataggtattgataaatggaagcgcttaccagcccagctttgccagccctaataagaagcatgctaaagccacagcagctactgtggttcttcaagcaatgggccttgtaccaaaggacctcatggctaatgccacttgcttcaggagtgcctcacgtagatagattgaggttttataataatcatttcagaattttactctgcatcacaatgtatttcctctttaatgttgtaaatatttggcaatttaagacattgtgtaaaaagcaatctgtaaaaacatctccaggctttgatttttgtaccatggaaattgtatttaaccatacagggttttggtatgtttatattgtttaccttagtgatgtatttgtttaagtggctaacatccaaacgactgtttgaaggcatcagagtaatcttcagtgtggaatgttaaataacgcttttatactgtattttgtactatgatgtaactccccttccttatggctaggctactgtaacacttgcctgtaatcagtgaagggctgtgcaccttgtactatttcacaatgggttctgctggacagataatgggccagtgttattgaggtgatcaagatctgttccacagggctaatgccaccatctcccctcaaaattttgtagaggttctaaaaagaaagtggtatgttgtgtgatgatcagcactaagtcctgcattcctgttaaagccacttgggtcataagaagggagtaaaaaatgaagtctgactagaattctattgcagaggccagtacatttagtatggcattgagttgtgatatagttttactttgatgtgcattttgaatttcagctacacctagatagacgtaaaatgataattaaaatgctgtaaccaacttatctaataaaattggcaaccagccactattttgttgactatgagaaagttaaaagtttatgttaatttttagggtctgatagaatatttcatgtgtattacagtggtattcatatgctatgtctctaaactttattttcaaaagcttaaggcccaaatacaaacttctctggaataaacgtggtgttttattttctgggttataaagtgaacaaatacttagatactattatttctttacccaatgcttttgatttttaagcacttttattttaaaaatgtgaattatacagtccccccctacacacacacacacacacacacacacacacacacacacacacacacacacacacacacacacacacacacacacacacacacacacacacacacacacccctataagcacattaaatactactttgccgtgacagctcagtgtacttcacaattcttaacactattctatgtggaatacaaaatgcctttttatctgaattaacatgcatttaaaaagttttagtatatgtgaaaataaaggaattataaatcagtaggaaagatattaaggtagaagcatcaccaatcaactagctcagtagatgttgtctgtatttattttctacctttatgaaacaagaacctgctaacaggtaaatcgtaaagtaacatatttttgccctgatgccattagtcacaatgccatggggtaact

SEQ ID NO: 12885 - DNA, 1350 bp, Homo sapiens
cttataaccattaatattttgggattttgtcactacaaaaattcttagcatcaacttctattaataggatgaatcacattaatcagccatttatttgtcagtctccatagtaattatttaactcttctgtgtttaaagactaatgtgctttttactgacttgtacacacatttccacaggaggttgttcataaggagcttactaactgtggtttgcaccctaacactctggagcaacttagtcaaataccgttacttgggaaatcatctttacggaatgtggtgctgagagactacatttataattggagatcctgaacaccaaagtaagcctaaaaggaatctttgaggaaaaaagccttctagcaaggaaattcaagattcttgaagttgaaggaatatactgaaatgtttataaacataacttttactacagtagcatctaaggttttaaatgtgttttactattttcagattagatttttagatataaagatgaaaaactcagataactcaaatgagatatctatatccctacaacctaattgtatattgagcagaaactgaattaatatgcttccttgcaaatgggaaatcacatagcagttaccccatggcattgtgactaatggcatcagggcaaaaatatgttactttacgatttacctgttagcaggttcttgtttcataaaggtagaaaataaatacagacaacatctactgagctagttgattggtgatgcttctaccttaatatctttcctactgatttataattcctttattttcacatatactaaaactttttaaatgcatgttaattcagataaaaaggcattttgtattccacatagaatagtgttaagaattgtgaagtacactgagctgtcacggcaaagtagtatttaatgtgcttataggggtgtgtgtgtgtgtgtgtgtgtgtgtgtgtgtgtgtgtgtgtgtgtgtgtgtgtgtgtgtgtgtgtgtgtgtgtgtgtgtgtgtgtgtgtgtgtgtgtagggggggactgtataattcacatttttaaaataaaagtgcttaaaaatcaaaagcattgggtaaagaaataatagtatctaagtatttgttcactttataacccagaaaataaaacaccacgtttattccagagaagtttgtatttgggccttaagcttttgaaaataaagtttagagacatagcatatgaataccactgtaatacacatgaaatattctatcagaccctaaaaattaacataaacttttaactttctcatagtcaacaaaatagtggctggttgccaattttattagataagttggttacagcattttaattatcattt

SEQ ID NO: 12886 - DNA, 1254 bp, Homo sapiens
aacttttaaagctacctcataatagctcttaaaaacacatttaaaacacttagaggtgatcctttttcctagccatcagtgggacaaattaattcctttttgagtaaaaaaaaaaaaaaaaaaaaaattctctttttttagtactcaagatcagcaagtattggttgactcattctttgttgttaaacctcttggtttctcaggccagtgtgtctttttgtatactttgaccttgcactttaaactgaattccttttgtcctttgagggaggcataaagctgtcagttcctgttggtgagtgtgggaaattgagttttcactcttctctataatttctgcatttcaagtggttttaataataatcataactatttctcaattttacttcttaaaaaagtagattcatcagactgaattgaatatttgttttccttctaaagctgaagccaattttgccatacttgtttgtgcattcttaagagtttagtacttaagcatagaaaactgtggggttcacatttatattttgctttattacaacttagaaggtaattgatgacttggctctgtggtatgctcaaagtgctggactgagctagttcaagaatgtcattagcagtgaatgggaaatatgtgtctacttttcttcagtagctaaacagaagtaattatatatttacattctacctatttcatagggatgttgttagaattactgtgattagatttttttttttaatttccaaatgtatttaagcttctttacagataggtgccatatcaaagcaaggtgttaatgtcatttttctcaatttgtgtttttgtcactagaaatatatatatattgctttttctcttttcctggtatatttttctgataaatgttttgaaatttgttatcttaagtttttcatagctggaatgctagaaaagcatttatgtcctatttttagtgcaagtgatgagtctggctgggtgggtaagttaatggcaaggtaattgaactgtgctgagtgctcgccgatgtatccttctggcctctccattttcagggtagagttactgtttacagtgacatgtttcacagtctgtgtgaccagccagtgtgaatcagttcgtctattgcctggctttcttgagctcaatttttgtctcatttcccctttccattttatatatcacatttcaagatggatgatctacttgtctaaccactccagggaagattggtgccatctaataaagtcaaaatg

SEQ ID NO: 12887 - DNA, 1233 bp, Homo sapiens
tgttccagaacccctgcgagcagccgttggccgcacagcccccgggccggccgcgaccccgccttgcgccgcgaaggtccctagctccggggagtcgcgggcgaggggcacgcgcacggacgagaccgcaccgcagcgcacgcgcactggcgggcactcactcgcccgccgcccgggaggagaaggaaggcatggaaagttccagccggttcgagagctaggtagcaggcatggcaggaggcggggtaggggcaggcagggtcgcgagggggcgtgcggccgccgcgagccgctctgggccgcgtctgcagcaccgcccctagccgcggccggcgggctgggctggggtcggggcgggggcggtgcggcgggtgcggggctgcggagggggcgtggcggccgcccgcgggcggagagggggcggggcggcggcaaggcgcgcgggcggggcggggcgcgccgagggggcgtggcgcggcgtctgcgcagctgccagcgcctttaagcccgggctcgcgctctcggaccgtgctttcgccgcctgggagccgtccggcgcagcagtttctaggtccccactgtccccgccgtcccgccccttcgcgtcccgggaaccggctggcttccgagccgcactcgccgatcctccaggcatgccccgctacgagctggctttaatcctgaaagccatgcagcgggtaagtgaccttccctcagagccggtcttcccgcgcgggcgcccccgctgccgctaggccgccgtcccccgcgcgccctggccgcgggaccccgggccttcctgcactcctcggaggaggccggggcggcgggcgggcggcgggcgtccgcgggaagggggcgcgcgtgggccggccgggcccggccgcgtgcgcgcgggaggcgggggtgtgcctgcgcgtgtgcgcggtccgggagggtgtgcctcgcaagcggcccgccgggcggggggcggggcggaccgagcgggccccgaccccgatcccggcgccggcccgcgggagtccagtggaaggtccgcgggaggacacgcgcgggcgcccagcccgactccggcccgtccccgccagtcgtgaagctgcctcgtcgccggccccgccgccgccgcctggtccgtcccgctccgccgcccgccggctgccgccgaccgcctccgctctagcgcccgccggccgcccggaacgtccgcgcccaataaagcgttcctccaaagct

SEQ ID NO: 12888 - DNA, 1233 bp, Homo sapiens; identical to SEQ ID NO: 12887

SEQ ID NO: 12889 - DNA, 1067 bp, Homo sapiens
cacaaatgatgatatgcagatcagtgacatttccctgcaggattccattgcagtgaaggagaagtatgccaagtacctgcctcacaatgcagggccttatgctgccaaacgcttctgcaaagctcagtgccccattgtggagtccctcactaactccatgataatgcatggccacaacaacagcaagaagctcatgactgtgcgcatcatcaagtatgccttccatttcatccacctgctcacaggcgagaaccctcacctccaggtcctggtgaacaccatcatcaatggtggtccccaggaggactccacaggctttgggtgagcagggactgtgagatgacaggctgtggacgtgtccccactgcaccatgtgaatcagaccacctggttgctgtgcacaggcactcttgagggtgccctccgggagatcatgaccattgctgagtgcctggcagatgagctcatcactgccaccaagggctcctccaactcctttgccatcaagaagaaggatgagctggcatgtgtggccaagtccaaccgctgattttcccagctgatgcccaataaaccagtctgccctttggggtaaccccacgccaccacaaaaaaaaaaaaaaaaaaaaaaaaaaccggctctcatatacattgctggtatagtttggcactttcctaaacatacacctacagttatgatctagccattccactgctaggtatttaccccaaagaaattaaagcatgtgtccacacaacaacttgtacacaaatgttcacagcagctgtacctataacaaccccaaactggaaaaaaacaaatattcactacatacaatgccatactactcagcaatgaaaaggagtgaactattgatacacactattgatctcaaaataattatgctgagtgaaagaaactagagtaaaaggggtccaataccatccaattctatgtaagtctaaaaaaaaagatgttcctcaacttacaatatacgcatttcgataaacccgtaaattgaaaatattttatgttgaaaacgcatttaatacaccacctaacctaa

SEQ ID NO: 12890 - DNA, 1163 bp, Homo sapiens
catgcctttcttaatcttttcccatgtttgtgggctcatggttctcttaggtgtgttagttcacagggaaaatcctttgaaaagttagaagagtatctaatagatgttttcacacacacacacaacattaatgaatagtttggaaaattcagtctcgtcaatggattagaagttttcccccatgctttctagtacttcacaccatctgtaatgtcacagtgtgtttttgctgccataaagctggtttggattcatattttcacaagagtgtaatgggaaagaccatagaaaaagggagattgggcttaacactgcaattctgtttagctggtcagctggtagtttctattttgacaaggttatgtgtgtgtatgtgtgtgtttgtgtgtagttgatgtctgtctaggaagagtaaaatggaaacactgaccaaaatagtagaattattacaattcaaatgcagacactcacaagtttttattttattgcaggtatttcttggtggatttttatgcacccaccgcagctgttgaaagcatggtggagcacttgtctcgagatatagatgtgattagagggaatattgtcaaacaccctctgacccaggaactaaaagaatgtgaagggattgtcccagtcccactcgcagaaaaattatattccacaaagaagaggaagaagtgagaagattcgccagattttagccttatatgtaattccttcacatttgggcagcatggacgagaaggaagaatttgcaagtttggcctttatataagcatgtgttgcaggtgctgtttgatttttctaaggtatttttagcccttgatcccctttgcttgcgagaggtggggaactgctcactgacagcttctctgtaacctgcagtaccagtggatcgttcttgattttgttttcattagtgtcatttctttgtcattgaggacttttccccttacaacagtaacaccattttttgaagagcaaaacttataatacctcctgggattgtgagctagtcattcagcctgtgtaaccatgtggaaataaaaattgacgaccaatgtattatatggacaacttttgctttgagtaataaacttgattgtaggaatgtgggaggtgttttgtccctttacttacccagtgcagtgcacttccag

SEQ ID NO: 12891 - DNA, 1456 bp, Homo sapiens
tatgtctggctgtgtctctcagcccaatcgaatggtcacgagcagctggcccagcagagccctgaatgctcttttatgtttgccttttgactcccaaggacttgtctgagtgaccctgcgattattttccctccttaggggaaaagtatgaattgcacgcagcgactgacaccactcccagcgtggtggtccatgtatgtgagagtgatcaagagaaggaggaagaagaggaaatggaaagaatgaggagacctaagccaaaaattatccagaccaggaggccggagtacacgccgatccacctcagctgaactggcacgcgacgaggacgcattccaaatcatactcacgggaggaatcttttactgtggaggtggctggtcacgacttcttcggaggtggcagccgagatcggggtggcagaaatcccagttcatgttgctcagaagagaatcaaggccgtgtccccttgttctaatgctgcacaccagttactgttcatggcacccgggaatgacttgggccaatcactgagtttgtggtgatcgcacaaggacatttgggactgtcttgagaaaacagataatgatagtgttttgtacttgttcttttctggtaggttctgtctgtgccaagggcaggttgatcagtgagctcaggagagagcttcctgtttctaagtggcctgcaggggccactctctactggtaggaagaggtaccacaggaagccgcctagtgcagagaggttgtgaaaacagcagcaatgcaatgtggaaattgtagcgtttcctttcttccctcatgttctcatgtttgtgcatgtatattactgatttacaagactaacctttgttcgtatataaagttacaccgttgttgttttacatcttttgggaagccaggaaagcgtttggaaaacgtatcacctttcccagattctcggattctcgactctttgcaacagcacttgcttgcggaactcttcctggaatgcattcactcagcatccccaaccgtgcaacgtgtaacttgtgcttttgcaaaagaagttgatctgaaattcctctgtagaatttagcttatacaattcagagaatagcagtttcactgccaacttttagtgggtgagaaattttagtttaggtgtttgggatcggacctcagtttctgttgtttcttttatgtggtggtttctatacatgaatcatagccaaaaacttttttggaaactgttggttgagatagttggttcttttaccccacgaagacatcaagatacacttgtaaataaagctgatagcatatattcatacctgttgtacacttgggtgaaaagtatggcagtgggagactaagatgtattaacctacctgtgaatcatatgttgtaggaaaagctgttcccatgtctaacaggacttgaattcaaagcatgtcaagtggatagtagatctg

SEQ ID NO: 12892 - DNA, 1205 bp, Homo sapiens
aagaaatatcaaatgtatcagaaagtaatgatgctataggaaaaaataagacttggagggcaggaggagggagtggagatctgggagtggaggggagattgctattttccataagatgatcagggaaggtcttactgatatggtgatattttgagcagagacaatgtagcattggttcattcaggctttgctgtctattgagtgcttactgtgttccagccactggtttaggcccagaggataaagcagggaacatttcaagctccttgctttcatggagcttaggatccagtggttgagggggagatagacaataggaaaaaggcaagtgaacaagatcatttcggatagtgataaatgcgatgaagagactgaaacagggatagagagcaaggggagggggcttggtcagagtggtcaggtcctaacactgtgggggttttgttgaagagctggtgaattggggcagtcctgagggaactaacaagggatgtccaggcctgcagccatgagcaacagctggaagctggagctgggggaggaagtcacgtggctggaaacctaggggaggagctgcctgccaggagctgtagacttgaaggtgtggagttgagatgctaaggcagggtacaggcagggaagaaattctcaggcttctgatttcattggcagaactcaaaggacagctaggaggcaagggagcccctgcagtggagtccataggttgggtcatcctttcagggcccacagaagggtagataatggctctggggacagtgtggataaaggggacttacacagaggagttagtagggagccactttagatggagtggcccagggaggcctctgcacagcctggaccaggttgacaggaagaagctccctggggaggtgtttgtgtggccggcatcccggcagagggactagcaggtgcagaagctccagtgcagggtgaactccatttttaaaggacttgaagggttgcatgagagacagagaggcgattggtagctgaggttggataagcaaccagaaaacatccccctggggccatggtaaggattcaggtgtgattctaattgcacatcttggtggagaatggctttcaggagggaaactgggtaggctagagaggaagcaaggagacctggtaggaggctgttgccatcatccaggggagataggaagggagtgggactagga

SEQ ID NO: 12893 - DNA, 1118 bp, Homo sapiens
aaatcaagagtcaggaaaagtaggagaagcttttaagttttagttttgtgttgaatcttttttttttgaggtgggggggtctccctctgtcccccacactggagtgcagtggtgtgatctcggctcactgcagcctccgcctccatacttgacagaaaaatcagaaaatgtacctttttgtacatatatacattttttaaaattaaaatgtgatcataccatacgtgctgttttgtaatctttttcacttagtaataaatatatcagcatctatatagatcagttgattgtattctgcaagtcatttttactggctgcggtatattgagcttatttttaatgaaaaataaccaaatcagaataacatacagctttatagcctattttattgaagagttaattgatcttttatcaagttaataggagagcttctgtgtaaatccatgtctaagtaatggtgagcaaacctgtagatactaacttcttgttatgttattttccaggcttattgcagtatattatatctaaagccaagaatgcagatcatcctacgtggacagaaagtgaagacacagctggtttcgaagagtcttgcctacatcgaacgtgatgtttatcgaccaaaatttttagtatcctttttctgattccttatagagatatgttagtcaggtgtattctcttttgcccctttccccttatatgctgatagggattctagtctgctctagctttgccctcctttgtgtgcttttggacttaccaaataatgaaatagaaaggatgatttgaactgagtgaggtgttgtgttcaaaatttaccttaatattttaagtctaaaacagtgagaattacctttggattcaactgcagaaataaagatcattatgggataatgatgtatcacagaaatagactcatcaaagcttatgaaaaagttggatgtcagttaagggtaagctttattttttatttgaaaagaaaatgtctattttccacaaaagttaggataatatatgctcttgagtcaaatgttaaataattttattgtaccttttgcctatagctttttaatgtaaatttgtaaaaaataacactgtggtatttgaacttttat

SEQ ID NO: 12894 - DNA, 1415 bp, Homo sapiens
tgtgggcctgtgcttccagctactcaggaggctgaggtgggagaattgcgtgaaccctggagagcagtggtgccatcgcagctcactgcagccttgacctcctgggctcaggtgatcccccacctcaccctcttgagaagctgagactacaggtgtcgtcaccaagcccggctaatattttgtgtttttagtagagtcagggtttcaccatgttggccaggctggtctcgaactcctgggctccagcgatctccctcctcggcttcacaaatgctgggaatacaggcatgggcaagtgcacctgactcataaaagtgaattattaaagtaaattgagttctctaggggaggttttgcttttccttttgtttaattgtatattattctacggagatttgattttgatattttactttttaaggtctacatgaatcttaacttgtaatgctcatctaataagttacatatttgtatttgcagcctcaaactccgatctcttcgagttaacgtaggacaactgctggctatgattgtgcctgatcttgatcttcagcaagtgaattacgatgttgatgtagttgatgagattttaggacaagttgttgaacaaatgagtgaaatcagtagtacttaaagtatatgttatgtaagataaaatatttgctcaattcttttggttgtacagctttcaaaatataattaattttgttttatagatatgataggcaacagactgaaaaccataatctttactgtattctatgcattcaaatgtggtcacaaatattgtggacacattatcttatgttttgaaatacctgtgaattgttggcattgagcagctgaagctaactcatgactctgttttgaatgtaaatatttgtaattaagcctgcacatatttttttattgccctagagtactcaagtgtttttcaccaagagcttttcaggttgcccctaagctttgtgcaattttttctggttccccaaagtgtatttttctctaagtcgagggctatgccataatacaaatggaaatgttacctttgattttcttataaaggagtttaaataggatttttaaataatgtagtaacactcctgatacaactctggttataagtgaattgagcattaatgtttcttttgtataaattcctgtcctgaaatattttattcatgaaaataaggtaagcaaaaaccaactccattttgccaggattttgttgtgctgagattgccaatcacggttaaacacaaagtgtttttatagaatgaagaaacagtctttaacagaaaaaaggtattgaaatattaaatggccaccaagtttactttgaagcccatttttggctgtttagtcagcatgaagtgggcatgataattttttaatatttctttttgtgaaatttc

SEQ ID NO: 12895 - DNA, 1268 bp, Homo sapiens
cactacaacctccgcctcctgggttcaagcaattctcctgcctcagcctcccgaatagctgggattacaggcgcccaccaccatggctggctaatttttttgtatttgtagtagagacagggtttcaccatgttggccaggctggtcttgaactcctgacctcaaatgatacacctgccttggcctcccaaagtgctgggattacaggcgtgagccaccgcacccggcctattcaagtgaaaattgctagtagcacagataggttgcagcgacttagcaaatcgcgatgaaactgcatgagtgagtcgctatcacacactcttttccagttgtatcttttccctggtttttgccttcaaacaagcttgtgattttgctcgaacttccctcttctaagtagatgtgagagtgttggtaaggtctgtaacttttccctgttttggggacgaaggtccagcgatggtgccttcctggccatttcttccacggacggttactgctcatttgtgacatttgagaaagatgaacttggaattcctttgaaagagaagccagttttgaacatgagaactcctgatacagcaaagaaaaccaagagtcagacacatcgagggtcttcgccaggacccagaccggtagagggaacccctgccagcagaacccaagaccccagcagccccggcacgactccccctcaggccagacaggccccagccccaacagtcatcagggaccctccctccatcactcctgctgtcaaaagccccttgccggggccttcggaggagaagaccctgcagcccagtagtcaaaacacaaaagcccacccatcccggagggtcactctgaacacactgcaagcctggagcaagacaacaccccggtaagaacttgttggaacaagatgtcattgcaaaatgaaacacaaaatgcagacagaacgctcccaccctgctgcaggtgaaatttcaggcggtgaatgcttcatgccagtaggttgccagagagattcttaacttcaaatccgagagtgtcatttcttgcatataggcctctgtttgttcctccagtttctgcctgtcagataaagcccaggctcctatgcacacacacagactgtgatttggctgcagcctgtcatccaggactgtggccactctctctcctgagtctgtggccttcatctccggcctagtcctgaatgtcatcttcccagagcactctctgccctttgaggcctctgtccttcccttctctggggaagccct

SEQ ID NO: 12896 - DNA, 1288 bp, Homo sapiens
caagacagaaacacactgagatggataggagaatatgagcagttgataggaaagttctcagtggagtcaggatttaggttaggccaggagattgagaatataacagtttgtgtatgatgaaatggcatatttcacagaatgcagtaaaagcaggtagggtacaagtgcagcaacaggaagatgtcttttcttcattcagcaaacacttatttgagagcttaccatgtgctaggcacatacaaagataaataagatgcccttgatgatcctctatttaaaggagacatgtaaacaggttaacttagagtagagatggtgaatatgtgaacctgaggaaaggaagaaatagattaaattatctggagagagaggaaaagtcagcagaatggggacgagaatctttcggagctcagtgttctgataggagttatttccttgggcataggttccaagtatttttctaatataccatagaagccaggaaaactttcttctgttatctcaaatgatttaattactgacttgagtttgtgttgtctccttagacttgtgcaccatggacaattttgctgagggagatttcactgtggcggattatgccttgttagaagattgccctcacgtggatgattgtgtctttgctgctgaatttatgagcaatgattatgttcgtgtgactcagctttactgtgatggggtggtaagtaggtttgctaatttttcatttttgacattgtgtattgaaggttttctggtttagggctatctgagtaaagatgtttttgtggtacgtgcgttttgacagggaggtacacatgctgttgaaaagttgatttgagaagggaaagtaagcactggctcaaaaataagattgtggagtgccagagaatgagtggtggcaaaaggtggttttctgacagggcataagaaaagctcttggggagagccatagaagcaaactcaggtaatactgtaaaacgggtctcaaattaagactctttggctgaagatgtgtttgaagcatataaataaatgcccactgaaagttctttggttagttctgataatccttagattaaaaatcaagaacattttactagacacaaatcaaaataattttcttctttttagggtgtgcaatataaagattatatccaaagtgagaggaatttgggtgagtacgttggtatttttaatgttaatttatggaaagactacaaagggaggtccatccatcctgtcatagcaatacaacagatttatatgccttttaaaaatgtattcttac

SEQ ID NO: 12897 - DNA, 1181 bp, Homo sapiens
atcactgcactgagtgcccatttgcccagccacatcttcctcttgttctttatctccttattcttctgtttgccacagaccacgtaaaatatgtagttcctttggagaactttaatctataaatttaaccttggggtaaggatggaagtctttgtgtagatgagatctgagaaccctcatccaccttgttatattgcacttgcctgctaccccaggcagtctggccaggttgtagacctcaaattgcaggtctgtagtaattgcagaagcatcttgagctctgagggtggcctgaagtcacctgaagaggtaacatatatgagtccatagtatctgttaatttatatgtcagagtctgtctactctaagttacatgccagagtagcaaaaaataagtggttgtaccagttttgtagtaaggatctgaaatacttgcataagatgaatttataatgccacatgcaaatttagaattaataaccaaagccccattcttcatttctcttttgaaacagaaaatcttggcaatggaagaagctctgaattggataaaatatgcaggcgatgtaacaattctaactaaattaggatcaattgacaattgttggcctatgttaagtattttctttactgaatgtaagtataaatgctttaaattgttacttgactcagtttttaaaggtgtttgggaaaatgagatatgtagttaagtgatttctgatttatcttagaatttaaaaaaagtttttattttgttatatatggctgaaaaagagaatttcttttttttattatttatttatttatttatttatttattttgaggcagattcttgctctgttgcccaggctggagtgcagtggtgcagtctctgctcactgcaagctccgcctcccgggttcacaccattctcctgcctcagcctcccgagtagttgagactatgggcgcctgctaccacgcctggctaatttattgtatttttagtagagacagggtttcaccgtgttcaccaggttgatctcgatctcctgacctcgtggtctgcctgccttggcctcccaaagtgctgggattacaggcgtgggccaccgtgcctggccgaaaaagagaatttcaaactggtagttttattctatattttctgtcttaattatttttatgacattgtactttaaaaa

SEQ ID NO: 12898 - DNA, 1166 bp, Homo sapiens
ctaaaacttctgaaataattaatttatcctgaaagattagaaaatataagttgaaactttaaatgaaaaagagattcaatttaaaaaagaactttggcaagattgatatctaaaagggtaaaaataataatactgtatcttacaacatggttatcactgttctgagcatttaatgtgtattaactcgtaaaaccatcacaactacgtgaggtaggtgctactgcctttttacagatgatgaaacaggtatagggaggccaagcaaagtgtctgaggacactaggtggatgtgatggagccagaatttgaacccaggcagcctggatgtagagtctctactattaatcactatgggaaggtggtgatagaataaaagggaatgtgaaagtcgaaaaaattaaaaaataaatggtctaaatagtcaataaacgtttatgaggaaatgattatccttccaggacatgtagattaaaaactacgagtttctcatttatacccatcagatggacaaaagcttaaaaatctcataataccaagtgtttgagaggatgtggaacaaaggagactctcatattcagctggagaaagtgtaaattggtacaatcactttggagagcaatttgacaaggtgaagatgtgcatactctgcaacccacttctaggctcatatcctctgaactctcaaatgtgtacccaagaagatatgtacatgccttcatgatagcattgtttgtaagagtaaagaaatgaaaacgacctaaatggccatcaataggggaatggataaatatggtatattcatacaatggaattctatatggcagttaaaatgaacgcaatgttgagtgaaaaagcaagtcacagaatgatttgtacactgtgatgccatttattaatgtttaaaaacatgcaaaacaatatgcatatatacagactgtgtattaacaatgtttaaaaatgcatgggcatgttaaacacccggggagtggctggggagagaaggagggaaaagggattggagttgggaggggtggtacacggtgggtgtcaactgtaacaaactactacaaaaagagctgaagtatatggcaacatgttaatttcttgctaaggtggtatgccattggtacatgggtgttcattttgttaatgttctctgtactttt

SEQ ID NO: 12899 - DNA, 1152 bp, Homo sapiens
cccactttgccttagttgtaggatgtggtcatatgccagtaaatgtgaaattttattagtattaatattaattgcattcatatactaattgtgatatttataatatatgctattataacgctgtttgtagtgctatatattataagtaatgttcagcattgattcaacaaatattggggttctgttgatggataatgtcagaaatgagcaaaaacagcctctgtgtttcagacagtgggctggcattgtgagggccttgtagtgggaaggaatttgttgcatttgtggaactgatagttgctagatggcctgaatacagaggagagggtagtatgttcataggctaagccaaggagggccttgtaggctgtgttaaggcttttggcctttaagagcaataagaaagtaaaggattttaaactgaggagagagagcatgattagcacttaaaaaaaaaatttgagcatagtgaaaatggatctgaaggggatgtagtgtggatgtaggttaggaggctgttgcagtagcccaggccagagatgatggcttccagcagaatattgacagtgggaatggaaaagtagaaggattcaagagtttagaggtgaagctgacagaagttgctcgtggttggtgttggaacttgagagtgaaggtggttggaactgttctgacgtttctgccttaagcagcatcatggattatgggcctactcactcacattgggattgctggaagaggaataaatttgtaggaggtagaactggacttcactctcggacactgaatcgaagtgcctttgaaggccaggcatggtgactcacgcctgtaatcccagcactttgggaggccgaggtgggaggatcaccagaggtcaggagttcgagaccagcctggccaacatggtgaaaccctttctctactacaactacaaaaattagctgggcgtggtggtaggtgcttctaatctcagttactcgggaggctgaggcaggagaattgcttgaacgtgggaggcggaggttgcagtgagccaaagtagcgccattgcgctccagcctcggcgacgagcaaaactccgtctcaaaaaaaaaaaaaaaaaaaaagaaagaagtgcctttgaagcatccaaattccaatgttgtgtaggta

SEQ ID NO: 12900 - DNA, 1169 bp, Homo sapiens
tgattaaattagacctaacctgggtcttatggtctagcttccatgctctattcagtgtagcttaactgatgttgtgtgaaagacctggtagtgatacatttggaaagtcttactgacatgcagaaatagtacagaaaaacatacaaataggaatgttattggctgggcatggtggctcacacctgtaatcccagcactttgggaggccaaggcgggtggatcacaaggtcaggagatcgagaccatcgtggctaacatggtgaaaccctgtgcctactaaaaattcaaaaaattagccgggtgtactggcatgtgcctgtaatcctagctacttgggaggctgaggcaggagaatcacttgaacccgggaggcaaaggttgcagtgagccaagatcacgccactgcactccagcctgggcgacagagcgagactctgtctcaaaaaaaacaaaagaatgctatgcataggtacaatgtcgaaatgtgcaagaaatacttcagaaatattaaaagtagttattcctgggtagttgtgattgtgactctgggtgactttttccctttgttttatttttctgtattttccaaatttcctataatggacatatattatatggattttttttaattaaaattatcttttgactagataatatacatggaaaattcacaaagtacacatatgcaagatataatacttttactataaaagagtgaaaatttttaaatacttgtttttccttttagaaatgcactcggtgatggaaagagagccactattctgaagaacacttggccaaaggtaggtttcttctgtattttatattgagcaaataatgccatacaacattgtgaaaaatctgtttatagggtgtgtttgttcataaaaatgctatatgaaattacgtagagctccagaatgtgaaaggggagtcatcagatccatgatcagcgtggggacccagccacagcactgacaggctgtgcgtgaggacaggtggcctgtgggcatcttgagtcttcagggtgccttagtgattgagaggtcatctctgcgtattctgggtgggtgtgcctgaatgtgaaaaatgacttaaaactggggaggaagtataggaggctgtctttataggaggcaggaaaagatttcttaacacacagtgcacaa

SEQ ID NO: 12901 - DNA, 1726 bp, Homo sapiens
aaattttctttatagtatcattgattgcagttaaccttatgtttgttatatttgttgttgaggaaaggttgagatcagtgaaaagtgaaacagtgttttcctttgggagaataaaagtttttttcaaatagacatattcaagtacttccttatagtaactcatgtaaatgtaaattttttccaagttacttctctcagtttttggaggaacatggtcccttggacatgagtaacaagatgttctctgcagaatatgagtttttcccagaagaaactcgacagatactagaaaaagcaggaggtttaaaaccttttctcttgggatgccctcgttttgttgtgattgacaactgtattgcactgaagaaggttgcatcacggctcaagaaaaaaaggaagaagaaaaacattaaaacaaaagtagaagaaatttcaaaagcaggggagtatgtacgagttaaactacaactgaatccagctgctagggaatttaaaccagatgtaaagtctaaaccagtgtcagattcatcttcagcaccagcttttgaaaatgtgaaacccaaacctgtgtctgcaaattctcccaagccagcttgtgaagatgtgaaggccaaaccagtatccgacaattcttctagacaagtttctgaggatgggcaacccaaaggggtctcttctaattctcctaaaccaggctctgaggatgcaaattacaagcgagtctcctgtaattcccccaaaccggttcttgaggatgtgaaaccaacttattgggctcaatcccatttggtcacaggatactgtacgtatcttcctttccagagatttgatatcacccagacaccgccagcatacataaacgtgttaccaggtttgccccagtacaccagcatatatacacccttggccagcctttctcctgaatatcagctaccaagatcagtaccagtggtgccgtcttttgtagccaatgacagagcagataaaaatgctgctgcctattttgagggtcatcatttgaatgctgagaatgttgctggtcaccagattgcctctgaaacacagatccttgagggctctttgggaatatctgtaaagtcacactgcagcacaggtgatgctcatacagtcctgagtgagtctaacagaaatgatgagcactgtggaaattctaacaacaaatgtgaagtaattccagaaagcaccagtgcagtaacaaacattccacacgtgcagatggttgccatacaggtaagagttaaatagaaaagtcttcttaatactgaagttaaattttccttttcatttttcattgccgttatatttgcaagaatccttaaagttgattgactttataatgattactgaagcttttgcctgaaaatacttttaaaatatgaactcttttgtgaggcatgacaggtaatcttctcagaaagaagcttgggtccaataaacaatacccatctttgctactgaaattctacacagattgagaaataagacagcaggtggagccaaaacgtcatcctaagaattaataaaggtgctggaggagaaggtggctgtttgtaggaaagttcaagtgctagctggaagtgtagcctgcatcacagtgccttacctgccagttacaggagggcccacctggaggccttccagcgtggggtgcctgccccataggacttagcgcatgaaggaggaagggaaaatgtgctggcagctc

SEQ ID NO: 12902 - DNA, 1485 bp, Homo sapiens
atgttaaaatattggctgatttagaccaaaagattcaaatctcctctttgtgaaatcccatctgcatttgattttttattattttatgttcccccgttagattgttttaagtgtttgcttttcatcttttatagatgtaatctgattttcaaaaatcattaacactttttaattagtatcgactaagactttttccccctggaatcgaggctgtgtgtccgtcatcccagcccccggttggagcctgctctttgaactccgctgccttccttagcagcttctgtcctcttctgtgagtcagtcagcgagtgcttgggatccgcatccagccgtgctgagcacacaacaggctgtgtgtggaaatggccaccaccattctccttccccaccccaccacaaaaagagaagctgtgtctttagacaaccctgaggtatctgtgttacaatcgttctgtgtttgatatttgtgtaaagtatgcatgcagtcttgtactgtgacctaagaacaaaactgtaactgcattagaaaccatgaaaaaattagatattgttttgtgacttttagacagtggtaaatatagaaccatgaattctggtcacattccatttctctccaacatgaaggatcaaaaaatgtttttcaatgtgttctttgttccactggaaacttagagtcatgagtttatgagctgatttggtcaccttcctctgcctttgttcactgtgagttctgatgtcttagtgacttagttcttagaagctcacgccttagtttgaaacagattctccacggtggtccccaaaacactgtctgcatatccataagaattgagcgctatgggtgttaacgtgcatgaggatcagtttgcagcagcaagtacaaaaggagaagaggaacatccgttgaatgagtgtgttttgtacataacttcagatacttgtgaacatgccttatatttgtccaacaactgtcagaataaagaacattctaaaatgagaagttcactgtcactcttgtccattctttcttagagaagtttaaaaatgcattcttctggaaaacttaggacatgtatgtcatgctaacattttaagagtgctttcgtcaggaaagaacagccacgccatgctgtgtctgaggagtctgaccagggatctcagggcgttttagggcctgggtcagaattttcctttgtgcctgcgtaagatcgactataggagttcacacagagatgatagagtttacttcttaaggctaaattaagagatttttcatgtgaatacatataaggatgttgaagataaattgcattccttggtatattttttgaggcatttgtggatttatgggccactgaggctgtcgatggggtttcctctatagaggggcttctgggtatgctgagcactcacagagtgaaagctcatttgaagaaagctcattttcaaaatctgtcttctgttttttcaagtgtattcaaagta

SEQ ID NO: 12903 - DNA, 1169 bp, Homo sapiens
agcctgatcactcatgttccaagatgagaggacaaaaattcacttagagaaagttgacagaggtagtcagacatcagcatagtcatctccactgaaagtttggctgaaaggtcagggtggcgctgaggggacagcaatgaaacccacccgcaccgggtgctccttcgccgttagagcttcctgcgactgcagtggtggcggcgtgtggtttcgctgcttggtaacagtgagcacaaacccaccctctcttctcttctcagaatttgaggttaacatcgtggtgctgcttcaccctgaccacctcatcacggagaacttcccgctgaagctctgcaggatatagcccggaggagggaagcatagagaacgggagtggccatctggaaatccagctggttatccaaatcctaaggggagctacagccagcggcatatacttgtttttgtgattattctgtatcagaaatgaaacagaccctcaaattaactttccttcctcatttcttgaggcttctgcttccaacaggcacctctaatcagaccttttctttgaaattcaacaagatttcttaatgctatttgccaagaccatttcacagaaaacattgactgtggctcttgccttatctgttcctttttaggtacagtaaaacaattgtgacagcagtttgagcttgctggagagtggcatcatggggacaaaaggaaacctctgacttgctaatggatgtagccagggactccccatagcaaagggtctgtggccagttgacatccaggatggctgcaagcgcacttgatggtcaggaagtttgcagatactcgccaaggcagagcgcaaagtgctagccactggaaatgcatgacttccctccacccctactctattctgtagttttttggttttgtttctgagacggagtctcagtctgtcacccaggctggagtgatctcagctcactgcaacctccacctcccaggttcaagcgactctcctgcctcagcctcccgagtagttgggattacaggtgactgccaccgtgcccggctaatgtttgtatttttagtagagacggggcttcaccatcttggccaggctggtcttgaactcctgacctcgtgacccacccgccttggcctcccaaagtgctgggattacaggtgtgagc

SEQ ID NO: 12904 - DNA, 1193 bp, Homo sapiens
atcagtggaagcaataagtaggaagtactgtaaaagaattacaataaaataagagaaaccacttggagagcaagagggcttgtggacttgggggagcggttgtgagaaatgtctcagaacttaatttacaaataacattggtagattgacatgttgtctttcctataaagtaactttacctctgtcttaatagtaaactactatgaaagtgaattcgtgttcctcttgatttgtgaactgatgaaaattacaaaatgtggagttttttccccagataaagtaaatggtggaatattcaggtttatttgatacctagaaaatacctgaaattttccgtggtaataggcacattttgaaactgttttttttttctctgacaattgaatatattttatatatagttgattttgattattgaagactaaggaaaatttaagtttgaatgttagaaaatgaattttgcaaatttgaagtaattttattctttatgttttgggattgtagttatgttagatattcctcagttggggtaattgtcttgcatcattatctcttatcataatctgtttttcttcacacagtgttatagttttgccgctggactcttccctcccttcccccaccccatcaggatgatatgagacttgaaagaagacgatgcatacaggtgactcaagttttgaaatacagtaaaactctggctaagagaatgtgggaatcgatggtctattttgaatgggggaggtttctgataaatagcagttagtggggggaattgtagatcagtaaatgcaaaggtagttgggctatttgttaaacttacttttgaactcagattgataatcagtgatttatagtggtgttattacaaatacagcatagtaaatgctagcacttaggcttttcaagagctaatattttggtgggaattggaataattctgttaatgtaaataacacagtcacctttatggttgaatgcatgtctcccccagaactctattagaatatggcagatcttttatgggagtagatgttagtaggatatcatcaaaaagactgacaagttaaggatattatacccatacatacggtttcttaaaaagatatgctctgggattttgtttattttttccttgttcccaatatccctgcctcccatttcctttcttcccaccctccccctcttatcct

SEQ ID NO: 12905 - DNA, 2822 bp, Homo sapiens
agttaatattcagatgttggtcttggtcatttgccaactaattttaaagtaaaaggcactgcacataatttgcataaagggccccatgagggtgttttttttttttctttttgtcccccccatccccctttttttttgttttgttctgttttgttttgggtgggagggtgggaaatttgggtttttaagtcctctaaacacacttgggcacggaaatgcagtactgtaaggaagagggacctccagcttccacaaacaccatcttcagctgtatgaaagggacggttgtggtgaagtttgtcaggcacagtaagcatgctgagtggcggggatcagaactctcctatctgaacctactgaggagcaaagcagcaattacatgggatcctgtggctctcccgttgcagaggccacaggaagataggatggaacgtgactggtctcctaaccaaggtgcactgagaagcaatcaacgggtcggtcgtggccagtcctggggaggtctgagtggtggtctttgggataacctttggccttatggatttggactcgaaattagaagagcctaccatttcagatgcaatcacttttggacatgcttttgcagacagtccttaatgctgaaaacacagagaatgggtaattcaagaggcctttcttttaaaatagacttttgtgacccactaattgtaaggtattgcaaggtcactttgcgtgtgtcataaagttgacttccttattggttgaaggtcacagaagtagtggtttgctttgatggaaatagctacagctgtgtcccttcctgctttttactttttcttttgctttttctcggcacgtggtatctccaccatttcttctgcacaaagatgtcttctgttcatcctgaacatttttaaaaaatgcagaattttatgtgactgcttttttgcctcacaattatgctgtgaattttacaaaaatttattttcttttttgataatttattgtaccaaagctgtttttatagcacatagatgtctgtaaccaataatgtagcagttctgcactttgacacaaggtgtaactagaccatttttaaatgtcagttgaaaattatggctgtactattgcttaaacaaaactggaactgttgttgaatccatagccaatacatttacagcaatctgtgtactgaacatagtagattgacatctaattcaagattacaacatctgttacattctaagtgtgttcaggcttctgaaggtaaagggacactggatccagaagctatggaaccagcagttgattcttgtattcctgattaacctacttgtaaacttgaaagcaagaccttgattgcaccaacaggtccagagtatgagtgcaagcaaagcagaactctcatgcgtgacctgagcagacaggctggtatttaacaggtgcctcgtgttgagattacgctgccttaatgtaacacagtctggcagttgctaaatttgtgttcccattttaaattgaccaattttggggtgtgacacttttgagcggttgaattgggagaatgaagataagtaatttacctgtccaggatcaaaagaagcctagaaaagaagcagtaatctacctctgccgataacctgtttaagatgactcagcagaacaccgcgtttcattctattggtcaattccatgtggctgactaggtcaattttttttctgaacaaaagcaggtttttatatgtaaacagtgagaaaagaaaggctaaacactatgtaaatgtgaatggaaacttggaaatactcgtttttataaactacaaaaactttttgttgtttatcaggaaatccatatttattttgtaattaactgtcaagcctgtggatgatttttttgaacttggtagttcataaaggtttacagtgaataaaaggatatcatcttgagtatagcaatatcaaaaggaattcagtagttactgctgtttaggaatataaggttaagatatcatatgggtcaggtcattttttttttctgtgctggttgccacatcttagcaagcaccaaaaaactaaagcagtttttaaaccgatatttacgtaaagaaaatcataaaatccaatgcttctgcatactgtgttatgttacagtccagttttgtgtgctttactacacagtttggttacaggacttctgtgcattgtaaacataaacagcatggaaaaggttaaatacctgtgttcagattgtaagatctagtccggacttgctgtgtatattgtaacgttaaatgaaaaaagaacccccctttgtattatagtcatgcggtcttatgtatgataaacagttgaataatttgtcctcagactctttactatgcttttttaaaaattaatttaagaaaaatgtaaacatagtaaaaatcttcctatgcaattaaactggtccaggtctggtaggtatagtatcaaagttgagttaaatgtgtaaaaaggaaactatttgagatacattgacataggcatcagcaatctctgaaagtaaaaattggaggtttaacagatcattttgatttttcacattgatttttttatttgaatgtttacataattttgtgattcaaaatgctcatattttagttggtagcatttcgactggatgtgagggtctgatggttttctctgatatgctttgacgtgcttggatgaaggaaggaatacgaatactcattcttccttccctaactcctcgtacggggccatatcagaattctagaattcttgccactgtgattcaattgctaacctaaagtcttctctttttacaaattcacctgctt

SEQ ID NO: 12906 - DNA, 1087 bp, Homo sapiens
cttttttcgtgtcctccttatttaaaaaggtatacttacaatgtgaagtaacttatgaataaaaggaaaagtttatcccatattcaaataattcctaaggtcagcctccctttttgtaagtggcaaatatctgattaaatcatttctcagtttattaatccttggaaacaatgatatagcagttactcacagcttgtaaattacaacagaaaggttcctttcaaatagtagagctgcacctaaagaggaaattgggtttataagaaaatggaggcaaagaacttaagttttaagaaaaagcacttcaaaacagaagggcaaatggaaaaggggaatataaaacaaaccaataaaaataccatctgagggtgttactgtccaaaagtaaagaataagatgcatcactaagccctttgcactcgttatgacctcgtaagtaaaaattatcacttagaataaggggtgcacactacattccctctgtcttctagacttttttttttgtagaagaatcagaaaacaatttactaacctccctgtttgatattaaaaataggaagaattttaatattttctgttagtacaagttgaacttgattgtgccaactgaaaccccagaggtttgtatatcagtagaatgcaagaacattgttaaaggtgcttacgatcttttttgttttcctttccactccattgtatcaattttttgagtaacttttaaatggctagaaaatggtctttttgctttgcccttttaaagctgaaataaccagctccattcttttcatgaatagtaagttgatatatttatttatcaggtatcttgcagttgtcaccaaatactgtagttttcttatgttgtatggaaattatagttcaattattttaatgtgatagagtgcaacaagtcattgtagaacttttcacctgttaatgttgaagttatacctctgaatttctgctgtggatatcaaggaaataataaagcagaaaccccaagaaatttgcaacttaacagtttgagactgtctcttatcctagtatttgggaagagaaggaataaatttgtcaaaactaggtgagaaaa

SEQ ID NO: 12907 - DNA, 1213 bp, Homo sapiens
agggatttaaccaaaatcttgctcttccataatcttactctgtgaaatagaggaattcgtgtgccttagatttagaagtgtgttctttaatagagtgtacagggctaaaagagtatttaagttaatatgtaggtttcccccatctgtattccaattgtagaggtgagttttgttaagagtacaattgcaaatcttatctatataggaaaatagctaaatgtcattctccatctctttgttttagtttactgcttccatgtgcaatcctaagcattctttgctggggcaactaaatgtatctttattagtgacttctagtccaaatataagaaactgtcatgttttgtgggaaaataattttataatccatttaaagtgaaagtttatcacacaaatagtacacttattttctaaccaaatacttgataggttatgctactccagtgtagatggccattcctaacttgtttgtgcctgaagatggacttgattcaaatggtttacatatttagtgggtaagggatatgttacagtaccccacctgtaagttatttattagccctaattgtgtttgatttcagacaaaattaacccttttctcctgtgtatctttgaagtggcagataaggtgaagcatcagactggtatcaatattagacaatgttatttattagccctaattgtgtttggtttcagacaaaaccttttctcctgtgtatctttgaagtggcagacaaggcgaagcatcagactggtattaatgttagagaatgttctgaagtgttcctattttgtagttatctattccatttgacatagtagaaggtacattttctttctactctgatgcatggggaaggatgtttttggacattatcaactgagataggtgggaaacctcctctcatttgtggcttagagagctatcaccatttcagaactatgatgcttttcttctcagaacttgtgttaagtagatagtaaacagattgattcatgataattgtccttgactaagactgaaaagactaatgggatgccttttactttgctaattttaaaaactggtgatagatgtcaaatccattaatttatttaaactcttcttaaccttctcttttataatctgttctcaggttttaactccatgtttaccatcatttgcaaaaaggtaccaaaaaaatccataaataaatatggaatacattcataa

SEQ ID NO: 12908 - DNA, 1107 bp, Homo sapiens
tgtactgataatacaaaaaccaaaaggaggaaaacgaaaggaaaagcaaaagtagttagaaaaggtaaaacttttacagctaacatatctaaaactgtgagacgtcaaagacaaagcaaacgccctaggttaagtgtggatgataatgactgggaggatttggactatgcaaaatctaaaagagttcttcgacgttcaaaaataaaaacgagaaatcagggtagaaggactgtgagataccatgatggggatgatgacagaagtttagaaaatgtgttagatttcaatggttgcaccttatgaccttgagggaaagccagttcatttaagaggaaatggactggcatttatggtgaaagctggctgttaaaattatttttttgtcttacaattcagggaatatatttatatttttctatgaaaagttatgaatgtgactaaatcatgactgttatttttatttgcacttgctggtctttgtagcagcattcagcacaggtgccaaaatatgcttcattttgggggcagatctattttgacagtatttgactacatatagcaagagtttgaaatatgttaaacactagacatcctggttatcaaaaccaatgagcattactttcatggcagcaagtgtcatgcagttattttctgaatttgtcaaagaggcagtagtttctaacccctgttctatagtagttacaacaatttcacaacctatgtttacagattcttcataaatacatgcatactgacactataatcatgggaggtgtaaccatgattagtaggcgaggtacctaccacttttttttttttcttcccctggctacttgagtagaatgcattataccagatctggtcactttcattgaaatggtttctaattttcttcccaagtgctgttgggtttttttcttcttaaggaaaacgttgtcacttttatgttataaacttgaatttataaagtgctggtaaattatttttaatgatttgagtgcatgttttaaacctctaggaccagagcatagtcagagcattttcttttaaattgtgcactaacaaaatgctatataatctgtcttctgtccaagatctcctggtttc

SEQ ID NO: 12909 - DNA, 1099 bp, Homo sapiens
ccccgcgtctggccttgactttttaataatagccattctgactagtgtgagatggtatctcattgtggttttgatttgcatttctctaatgattagtatgttgaacattttttctttacacctatgtatagagatagtgagaaattccttgagaagttgcttactgcatcataatgtacgaatatgtatttttcatttctgagatgtatacttttaaggtgacatccttttcagattattgttattttccctcattcgtggtaaaccagttaacttacagcatagtttggaaaatgcccatctaatgtgcattttctcatgttttctaaggaccttaaaagtaaaactactaagcttgagttaaaactgtatggcaaaaatgctaccttctttttaagcctttttttctttttgctttaaatccttctggaaacttgacggaatgcccattttgttgatattgtccttatttaggtgttgattttcattcgcatgtttttctgtgtttcagtcggattcagtggttttggtatcacagtctagacaaaggacatgtaggcgtaaatatccaaattatggtagaagaaatcgtagctggcgtgagttatcttctggaaatgagtcttcaagctctgtaagacatgtgagtggaaaactttaaaatgttataagataatcttaaatgaatttggcttaattctttactttgaatgaatataccccaaatttatatgaaaacacagcattctgcagagattaatatgaaatttcacattttgaatgttaacaaaaacttttaatggctaagatagtcacatactgtatacttgtgcaatccagtggttttacatgttgagcatcccaactcagaattttgaaatgcaccaaaatctgaaactttctgtatataaacatgatgttctagtgtgcatttcagattttggatttttggatttggcatgctcaacctgtaagtgcaaatgcaaattttccaaaatctggaaaaatacgaaatctgaaacaattctattccccagcgttctggataaggggtatataacctgtagtatattgacagagttgggccatcgtcacctct

SEQ ID NO: 12910 - DNA, 1102 bp, Homo sapiens
tgcaacctccccctcctgggttcaagcgattctcctgtcttagcctcctgagtagctgcgattacaggcatgtgccaccacgcctggctaatttttgtatttttagtagagacggggtttcaccatgttggtcagactgatctcgaactcctgaccttgtgatccacccaccttggcctcccaaagtgctgggattacagacatgagccactgcaggttgcctcttctcagcattcttatacattgtattttcaaaacttaatctgtttgaaaagctattgattgagtttgaggtgtgttttatttcatagggccgggcaaatcatagcaaaccaaattttttttcccatccagatacgctctaaataccttgtcttttgaattaacacctgtggattgtcctgttgttaggacagcttcattacattctttttttgcatgtgattttaattgtagcccttgttggaaagtgtgtgaatatagtaagatcctgttctgaatgttttaaggttcctaagtggtagcagagatggaacagcacggatttggagatttgagcagttagaatggaggagcattttattggatatggctaccagaatctcagggtaagttgagattgttagaagtaggtgcatcataggtgttcgatctgtctctctctctctctctctctcgctctctgtgtctctcagtggttattttgttgaggggattatagctaccttctattacgaagagctgtggtataagtgaatagctgcgtactgcatatcaggtgaacagagacatccaggtaaatttatccttacgttgtatagcaaagaataacatgtactttttctatggttcaaagcattgacctccttcttagatgttgcatttaaaagcttctacaagtaaaaaagataaaattaactcaagtacattaagagtggaaattatacttttctgtggataggatttttgaaaaaatttaaaagtagcttagagccaaggctgggaaatagggtaagcaaacatactttattattaaggttaaaaaagaaaattgagctccagcctgggtgacagagcgagactctctaaaaataaaagtcat

SEQ ID NO: 12911 - DNA, 1151 bp, Homo sapiens
ttaaaagaacaacactaattgacattgcgtgggctttttctccctttgtttaaaatgtcatttgttgagcaagagttgtatagtattatctacttacttgaggctgttaatttttcattacagtgttttgtaaatgtatccacgagaccatgatgcattgttttgtgctcaacttgtgttttgtatttaaagcattttgaatgaagtgtattttataagcatttaatatttatgctctttagaatggaacacagaaaacaaaccttataagtcctgattaatctgaaccaataacctgtgtggcctacaaagtataattctattaaatgttccttaaaacacttttttctaattaaaatctttgcaaatgcttgtgtaacttcctgccttacagctacttgtttgctgtgagccacccgcaactgacaagtggctgttaactgagtcaccatatcccagtaaagctgaattttctcactagtttctgcaagttcatatttgtactcttttgtttcctaatgatctaataagtagtttgttgttattttagctgattggactgtgagaagacaaagtgctgtggtcctttatttattgtcatgctgaaggccaccacagcagcttttgggttccacttactcaaacacacatgcacgcaggcttacccagcaccaagtttacttagctttaagaaaggacagagcagggaacgcagccacagcctggtggaggaactggacaccagcttccagtgtccgtcaccacacgggatacattttgcccacaaaggatgagaagccaacctggggaggagatgagagtagcacacggaagctgcaggaactagtccttcagacgaaatatagcaccaagggggcacgtgcctaactcccgttttagtaagctgcaggcagaaatgatggtggacagtcaacagtgcaccggccatgtagagcgtgcccagggaactgctgggatcactcatccgcatacagtgtccatgatgatacccgtatctcttaaagatattctcattcagttgttacaagaattttgacaaatctcactgaggctagaggtaaaaatttctggttcacagctattaactttccccatgcgtgaatagtttgtgatgattaaataggggaaat

SEQ ID NO: 12912 - DNA, 1171 bp, Homo sapiens
aattccttttccttccctactacccaggaacattatctgggaaaagctgctattttgaaaataactacaaatgtctgtgtggtaattcctggccaaaatggtgagggagaatacaaaggccctgaacggatgcactgagtaggtttttagggaagtagccttttaatcaacagtttaaggtagagggttgacttcaaagagaggtttcacgtaacacaatgcaatcttttcagcacagggaaaaagtcccttagcactgtagctgtgctctcttagagaatggtcatttccagataaaccagtccagccacagagtgaactcttgtgcactgcaacagatgaacatttctagtttgagctgcttctgtttttccttcaaaccactccctttctgtgccctctattagacaacataattatttagtgcagcacgccaagtgaagcagttagtaatgctttgttacagagggggcgcatccatgattaattcacaccctctctctattaactttggaatcttaaactgtctgggcccctgaaatacagacctgtatttttttgtcatttgcgtccatttttgttgtgataatagataatttatgagtgagttcttccctttctgcaaggtttttgtcttcagaaagtttctgcagtgcctgcaagatatctttagtcttcagtaactggctgtcagtttctctaagtttcctagatagagttctttccttttcctgggatttcctaagtagttgccttaaattttttacttcattctgatgtttagccataatttgaggtagattattttgtgaattctcatattttcctatagctttcaaatgcctaagctgaagttgtttcaaaaattggttttctgtaaggatggcttccaatttatgatgcatatcagctaattcattttttagtcctttaattttatgaagccttgctgagagtattcgatgagccatagcatctcttctttgggcaatcatatggatttgagaattaaagagtgatgcattccaggtgtgctttttttcaactgatatttccttctggcctgtgtaagcagaaaatccagtttattactagtaaaatatacagatatgcaaatatgcacatatgcataatctctctcccatgcccccatgcacacacaccacacaca

SEQ ID NO: 12913 - DNA, 1193 bp, Homo sapiens
ctttaaaagcattaggctgaaagagtttattttggtggtcaaaaaaaatatgcttccactcatgtaactattttaaatgttaagaagtaaaataatgaaagatatgttaattactttattcagtaaagttttttaagaatgtttatctcagccagtaggcaaatacttggtgtaaaacaagttggtcttaaattgttgcaactcattagctagtgaagatattcatgtaaatatattttaggattgtaattaattttgaaaatgtagaaagctctttattccatgtaagtatgcaggatgcctgcttttttatgcagttgtggaaagaatgtaaaatgttttaatatattctttgttaatctgagaacttgatactgaatcgtttatgtgggagaaggaaggagtaacataaaacatgtttttatcactcaaagtaagcaatggaggtaacaaatattgtgcattttaacagtaatatttgaagatttgtagaatattcacctttaaaactagttagtatgcatttataattttaccagaatatacaactaacaattcaacagtgatgttctttgcatttgtggggagatgtgtgatgttcttggttttctggtttggaatggaacgtttatagccttgcctgtaaaaatgtgccccagcacttaatgagtgaccgtttgaatccatatgtagtcccattggtgctaatgagagtagctgctgtgaaacaggaataaaatgtgtctgttcacggaggtgcggtgtggatgcacctacaaggccaactctctgatcagggtgagggagagatggaagaattaacagatctaaagttggcctttgttgtctcaaattgggtttgtacacacatgcatgcatgtgtgtatacaactgtaatctggaacttcaggaagtaaaattatttgaagtttcttagtaaaaagtaattaggtataattccaaatagatttctgtataaattgtatctaactggattacaagtcagtttgacaatttacgatgtctcagtgatgtttctgcaataattgtgaaatgcattattgatttaaataatgctgacacgtactctttaaaagtgttctttaacactgactactaaactttaagttttaaaaaataggttttcatttatggctttttgtggttttagcactttaagaagtttaattttt

SEQ ID NO: 12914 - DNA, 1173 bp, Homo sapiens
tagaaatacagcttttaaaatattgtggttctggaccttacaagaacaagatggtttgatttcattaatgttgaaattggattagtcttgattgtgtgcatggttcctcattccatggtgtcagtataatcatttaattgaggtttttggttttttattgattagtggaatactgtcgaagtattccttcttttaattattttagacacttgagttctagttaaatcttaaccatgttcttaagtccaaaataggaagaagtggagtagtttgcagtattgatttatatcttagactactttagcaataaaagataaatctcaactttaataagttatcctgacacttgataaaaataaatatttggtattttgtggtcatgtaaaacttctttttgtatgaaaattgtgagaaatttaaatcagcaatagtaacacttagatttttataaactaacaaaaacttgctctcagtcaatataataaatgatagttaaactctaaggaagacctgggaaatgaaaacaatttatggaagtcccctacagtcagtttataagggcttcagtagtgatagacattgttataaaaacttgtaccatgttacatgtacactgcaccacagtctaaattcagaccagcatttgaaggactgcacatatttcatttcctctgatttatgctgtcacaaattgaaaatctgagtgtagttaggacaaaaaacaaagctaaccatatggcactaattttgattttaacattagtgtaacaaataaggtcgggacatatatttacatagatcccagacactcaagaattagcacagctgatgtaaaattctaaattaccatttacttccagatagagcagaggagaaacacctcactgcagtttcaacatgctttccaagaacaatatatacgacatatacattttcctgcctctctcttgtgacaatttctgttagaatttgttgggggtctgatggttaaaatcatgggcaaggccattctctacatcattgcttaatatttcaaaaataggtattagagcactatcagtggtccaaaattagttttagctacttattttgctccatgggttttgggcttttcaaagaatactatgtataatttgtaattgaaagcctttcagtaggatatccaaagttcaa

SEQ ID NO: 12915 - DNA, 1233 bp, Homo sapiens
cttttcacggcacgccaccttcactctcactttttcttttctaataaatacctctggatgggttagtggtaatctctcctcaaaccctgagtggaaaatgtgagggaattgccgtctttggcattctgttggagctgcagccccccgagctctccttgccttcctgctcgcccccttctccctccctcctcttttccctccccccttggtcctccctcgctcccttctcacttcttcctggcccccagaaggctgcgggaaaggtgcaagggtttatccagcatccagcacccctgcaggagaggaatccctgctgggccgggagggcagctggctccccataggatttgcacatggtgtgtgaagttcagcatctcttgctgagccactgctggctgttagagcagctcttctttcaacctttctttcagatttaaggaacagtgacaccccaccccagtcccgtggagggggtctgggcccacccttcacaactgcctttcaaggacagttcagacaaagggccctgcatggaaagagtgacctccctttgccttttgcacacgcacctggaaaagacacagaagccaacctgagaacccctggtgctattttaaaggagacatattgctgaacagcagtgagaaaagtctgcaggaactgctgcctgagccaagccagagaaccgaagacccggccggccctggcctcacaggcgtgtgcccatgcagccacccaaatgcacgcgtgacaacaaggccgggagggtggggggggtgcacaggtagccccgaccctctcaggcattccagccacagaacatcaaagtgagcgagtactgcgctggctgtggcttcagagaacctgtatgtgccacatggaaaaacaggacaccagagcccaccagacagtgccggccagcagagaagcagagagccagcgccacacaacatcaagaaggccgacaaccaggttggaaaccaagacggagctcagacccaccacatcgccccagaggcttttccagcacccatgatgtttcggactgacctaaaaactaattgtcgagaagccaagggtgaggaggcaggaagcacctccggttggaggcacccaggcttgccagccacagagcgccccaaagtcaccgtcatcccagcccctggccttcctgctgccctccggggccatggcactgctgttcagctcaggcacaggggcacagcagaggtt

SEQ ID NO: 12916 - DNA, 1237 bp, Homo sapiens
tctctcacctcaaattaggaaaagctttttaacttgttcccctgcatcctggcatgtcccttcaagaaggaaaaggtgacatcagttgtgaccagctcagaggatggggctgtcccctgggctctagaaagaacattctgtgtcaccagcacaggctcttgctgggtgcctgtgccccctttctggttgaagggaagccagaccagtggagtggaagctcttgaagcactttcttttcatgtcggaggctgcgtgtgagccggtggtggcggcagctgtctgtgtttctcctgttctcataccgcccttcgtgtccgctgcatcttcctctaggagcatctgtgggctgacgtttctggcatggtggatgttttcatgttgttccgccgtctcagcatccaggtgacgtgctgtcccgcagtagctgctcgccacacaggctgttgaaactcagcacgaatgcttgagcctgccccagccccagccgtagcccttgtgctcaggagctgctcctggagagtggctcccttgtgggaagtgagaaacacgtttcggagtcgcagggagctctgtctggcatcggtggcacagatggtgaacttgtttcaggaagtgtgagcacgggcctggctggcacccggtttacagggaggtgattgaggacgtcgttatgatttgatttgaccttggcacacactgcagagccacagggatgttgctgaatttcaatcaccgatcagcaaggatgaaccttctcaacttcctaggaatgtttagcagcaaccgaatataccaggcaaaactccttggtgcctgcgctgtgtgtgtgtgaggtgcgcggtgtgattgtgcgctgtgtgtgtgtgaggtgcacgctgcgtgatcgtgtgctgtgtgaggtgcgcgccgcgtgatcgtgcgctgtgtgtgtgtgtgaggtgcgtggtgtgatcgtgcgctgtgtgtgtggtgcacgccgcgtgatcgtgcgctgtgtgtgtgaggtgcgcggtgtgatcgtgcgctgtgtgtgaggtgcacgctgcgtgatcgtgtgctgtgagtgaggtgcgcgccgcgtgatcgtgtgctgtgtgaggtgcgcgccgcgtgatcgtgtgctgtgtgaggtgtgcgccgcgtgatcgtgcgctgtgtgtgtgaggtgcgcggtgtgatcgtgtgctgtgagtgaggtgcgcgccgcgtgatcgtgtgctgtgtgaggtgcgcgccg

SEQ ID NO: 12917 - DNA, 1159 bp, Homo sapiens
aggcttttcttttttaattagacaatttgttcctcacagatagggttgatgaagaacgcttggtaggtaagcacctgtgtgtgagccgagtcattcataaagaactgttcacagataggttgatgaagaatgcttggtaggtaagcgcctgtgtgtgagccgagtcattcataaagagctgttcacagatagggttgatgaagaatgcttggtaggtaagcacctgtgtgtgagccgagtcattcataaagagctgttcacagatagggttgatgaagaatgcttggtaggtaagcgcctgtatgtgagccaagtcattcataaagagctgttcacagatagggatgatgaagaatgcttggtaggtaagcgcctgtgtgtgagccgagtcattcataaagagctgtccttgtgttggtctcatgggcatcgtgtttcctccgcagagccagccccagtgcctgctgagccgtttgacaacactacctacaagaacctgcagcatcatgactacagcacgtacaccttcttagacctcaacctcgaactctcaaaattcaggatgcctcagccctcctcaggccgggagtcacctcgacactgagggccctcggtgtgaagatgaaccttccaccgtcttcactgcatcctggagtgcaaaaataaaatccactcaagagtcacaaggcccgctgtgcataatcggtttcacttttacctttttttttttttttttttttttgagacagggtctcactctgtcacccaggctggagtgcagtggcacattctcggctcactgcaacttccgcctcctgggttcaagtgattctcccacctcagcctcccaagtaggtgggattacaggtactcaccaccaggtccagctaacttttgtatttttagtagagacagggtttcaccatgttggccaggctggtctcgaactcctgacctcagatggtctgcccacctccgcctcccaaagtgctgggattacaggcgtgagccactgcgcccggccactttcacactttttacagtgagtggtgaattagcaacagtaacactgattatccaacatatattttggaatatctactatgtgcaaggaatttttcttaaactctaaggttatgaatcactgggcaaatccata

SEQ ID NO: 12918 - DNA, 1192 bp, Homo sapiens
aaatgatataacttttagaaaaatcgcaagagaaaatcttgaggatctagaactaggcaaagacaccaaaatggaactttatgaaaatgtagcactagcctagggtgagtgtggatgtatcactatttgtggatgtagaaacaggagtagatgagggtgagtcacttgtcctgcctgccacagagcgaatcagtggaagggctaggctttggctcacagcccacacacctagcactgggatgcaccgaggtcaccaccacgcgcctttgtcttccctgcacaccagatgcagccaaacaccaaagcccaggtcagtggcaccggaacaacacatcagtttagaggatttctgatgttattccactttggttattggcagtagagatggttctatctaatgactaagaactggtatgtaggatcatgataacttacaataatgccacctttttctctgaaagtcttcattttctctgctctagatggtaaaagcaatccaggttttgcgcattcatcttcttgagctggaaaaggttaacgaactctgcaaagatttctgcagtcgatacattgcttgtctgaaaacaaaaatgaacagtgaaactctgttgagtggagagcctggaagcccgtactcaccagtgcagtcccaggtacttacatttgggggtctcgctttccctctctgccactgtgaacatctgcattgagtcatgagaccaccagctctttcagaattcactgggtcatctttatgactttctacaagaaggaccctctaggtctctgaccccagcctggtttgggaatgaactccctcagattatgaagtgagtcctcaatctgcatactgggcccccggtcccatgtttatggaaggcacaattccattcatttctttcttttatttcttctgaaaatattttacttattcttttgaaaaattgtgtaaaatacacataatataaaatttaccatcttagctattttaaaatttacagttcaatggtgttaagtttattcacattgttgggcaaccatcaacaccatccatctccagaactttctcatcttctcaaactcaaactctgaccccattaaacactcattccggattccccctcccctagcccctggaacccaccgttctactgtctgtctctgtgaattcgatgactccaggtctctcatg

SEQ ID NO: 12919 - DNA, 1172 bp, Homo sapiens
ttaccttgctggaattattggataaaaaagctatttttataaattcgttatgaattggatgatgactatattgaggataaaatttctagagaagaaacaatacatgcttgctattaatatttcaatttggaatgttctgaattgaccaaatttaatgaacctgcccaaagttagctaccgttccatggttctttgctctccccgggtagtgatgaacatttactactataaaagaaacagctatttaatgaaattttgatatctgcaaatttttgttgatatgtaatgctcagattgcattttacacttgatctaaacatatatcgaaagatatctgctaaacaggacttcaggtaagtgaggtgaaatggtagccagtgacccgttaggagctctcaccgtacatactccagtctaatttaaatctgaccacagttgcatggtcgctttaccatgttagctgtgtattgttttaaaagttttaacttcaaaatatgttatgcacagaatgtttattataaactaatataaaatgtgctctaccccattggctcagagctagggcaaacagcagatattcagactttattacttaactagcggacatccctggagtcccagcagcgagctggtctggcgagggcacctcggcagcccccacgggttggctcctacgtttgcgtttgtggctggtctcctggtgtcagtgttctcttgtacgttgttgctttcgacttttcagagccctcctgctcacttgaccacgtgagatttggaataactgtaggacttctgtttcctggtaacaagatgaaccgagagagtgggctgggttctgttttctttggttttgatttgttttcattgtttacttaggagtggtgctttttctcagaaaacaggccacggtgtttcatacagaatgtcttcatatcatctgaaatggtatggctgaagttcatttgtttacagggtcgggaatgtcttcagttcttgagagtcaacagtaatgattggttgtaagccaagggacattttaagctagtgaagagttttttctggaattgatttttcccaaaagaatatattaattgaggttaagaagtcagtgggaaacacacagaaatttgttttaaaatctttcaggagctttactgaaagacttggttatc

SEQ ID NO: 12920 - DNA, 1123 bp, Homo sapiens
gtagctatgagcgcctgaagcgtggggtcagtgagggttgaagatggtatgtgtccagctcattttgattatgatttcctgtgaccatttgagttggttctagaagaagacagaagatgcaaggtattacacctgttcacttctaagttgcacatttttttctcctgaaacttttcacacctgaaatcagggtgtgtctcagtcacggcgtgcagtctcttcagcagtgtttttccttatcagtgccgttggcttgaggagctgcgcgtgttgagagagtgggtgtggttctgtgctgcgtgccgtggtttggatggcacggttttctttattttccttggttgcaggcatagatcaagatcccgatcccgggagcgtcgttctcggtctagagaccgtggtcgtggcggtggcggtggcggtggtggaggtggcggcggacgggagcgtgacaggaggcggtcgagagatcgtgaaagatctgggcgattctgagccatgccatttttaccttatgtctgctagaaagtgttgtagttgattgaccaaaccagttcataaggggaattttttttaaaaaacaacaaaaaaaaaaacatacaaagatgggtttctgaataaaatttgtagtgataacagtattcttggtgtaacttatttcttgtggaagttctttaaatttctttttctttataaatctgctagtcatcttggaggtaaagattaatatccatccaccactttgagtataaatgaaataatattttttatcttagggcatgaaataaaacacataccaggtgagatctacatgctaaataatccggaatttctcgaggctgtcatggaaagccttttggggtttcttttctaactggttagtgaagaagtgcttagctataatcagtagacacgctgtagactgcactgatgttgggaagaaggctgatctgtggtgagacacagtgggtgggcccgacccatgttaccttctcgttcctgcgagtttgtgtcaagaaccccatgtgttcgtgggagggagcgtggatgctcacacggcacactgagggccagtagtccgtgtccgtgtttccttatgccaatggctgtgggagacacagaa

SEQ ID NO: 12921 - DNA, 3112 bp, Homo sapiens
gctgagccatgggggtgcagcaggcgggcgtgtcctttaaagtccctgggtgggtgagggtggcggggagcgagggcgccttgtggccgcatctctgagctgctgagaaaccgggtggagaatgaaaggtggggcgcggtcagggatcagccacgcacctgccctcggcagccgcggctggcagctcctcgggcgggccctgccacacgggcactcggaaacccgagaaccctgcgagccggcgcagtgaccacctgtcctctgttcccacaggctgctccagttacagcaccacccggccgctgcacccggctgctcccaggccccccagccggcccctgccccgtttgtgatcgccccctgtgatggccctggggctgccccgctccccagcaccctcctcacgtcggggctcccgctgctgccgcccccactcctgcagaccggcgcgtccccggtggcctcagcggcgcagctcctggacacacacctgcacattggcaccggccccaccgccctccccgctgtgcccccaccacgcctggccaggctggccccaggttgtgagcccctggggctgctgcagggggactgtgagatggaggacctgatgccctgctccctaggcacgtttgtcctggtgcagtgagggcagccctgcatcctggcacggacactgactcttacagcaataacttcagaggaggtgaagacatctggcctcaaagccaagaactttctagaagcgaaataagcaatacgttaggtgttttggctttttagtttatttttgttttatttttttcttgcactgagtgacctcaactttgagtagggactggaaactttaggaagaaagataattgaggggcgtgtctgggggcgggggcaggaggggagcggggtggagggaacacgtgcagtgccgtggtgtggggatctcggcccctctctctgggttcgtcgtggttgagatgattacctcggacgtctacggaaacgagcgggcgcattgttgtccgcttgtgtgtgtgtgtgtgtgtgtgtgtgtgcgcgtgcattgattactatccatttctttagtcaacgctctccacttcctgatttctgctttaaggaaaactgtgaactttctgcttcatgtatcagttttaaagcagcccaggcaaagatcatctacagattctaggaattctctcccctgaaatcaaaacctggaagacttttttttcttattttagttgagaagtttcataaactgctcaaggattagttttccaggactctgcggaggaacggcaggaagaacctcagagagggcagaggtgacttcaaagtgctggggactccgtcctgagggtcacttggccctgagcccctgcgtgcccttgcggaagcccagaagcttcttcctgctgcacctcccgtttccgctgctgctgacgtttatgcatttcatgatggggtccaacaagaacacctgacttgggtgaagttgtgcaatattggaggctgactgtagggctgggcagctgggagacaggctcatggctcatggctcatggctcagggcggtgcctgccctgggccgggacccccctccccaccccccacctaggctttttgggttttgttcaaggaaggtaaagtgagaggtttaggtcagtgtttttaagtttttgttttttttttaaagcaaatcctgtatatgtatctacatgggagacaggtagacactacttatttgttacattttgtactatacgtttgtgttccaggtttcagcttccctcgctcctgttgttaagaagcgtccctgtcagcacaggtgtgcattgaggaaggggccccagggccttcgctccctcagcactggggtggaggcggcaggaaggggcggcccttacctggcaggtctgggcgcacctttagcaggtggactccgtggggctccaccagccagaagcctctggaaggcaacgaaggcaatgctgctccctgagtccagtccccgcccccaaacccagcccaggtgccttcagctacttcggcttcttaaaccctgcagtgttaaacagaggcattgagaaaggggaaaggcgggtatttttaaaagccaaagattgacccagttacttgagggtagggaggcgggcccagtgcaggaggctgcatccctggcctgctggtgcccaccgggggctgtgcctgtgccgggccgcagggaagctggctgcccccattcctgctgctgctgctgctgctgctctgtggctgtttcaaagactgggcgaaaggctgtccggagggcagaccaggtgccttgccgcagagaaaacaccaaagtctcctgttcgctcataaagaagtttttgggatgggagagaatccagaccatcttggggcagccaggcccttgccttcatttttacagaggtagcacaactgattccaacacaaaaccccttcccctttttaaaatgatttctgttctaatgccatagatcaaaggcctcagaaaccattgtgtgtttcctctttgaagcaatgacaagcactttactttcacggtggtttttgttttttcttattgctgtggaacctcttttggaggacgttaaaggcgtgttttacttgtttttttaagagtgtgtgatgtgtgttttgtagatttcttgacagtgctgtaatacagacggcaatgcaatagcctatttaaagacactacgtgatctgattgagatgtacatagtttttttttttaccataactgaattattttatctcttatgttaacatgagaaatgtatgccaaatgattagttgatgtatgttttttaatttaatatttaaataaaatatttggaaggaaaaaaccttgactttttcccttcctctctctctcatctctctgggagctctttccttccaagcggcttccctgagaggccacatcctccaggcttgtagaagtttcaaatcttaaagaggagggcagggagccaactcctgcattccacctcactgcagggaactaatggccttccgtctgcagaggacccctccccctgcggcagccacaggtggccccgtggtctgccccctcctcagg

SEQ ID NO: 12922 - DNA, 1118 bp, Homo sapiens
cgtggctggcttctgagtccttgttgagtctgggaatcaggcccaggttactgtgggctgcgggagaaacccagcccatggatgccttctcagtgccctatttcgagggtggacgggtgcccttgctgcacaggcttgtgccttgcgcctgccgtccccgcccagtacccgcacccagggtgctggcatcatccctgagtccaacccactggctgtggctcacccggcttttctgtgtcataaagatgcctgtccacctggtgctcaggtgtggggcacggcagaagggtgaacctaagtggttctctgtgtggtggacacaaagtgtggcagcccccagggtctggatccctggctgatggctccccttgggtggcaggactgagccgatggcccggcccctgctcctgggccctggcgtgtcaaaccacgtggggcggtgggtgggagcgcagccgaggtcccggccgccctggctcagcctcctggcccctccacagactgtgagagcctgatccgccgcatgctggtggtggaccccgccaggcgcatcaccatcgcccagatccggcagcaccggtggatgcgggctgagccctgcttgccgggacccgcctgccccgccttctccgcacacagctacacctccaacctgggcgactacgatgagcaggcgctgggtatcatgcagaccctgggcgtggaccggcagaggacggtggaggtgagcctggccacacttgccctggcctcacccgcaggggctaggcagctgtctcaggggaagcaggcactcaccagctgagttaaaacgggagcacaggctaatttaggggccggcttgtccaccccactaaaggatattctcagtcacccaagaataacctgggatcgggtgggccctggggctccccgccatccccatgctgatctctgctcctcttgttcccagtcactgcaaaacagcagctataaccactttgctgccatttattacctcctccttgagcggctcaaggagtatcggaatgcccagtgcgcccgccccgggcctgccaggcagccgcggcctcggagctcggacctcagtggtttggaggtgagggggaggagtctcc

SEQ ID NO: 12923 - DNA, 1233 bp, Homo sapiens
ctgggatgtcgggggtggggaccggacggatcgcgggcggcgggggcagggtgtgggagcggggcaggggacggtcctgggatccggatcgagccgacctcgggtggcagggccaggtgtgggagcgggtccgcgcccagaggtgctaaaggggtcgagggtggggacggaaccgacagcgggcggcgggaggcgagtgtggaatcccggctcagggggtcccgggatcgggacggaaccggactcgggcggcaggggcctctatgagagcgggtccgtgcgccccgcggggctcaagagggtcgggggtccgggtggagcgggcggcgggggcgggtccacacctcccacggggctggaggggcccgtggatagagtgggggcgacaggcgtgggagcaggtccctgcgtcccgtggggactgggggctccgcgggcacggatggagccgaccgcgggcggcgggggcgctggtgggctctgagctctgtgcggccccgcaggtgcgcgcggagccatggttatcatgtcggagttcagcgcggaccccgcgggccagggtcagggccagcagaagcccctccgggtgggtttttacgacatcgagcggaccctgggcaaaggcaacttcgcggtggtgaagctggcgcggcatcgagtcaccaaaacgcaggtgcgtgggggcggtgggacccagccggcggggcctccccactggacccggggcgacccgacctttggcgggtggaccccatgcagattcactgctccaggcttgattgtcgtggtgggtaaatagtaaccgtttttagttcggtaaagaaaaataatgctttatattatgttgctgcataatttggacatatattgggagaaagcagagaggataatagcaaaaaaaaggaccaacctaagattgcagtggttcatggactcagagctaaaccctgtaaagtgagcctgcaaatacttaagtcacttacttaactctgattattttaaataacattagtggttactttggttatgttttcccaacttcttgtgaccttctggagacagagtgttgagaaattaacttgcaaaaaatgaaatgtgtaaattaggttgagggtttcttttctttttttaaaaaaacccacagaatatcctttttctttttaaatttgtaggttgcaataaaaataattgataaaacacgattagattcaagcaatttggagaaaatctatc

SEQ ID NO: 12924 - DNA, 1218 bp, Homo sapiens
tgaagtcttctccaagtcggcctctgagttccggagctccctgcccctgcaacgcatcctggcaatgtccaagagccgcaacccccgcctgcaaaccgcagcccaggagctcctggaagatctccgcactctggagcataatgtgtaggtgtgctcggccaccagggttttggtgaaaatgccggtgtcccttctccccagatccctcatttgatactccaaaaccatcaccatgtaccatgtgttagagttggcaaaatgtgattgactagagatggacatgaattgatatgtatcccacataactttgtcttggaagtgagagtgcttgtaggtggttggttaagcttgccaaaggagaggccatgaaagaacctgtccttctggaaaagtggtccatgtctgtgctggctggaagagggcttgcttagggcagcttcttgctgctcagcagaccatgacctgtaggttcacctataaaacagggaaattgaataaccatctaccccattagtcagcattttcttgagatacatttctttgaaaagcaattcattctctctctagtaattgtaattaatccccccaaaatgcaagtttacttttataaccttttggtgaacctgctatttcggatgacattgggcattttagttctatattttttgtgcctcttttatttttgaataaagaaaatcagaagagttgtattacgacccttgctgtctaaaatctaaacttgatattaggaagttagatttctgcatattaccatgctactcttggttggtggaaaaaaaactcttccttaaactgttctgggccctttggctataaacttagaagtcctatttttcttataacaaatgctgtaaaaacaacttgtataatagattagaacacatgcagttagttgagattccataaatgaaatgatagttccagctccctttttgtgcatgggtgtgcctgtatgccagggccctgccatgtctgtgttatctacctactggttgccatccagcttgttttctaggccactggcagagagcaagggagaatacacttcatttctcatggacaccatgattggtgagagttgccttttgtattagtctgctttcacactgctgtaaagaaatgcctgggacttggtaatttatagaggaaagaggtttaattgactcacagttcactgtggctggggaggtctcagga

SEQ ID NO: 12925 - DNA, 2149 bp, Homo sapiens
ggccctcccttgggagggtgagttgaggcatgggatgtggcctcactgccctcctttcctcagaaggctcttgggcctgctctctgcagggccttgagatggccctgcttcgtcctagcaagtgggtggggtcggcacccaggcaggacgctgtctaaggtgttgaagggacagctgtcggacccacttaatatggggccttgctctcatttgggacagaattcaagaagacagacaagagtatcttggtcagtcccacgggcccttctcgagtggccttcgaccctgaacagaagcccctccacggggtgctgaagacccccaccagctcacctgccagctcacccctggtggccaagaagcccctgaccaccacaccaaggagaaggcccagggctatggatttcttctgaggagcagcagagtcccttgtaaaagactgcttttgtacagaatgcgctataaattatacctttaagaatgtggggccttttttatgattttgtaagttcccataagttgtgtgcacgaggttctgagagtgcccgcaggctgctgcgtcctggcccctctgtagtggctgcgggcgtcttggttgaatcttttgctacaaaccatgtttgcgtttgagctctccaggattttacatttttgggtaacctcagtgattcccattggtgtaggaaatgagaccctctctgaagctgaggagagcacgttgatctgaactttaaatcaatcagtgctgctggcacaatgaaaggtggaactgcacttctgttgagctctcagttctgcggaatttggtactcattaccgtattcgccgtactaagttggtttctgttagtcttaacagtctgttttcttttaaaagcatgtagggcttcattgccatgttctgtgggtgtttggcaggttaccgatggggaagattcttgtcacagaatcagcaataccatagtttttctacatgtgctcagctgggggtgtggacaggtaggggtggggaaagaagaggctctgcgttctgggggctttttcttctcctccccctacccggtttccctccctgttttcctacctctacggcaagcccaaagtgtcttcccgggagcccagcgcagcccccggctcttacccaggaccccgccccgtgctgagccttctgctgaggtccttgcgtggagcacactcattcctccaagcccttgcgctcccgtttctctctctctccgtccacgttccagccgagtcactgcctgaccggctccatggcagctccccatcttccctagaggctgcctgcgcatctggagcctgcgctccggctcagcgacctttcctctcaaatgcggaagcgtgcacttacagttcagaccgttctcctgtaagttcattacaaacacgggcggaaggcactcaggctttcgttggagaaacagaaataaggccttcttttgagcagcgattgctggatcattgatctgtttgaggaagtgtctgacctgggcctgagagctggagaaggtgcagattcaaagtgagcggctcctgaggagagccgccaaggctgctcgccttctccgtggcttccgcagctaccgtctgcacggtgagagggcacgggcacacggttcgggctggcgtgcagctctcccagccagccacgctctgctcaggcctggaagtgaaagccgcctccttcccgttatgccccccatacaggagcctcggtttttcagcaaaacgcggccagtccccttctccactgctgcctcccagcagagggccccaggatctccaaggtcccagctatggctttggacaacgtggcttcggcccctggggttgcagagcttgcattgggtttacctcggtctcattcattcatggagccaagggtggggtttcacctgcgaacatcagactgacttgctggcgtcaagagcagttgactcactgatgaaggccctggtgaggagaaagcactctgttcttcgcctactctgtaatcgttttgtcataatgagccatgaaaaaagtaatgaacttgtgctgttaatcgtcactgtaatgagaagtcttacgtacaacatagctgtggtggcttaatggctgcattagataggatcctcacatcccattca

SEQ ID NO: 12926 - DNA, 1173 bp, Homo sapiens
acatgtaacgtctgccttagagccatgaccgaaacttgatatttttttctttcatgagtgtccggcatctgctggtcttcattgtgaaacgtgccagtcgtgctttgtgaaaaataacaaagtggtcacagaaatttgtgatctgaaaacccggctcccttccccacaaggctcctgggcctccgggaagacgggcccctgtttgccatctcgggggtgttccctgtgggagggtgagtgggtgaggccgagcctgctgcgtgtggagcctcgagtgggccctggctgccactaccgtacagaggccgtgtcgcgctgggctgggcctgggtggcctctgtctttgcatctctgagaaggagtcgggtggtaacggttggggtcaggaagaattctgccaagtatctttactgtcattctgaccatagcctctttgttcccgcattcgaacttttggttcttactttgctgctcgtttagtccctggggatttcagatcttaggctgttgtttcaccgtatgggagggttgatgtgagcttgcttggagacacacggtgcagcatcagggaccttcccaggccccagcaaattcaagtcggtctgcagacctctcagctacccgcgggacctcttgtaacccatcggcatcttccaggaatccgccgagtgacttgaggaagatgctaacgcagtaaggtctgtgctgggccaagagcagctttgaagctccagagaaccaccccgtcaggttccttgtggaagctcccctcatccgtggtgcagcaggctgagcactgcgcgtttgccacgtgctgcccgtgacagcacattgagccacagcatttgtagacaggacagaggggtgcctgccccctgcccctgctggcacatttaacccttgtcccctgacctcagttctgtgccccaccaaatgcccaggggcaagaggccaccctggaagctgccaatcttccaaggtgggtgtggggcacggtgggggcgggcagctcccaggcccttgggcaggctggggtgacggcagaggccacagcaccagctctgacaagtcctatcatcctctgctcagcagtgacctccctggccccactttgcccagagtttggggtccccccaggtatagctataggcggcagtgcctgtccctggcctg

SEQ ID NO: 12927 - DNA, 1228 bp, Homo sapiens
aagaagttcttcctggaatttttctttcgattctggcagaataaacaggtgtttttagttttcccactgtctgagccaagcaggaccctgtcccagagcaagagatgtccccttccatctctgacccttgcctgggacaagctttgatggggggccccagcttcaaggctgtggtgggaacagcacccccaaatgccagcctctcctttcttcccatccaccagtatactgcggggccatttctggtctttgtccaacaggaaacccatttctggtgggatatgccttccagtgccacagggccactcaccccatgcatctctgtcctgcccgtcagtgctgggacggacagcaagggcaagcccagtgtctggcggataggtgggtgggaacagagaggggagaatgccgtcctaagcttctgcttggggatcccccacacgacctgggtactgcctgggaaacctgtcctaagtaaaactatggacctcgcctcgcccaccggcctgcgaagccagcatctccgtgaaggtggatggaagcgcctttgtcctcattttgagctgcaagctgggtcagcggctctgaagccctcgagtgactttctaacccaagacccagcccctggcaggaggagggtgggtgcagggctggtgggacaaaaagaggcctcagcaggcctggaagacccttccagtacatcccacagcgtgtcgagcagctgggagaacctgtgtcaagctcgagccgtcataggtccccatgaggtgtctgaagccccttcttggtgatgggaggcagaggtgctgacgttctggagcatggacgtgagtcctcagctggctccgcgtgggcccttggagggtgccaggtgtgtggtgaccttctggatgcctttaacttcatggctgcgtcattcctgatttagaactttaaccggagcttcatctagtgattgcaaaactggaccaatgggaggacggcggcgcagcccgctccctccgtggaatggagctcagctcttcggaggcatcaaagcacctgtcgcctccgtggtccccctgctgagggagtgcggcctctgcaaggttcgggggtggcttcgtttgcctggagtggccggccctgcttgtgccatgtggatgtttgtgagcctcggtcctacagcactgtgtaggctgcatctgtttcgtgctggtcctgttgacttgtatgatatccacaaata

SEQ ID NO: 12928 - DNA, 2449 bp, Homo sapiens
gttatcttgggaacttaacctggcccctcacctcttctgcaccccccgcccccgaaactgtctcgtaatgaatttctgctgtcctcctgggagtggacggccgggtcccgtcccccgggagcatcgctcggctcagcaccttggctcccagtgggggccccgtggagggcgcccgtagtgataagcacaccggcacgaacgtcaggtccattcctcgaagtcggagccctcactctgccctgtcctggggctggctgagggcgaacgccccacctcactttctagagccctgtctgtcctagctcctatctgaccttgtgtgtaaatacgtacatctgtttttaaagtggatgggcccctgagaactcagtgaaatgcagagttctccatgcacctaaagctcctttgtcgctctcatggctgtcagatcctggtccctccacactgggtgctggggagggaggaccctcggggctaccgcgcgcccccccatcccacagatcaggagccaaggagggagaacagggcagcctgtgggactctaggatgcttcagaagaagcgacggcaccgtcaaccctctgttttttaaaggtggttggagactgttaacactgagctcattgacttctagagattttatttttactggttgatctcttggtggttttcaacttcctgctggaaactagaggtggggcaccccccaccccccagcctcgcactgtgtccttggggaaggcccgcccccatcctggccggtgtcactgtggcccggccacccctgagcgcccagctccctacctcctggacgtctctgagagtccaggcagagcagagggcagcgctcggccggtcatgctggctcccttggccttgcagcgagcccctggcccacgccgagcgagggatgcttctccctacagcatgtccactcccccggcatggccaggtggggcccctggggcaatggcagtggtagaacgctcaacttggttgcggtaccatcagcccacctgcatttggctttcgacttgcttgttctaagtcacagcgccctcatctttttagcaaggtaaaaaaaccaaaatgggtgttatctctgatatcttgaaaccagcgttctgaatagaggtaggttgagttttctaggggaaaacaaatggagaaaagaggcatgaagaaaagtaaaccgagaacataattaggcatcgggcctaagtgtcctggggagattggaggggacggcagcgttctgcatgatggaggcgctgccgggccccgggtctgtgggggccgtgctctcagggcgtgtgcgggacgccacctgtgcacacctgctcagagcacggctcctcgcaggggtgaaggggcagaccaacgaaaccagatgagaccaacgacaccatgcgagacacgcttgcagacactgttgttttggaaatgtgcttccctccatctgaaatctcatccctccacccgcccactcgggcagctgtgccgtgggcagggcatgcgctcccctggctgagcaccccagagattctcctgcaccttcctcatgccgcacgctgctcatccgtctccatgtgtgtttagatccatgccattcactgactcactaacacctgcaaaatctttaaggaaaaaagctgaagggtacgaccatgcacatatgtgacctggaaaatgcaaatttagatcttttatgatttaattattattgtttcccatagaagttccctccctttgaaattaatatataatgtataaattctgcactgagccatggcggagctgggcagcccctaggttagagtggagacggaggcccaggcgcaggggtcacacctcatctggtttccttcccatctcacagcttagcttgtgcttctcaacaccaagtctttaagagcaataaaaactacaccatgaatgtttgaattttttttttttgggggggggagggtggattttgcttttcatccagaaggaaaaggggaggagagctcctttacattttttaaattaaattcataaatcccagaacagtcttttttttttctttttcctttacaccctacttctgagcttaattcagttgatgttatgtccaaattcaggctgagtgctcaggctgaagcaactctgtagcccacagtccgtgctggccactgtcggggtgaggcacattctaggcctggcatcgctgatgccctctgcacccagtccttgagccaggccgaggacaggaagggcattgctggcctgtagctcctgttacccacccagagccaggcgccacactggaggctcccaggcgggagggcccaggcccacccacgggcgtctggccggtcaagctcccagcctgggccgtggtctcctggggacgccgctggcctcccagcttaggcccaggtgccaggtgtcatggggtctcctgccca

SEQ ID NO: 12929 - DNA, 1554 bp, Homo sapiens
tgcctgcccctttctctactgagctagtccccaaaccaaaggcaagccccctcgggcctcgggggatggggccggccacacccctgactccgccctggctctgccccatacccctgccgtggggccgacctgggggatgcagacatccggctccgtattcctgcctatcggggccaggatgcaaaaacaatttttgcgtaaaagatgtcacactgatctgctggagtggggtggacacatgaattcagttttatcatgaacactcgccactggctgcttgttaattcagggataatggtggcattcttacaaactgctcgggaaatagaatgacgggaacacttttagggagcccaggaagttaccagggacattggtgtcgccggcccaggcaacagcagcgtacgcttttcaaagatcattgagttgtcttagaatttgaagctgtgtaatgacaatgtcacctggagttcgtctccatttcttaactttttgttgcacaagtatttggacagaagtcgaactgtgaatgagatactgaaatgcactaaattgtattacattaaactggagttacttgatacaatgaagaaatgcatctgatctacttgtatttattgtctcagaattgtacgttgtgacaatcaaatgttacttgcctaaatgccaggaaattcaactggccttttaatcagcaagatcgccagcaagtactgtaactgtaaaggaaaatctctctctctggagaacccacacaaaccattgacctgagtgcgcatgacagccactggcttctttttctatgattgaaaatctgccatcgctgactgttggccagtttcaaagggacccattgtatacagggtgcaaatgtattatacggatgtttccttttgtacacttcatttttacaagttttgctactcacaagctttatgtagtggaggatagaggtatttttggtctttagaagcttgtcggggtgagggctgctaacttacacttcagaggcctgtgtcccaaaggcctggctgcgtttgccgtgctgtgcgaggacctgtgtacacaggcaggtgtgcgcctgcccgagcgcgagtagctcttgtgtagtggtgaaatgctgcaggcatctgtttattaaaattgctgctgtgaaagacagggataaaatatccacaatataagagaaagcgactccgtgcctccttctgtttcttcgtttccagtctgcatagatgtctccaaggggaaaccagggccaccaggcactcctgtcccatggggccacccaccttcagagcccactcccacgggctctgtttccttggaggccatcctgccgatggcacttttcaaggccctcccttccctacgagttgctttctgggaggggaaattgaaaaggagagcggtcacctggcaaaaacacaggggaaatcagccagtccacaaaaatacgcaaaatgacctgatgatgtccaaaaaagggttttaaaagcgatcaaggacaaaaggttttcctaagtggcatgtatacatccaaaactactcttt

SEQ ID NO: 12930 - DNA, 1164 bp, Homo sapiens
aggggtacagagctcagaggctgtggtagaagctgccgggaagcttgcctggggttcctgtgggcagtctgggctgtgccatgacagccagcttgcctcctgagatgaaggcacggcacacagcaggatggcagtcatgtagtgcttgggcccagagctgttggccatagtgggcctgggttttaaagccctgacttgcctaacagacagtattgctgtgggcagctcactcaaccctctgactctcagtctctttatctggatcactgggacgctcacatcccttggggttgtgagaactggggatcatgcatgcctgtgtgcggcactgagacccacagagcacgcccgcaggcttgctaggccgctgggctttttattcaatttaagtcccgagcctgtcctgatgctttaaaacattgcggcctttgcaggctgttattaggcacattttgctgtataaactaaagggcattagttaacctgctttcacagtgacttgtttgtttttaggataccgaagtgtataaagctacagtaaaagatgacctcaccaagtggcagaatgttctgaaggctcatagctctgtggactggttaatagtgatagttgaaaatgatgccaagaaaaaaaacaaaaccaacatccttccccgaacctctattgtggacaaaataagaaatgatttttgtaataaacagagtgacaggtaagtgtatctttaattttacctcatttggttaatacttgacatgatacagattgctggcttcctgggtagtaataaatatttactcagcaatctcgagtgagtgtccatggggtgctgtcaaggagacctggtgcctgtccttgtggagttcctgtttaggcaggcaaagaactcgaagcagtcatcccccgagtgtgctgcctgggaggagcgggtcttgggcccatagtcctgggaggcctcttggtgggtcctttctgaagactgacagcagcagctcctgcagttcttctgtagaacgggtccttaaaggtttttgttttttttttgaaatgacggcacctgtgtttttttctttaccttaacacctgagagttcctaagaacacaagttataaaatgctgacctaaccccttcagaaactgtgaaagggaatcctgaaactttggca

SEQ ID NO: 12931 - DNA, 1142 bp, Homo sapiens
tgtagaacttactgctcgtgttcatgaccagttcatgatgaagccttttcctaacctggtttcttaccgcctgcctcatgtttttgactgtttatagacggaagaagctagatgcggtggcttatgcctataatcccagcactttgagaggccgaggcaggaggattgtttgagcccaggagttcgagaccagcctgggcaacatagcaagacctcacctttacaaaaaaatacaaaaattaaccaggcatggtggtgcgtgcctgtgatcccagctactggggaggatcactggagcctgggaggtggaggttgcagtgagccaagattgtgccactgcactccagcctgggccacagagcaaaactctgtctcaaaaaaaaaaaaaaaaggaggaggaaggaagaaaattgccgctcaggacaatggcagctgctgagtcgtggtgctgtgcatggagggtctttcccagatagtctgttcatgtctttgcaggtgtgttgtgctctccgaccccttgaaggactcttctcgaactcaggaatcctggaatgccttcctgaccaaactcaggacattgcttcttatgtcttttaccaaaaacctaggcaagtttgaggatgacatgagaaccttgagggagaagaggactgagccaggctggagcttttgtgaatatttcatggttcaggtacttgactcattacagaactagacagttccttctctccttccctcctttgttccctccctctctcctcctttctttctaagtaaggcacctctcgtggtaatctcattggcagagtttttaaaaacaaaaaacctggaatatctttaggactagaaaggaagtgtatggaagcagatggggcatgaaaaggacacacacactgccccggggagcctctgggggcaaaagctggagcagtttcagtgacagaataaataaggatagagtcgaggtttaacccatggaataaaattaatatccatgagtctgtatcgatagaaatcatcagttaaataaataaatggaggagaagggtcaactcttccatacagaagaattccacttaaacgcagaaggaaagaaaaacagaaaatcacttttaagccagtgctccagcaagaactgttgg

SEQ ID NO: 12932 - DNA, 1210 bp, Homo sapiens
aggtggtttagggataaatgtttctggaaccctgtggtcccccataatgttgatagaatatcatatgcactgggagttaaatatatttaatttaatgatcattatatatgtgggggttaatatgttgtttttctgtccctttaaagtctttacatgtaattgtagctgtataatcgttatttttcttttgcatcttaagtcttagaaattaagatattccatcgtgaggatgagagaggtcctcagtgtgtttttggtctggttgtagggaaggactcaagtcctggaatgtcctccactggtctactgagttgcagtcacactgttccaatggattatttgctttcggttgtaaatttaattgtacatatggttgatttattatttttaaaaatacagactaactgatgtaatgtttatgtataagttgcaccaaaaatcaaggacaaaaataagtgtgtttgtttttacaggtgtgaaagtcacagcttgtaaataagtgttgtatgtattaaaccttttccagttctccaaagcgatgtatttttgtacacttgaaatagagtactcttaatttactgggcaaatgtgcttggaattgaacttgacaagattagctcaagcagatagagtcgggtccagcagtgggtggccctcgtgtgaatccccgtggatgtgcaagttgtggagagaaggagcaccgggttcctgcccagcactgtgcttgcgggaggcggtggggcatgggaggaaggaggcacagaccggggaaatatgacagccgtcatttccagtattctctgtgttgtcttttagctcattcaataaataaaggtggtgtgatttttttttcctcctgtctttttcatttgtagaaactggagacgtgtaaagaagataaataattgtgtaattaaactttccagaaatttatcttcctcatgtgcagtttaacaaacttggtcaaactagttagcaaattagaacttcagaatctaatgatagtttagggtttctaaaataaggttttttattgtaaaaattgacgattgccctgcatttctaccaagtcctgtgaataaagagatgggagatttgattccgtcagaagagactgtaatccgtgtcgtcagcctgggagccttccccagtgtaatgtagctttctctcttaccttctggaagagggaatgtttcatttattactgttt

SEQ ID NO: 12933 - DNA, 1231 bp, Homo sapiens
cgcagcgccccgcctcctgtcccggggcggtctcggtcgccagaggagccaggccgggggcggggcggggacggggcggggacacggctgcctccagcacaccgcgcgctgggcgctcagagcctcgggcgcggcgggagcgcagttagagccgatctcccgcgccccgaggttgctcctctccgaggtctcccgcggcccaagttctccgcgccccgaggtctccgcgccccgaggtctccgcggcccgaggtctccgcccgcaccatgcggctgggcaggtgagccggggaaggagcggaggcgccgcggtcaggggcggggtggctcggcccgcgcgtccccagctcggctcggacgcggggcctgcggggctcgcctggaggtgccgggctggcagtgcgggtccgaggagcgggcggcggaggcgccggggcggccggcggggcgtggacggcagtgggcggcggggcctggcaccgggacccatggcaggacgcacagccgtgcgggggcgggctcgggggcggggtccctgccagggaaggaggaccgcgaacgctggaaggagggagggaaggcgggcgcaccctgcacgccggggcacgggcgctgccccttccactccctggcactgctgatttcctagaagaagggagaaggagggaggtgaccggccgagcgctctccaaggccagctggtgcccacggtctgcggacacgccctcccccacacacgtgggattccccgcagcccggcagccgatccacactggggaaggcggggctgcctgaaccaggagtgacagcttcctcctggatttttgcgaaaatatccaaaatatactcttcgcaacccacgttgtagggtccgcagcctgtgctcccctgggtgaacctgtgaggcccctgaccccagggatgcctcccgcacagctcagagctgggccacaccggagtcacactccccaggtcccctccccattagaagtgtatgcagttatgatcctgccctagagagaaagaatttaaaggtcccggaatgtcatagccctcccaaatgtcttagccctccgccacccacaccttcaggtaggcggccctgtccatgctgggtcttgaggcaagctcggggtgggggtaggttagatgcaggggtgctgagggtccaaggaaaggacacagaggccgctgcttaggcagcacccagggaggggacaagccagaaaca

SEQ ID NO: 12934 - DNA, 1247 bp, Homo sapiens
tgcttcccaggggaccagcccccggccgggggaggcgggaggcaagggagtcatctggtcccctgttgctcactccacctccatgagaaaaactcccagaatcaggcgggggttccggggggggggtcttaggcacctgggacaactgagaggcaggctgttcccctcgccccctcgcagcgattccttcccagccccatctccggggccacccagtgggcgctgcgcttgctcacaaccttccctcccctcctctcagcagcaggcactgggctctggtttcggaagaagaattgtccctgctggcccagaacaagcagagctcgaagctcgcggccaagtggcccaccaagctggtgaagaactgctttctccccctaagagaatatttcaagtatttttcaacagaactcacttcctctttataaatgagtcactatactgtgaagaaaaagacttttcctagaacaaaggcaactttcctcacgttgtctctttcctcttcggattcttgtttttttgcgtctccgtcgtcactgcagacccacgttccgttgggttctggagactcagggtctctcccccatcacgctggctcatgggacggggcgaggcccacgccgctgcacacaggaccacacgtggtggtgcgcgatgtacttcctgaaagcatttctgtgttctagttgagaagttcgagtatatttattataagatagttattggtcacgtctggtgttttatgtgtaggcacagccatctgtcaccctgcagggcagggggtggaggccagaagtgagcaggaggcgtcttcggagcgcctgcaccgtgtcccgcatgatgcactttctgccggggccttccccttgagaccgctgtttgcgttcatagagaaaccacgcaccctgattgtagctgcaccaaacagcctggacctttgcaaaagtacaggacctcagccttggcagacaaaggagggacctgctgaacagacggtgcggaggccaaggccagatccacacacaaaagtacaggacctcagccttggcaggcaaaggagggacttgctgaacagacggtgcggaggccaaggccagatccacgcacaaaggatgtcacttgtgggtcctaccccaggtggtattgcttgcaaaaagcagggctcctcctggccctctgcagtctgagtctcagtgaggataaacccagcagaaagctctgcctcaggctgtgctcgaatcacagga

SEQ ID NO: 12935 - DNA, 1276 bp, Homo sapiens
agagtcagcaaccatcatcaccatctaattttagaaggttttcatcaccctgaaaagaaaacccatgtctagtaacagtcactccaaattcccccttcttgcttcccttcttttaactctaggcaaccactcctcgactttctctcaacgtgggtttgccttttctggatcctttgcatttccgtatgaatttaggatcagcctgtcaactcctgcccaaaagccagctgggattttgagagggctctgcagctccatttggggactcatgctattttaacaatattaagtcttcttctttttttttttttttttttttttgagacacactctcactctgtcccccaggctggagtgcagaggcatgatcttggctcatagcaacctctgtctaccaggttcaagtgattctcctgctcagcctcctaaagtgctggaattacaggcatgagccaccacacccagccaatgttaaatcttctgatccatgaacatgggatatctttccattttgttccatcttccttaacatcttccaacaatactttgcagttttcagtgtataagtctcatatttgtttggctaaatttattcctaatcgtctgctgtatttgacagcactgggaaaacacagtgtgctttgaatgtttcctttagacatctgcatctgctgcggaagtctccaggttcacacacagcaccctctgtttgagggagggatctgcgccccatgtaaggtaggcagggaggctgggggtgactccctcatggcctcagagcagggatgacacaagccagccttgctttgctccttccaaggacaagttcctggatgccctcttcctgtacgacgatgacgggtaccaatcctactgctccatctgctgctccggagagacgctgctcatctgcggaaaccctgattgcacccggtgaggcgaggggcctgcccaggggggtgaaggggctgaggacacacccatcctttcagctactcattctggagtgtgggtggattttcttcccaaatggatgatttccctgagagcttctgatttctgtctccaatgcgtcatttggcatagagccctgagctatgggaggcgggtgtctacggttggcgattgtgatttttcttttcggtgttgatattgccacatcgctgtgcaggggagcgatggaaaccccacaccccaggctgccagtcatgaccggggtgacaaggggtatgctcacccctcagtcgttactccctcgcctcggctccctccgtgg

SEQ ID NO: 12936 - DNA, 1289 bp, Homo sapiens
agatccccgcatgctccctgccttatggtggccctgcaggaagcccgcgtcctggggttttctgagccagggaggggagtcagggtggctgggcatggggcccgaggtgatggggcccgaggtggggccgctggctgccgatgcagggcccaggagtcacttgacttggccaggggcagccgactgccggcctcgggaggcagcttctggcctggacttggagctggagagagcaggcagggtcctcgatcgggaacagacgggaacggtgcacgggttggaaggaatgggtgttcacaagctgcctgggaggctccccgtggggatcctgtctgcactggcgttggccttggcccaggcagcccaggggagtccagggaaccgggcctcacctgtttccagggtggcgctccaaccccctttgaccggaactatgggaccaagctgggggtgaaggccatgctgtggttgtcggagaagctgcgcgaggtttaccgcaagggtaggtggtgggtgcgacccgaggcctcactttgccctcccctggctccctggggcagggcctcaccatggagggctgccacgtgcctctgtttgcaggacgggtgttcgccaatgccccagactcggcctgcgtgatcggcctgaagaagaaggcggtggccttcagccccgtcactgagctcaagaaagacactgatttcgagtgagttccaccaaagcctcgtggaggcgggtggggctgaggggtggcccagaccttccctgaggcaggtgtgccaggcccagccccactggcaccctgaccccgcaaggcctcctgggcccccatgcccaggtccccgccaggccgtggagagcagggaccatgcccaagtcttctgagcacaacactgggcaatcctttcgggtgggcatgggggcacagcgggtagccaggagtgggcacgcttgagggcggctgaggctgactctgtgctgtgcctccgagggatggggaccccagacctgtcccagctccacggataccgagatgttcagacagaggggcatgcacaggctgcagggtcggggggggtgggggggctggggacgtggctgaagagctgccctgacccctgactccccatcatcctcccatccccgtcctgcacaggcaccgcatgccacgggagcagtggtggctgagcctgcggctcatgctgaagatgctggcacaataccgcatcagtatggccgcctacgtgtcaggggagctggagcacgtgacccgccgcaccctgagcatg

SEQ ID NO: 12937 - DNA, 1730 bp, Homo sapiens
cacaccgccaagcagctcagcattctcccccggcacacttagtgacagtgatgctctgtgctggtaccaaacaaggcagacttgcaagaaccatggcatcttttttttttttcaaacctttcctacttcaaacaggcttctcttctgaaatgatgacttaatgtcgaatattgacagcttactgcagttttacagtattcctcacaaagggcttcaggtagattatcagagctgtcagcactacctctccccgctgaaaccagcagttcatggcttcctgtggattccctccctccctggagtgttgagggggttgtacctgccagacttccaggggacgatggaatacccagaacgctccttctgaagaaatggggccctgtagctgcagcacaggggaagggcccggcaccctttctgggtccttcctggttccctgtgggccccatgaggagtccattacttcctttcttccttcatattttacaggcagatgcttttcttataatctaattacatcttttcatttgttatatattacaaaccatcacacttagaaatacttccaggaaatgcttttttgaagtgtgaattaataagaaatggggtaaatagaaaagaaatttattgctgattggccaggtgcggtggttcgtgcctgtaatcccagctctttgggaggccaaggcaggtagatcacaaggtcaggaaattgagaccatcctggctaatacagtgaaaccccatgtctgctaaaattacaaaaaattagctgggcgtggtggtgcacgcctgtagtctcagctactcaggaggctgaggcaggagaatcgcttgaacccgggaggcagaggtagcagtgagctgaagtcccgccactgcactccagcctgggcaacagagcgagactcagtctcaaaaagaaaaaagaaatttattgctgatcacaaggacagacagttttttcccgaccatactcatcaaagatttacgtttgtatattagtaactagtgcattactagagcaggtgcaggtgaggtctttaaagtttcaatgaaagtttcttctggatctacagaaaaaatttttttttttcaatctaaaaactggaaattctagggtttttgtacattttggatgcactgggaatttattagcacaaaatcattctttgcaactcaaaattcagaagggactctaccatatcttagctcagagcacagaggagtgccttatccccacacttgactgggctgtggaggtgggcatgtgggcccctgggcccaggctggggacagagcccttgttttgtgacttaggattttgatgtggttcccatgttctctaacagggccagctgagcagcacaggccaggaggccacagtgtaagcaataacagatctgccacatgcagaagcaaatatcaggcctgtcgcacacgggcggcatttaaataggaatttctatttttgaaataagggatggtctatgaggcatacagtagatttgatgtgatccttttctccctcccttccataatggatcgtggtctgtgtgactgaacccacacagagtgtcatgggtgacagtttctggttgaagtagctccacgcctggcttctgtggacagcagattcttttccttctcacaaggggctcatttaaaatttggaggctgggtgctgtggctcacgcctgcaatcccagcactttgggagactgaggcgg

SEQ ID NO: 12938 - DNA, 2161 bp, Homo sapiens
ctgagctgcagtgaggggacggacaagagccaaggtgtgaccaggtgatgtcgctagtgtcagggaacactcatgccagtgaggatcttcccactctctgatgaaaactaacaggctcccctctctctcgctgtgcctgttgtgacaaccatgacagctggagatggaggacgaggacaccatcgacgtgttccagcagcagacgggaggtgtgccggagagcagcctggcagggcacagtttctagagggcccgtccccagcccgggccgtccatcctcgcattgctgttgaatggtgagcacgtgaccatgccgaccacaaaggtgtctgcggaaactcgaggacattcaccacgatgattttcctctctttgatgtacttcaagtgcaactcaaaactatatctgcagggatgaatctgtaacttaaattgggccaatcagaattgttatctttgttcaggtaaaatgagttgcaagatattgtgggtacttttgtgtgctcatttgtgttttccccccctcctacaacatttttttaaccccaaaattatagcctgaatgttcgcttttagtctggccagggatctgactcctgagttggttgcctctcccctgctcactccagtcacatagagaattggtgtttcccgcagtggggatgcagctgttggacaggtattgggggcaaggttggtagggaggacagactgtcacttgctgttacaggcacaggtgattaaaatgctaaatattgcaaatttaagctttgtcagtatatggaaaagttgaagggaaaatactggaatgcttcttcaaaggttaaaaaataaccgagtcttttggtaatttgaccccacgtgctctctggccctcaagcatgtaacctcggggtctgaggcccaggacccacccccctgccacccctcccaccccactccctgctcagtacctggcgttggtacacaggcaaggattggcacaaccaaaattggcctttttctccctcttaatattgaagaaattcccacatttctcatttggtaatggtgttgtggcctcagatttcttctagtatttgcttctgatgaatgattatggtctatacataaaaaagtaagactaagtattgctgaatttgcagttatgttgtcgtgtataagagctacttccaagtgtggttacaaatgaacccatggaatgatgacttcatgttcttctcgtgggtttgtgccgtgctgctttccaaataggtattgaatttatgcattagtctggtgatttcagttctgtgaaatattttgggatctataccaattaaacattttcatagttctgcctattgtccttccctgaggctccattgctgcttggtggccattctctgcctttttacagtcacctgaacaatgacccatcatctcttgcttgcttgaaatcttgctgaaatgttctcatttcctgtttgctgtatgggctcgggtgggatgtttgttggctctgttgtgtttattcaccaatttgtacattatttgttgtcctttactactgtaaacagtaaatatagtttggtattctgtctcttggcttctactaaacactgcatttgaaggttggggcatactggtacaattcagtgtttgaattgaccattccaggcagccactgcactgagaaactttgattgaaaagctagccgctggaaggttagtattcgcctggcagctcatttcccctcccctggcacatcaccaatgctagtccagccttcttcctgctgagggatgcatcctctcctcagagacctcctggctgacagctgtctgagctggcatcactgtgacatgttaccctccctctcctgggtttcgtatgtaaagaaagggtggattttagaggcaggtgagcttgggtgttagtctaggacatctctcgttttctggtgtttgaatgtaagtcagctttccttctgccatggacaacttacctatctgctttgaaactgaactgacattgatttggctttaagaatttcccagtgtgcagtggtgtaacaaaacccaggttgaaaatgagctgttttagcccatcagttgaatgaacccaaggtgaagaaagatgggcagctgtggagatggaacacgtgattcacttgcaccag

SEQ ID NO: 12939 - DNA, 1182 bp, Homo sapiens
gtttctgtaaaatcaggatacgtggctttagtaagcagaccaagcgcttcgtggcagggaaagcagcgtgcggggaagtcactgaaaagtgctgcctaaggaagtttggaaatagtccctgttccagattgccttgaattttaaaacattttgctttgggaaagtaggtcagcagcacctaagatcaaggatgcgttccattttcacacttcacagtcatgaaaactgagaagactgtcttcagcgtgaactaaagttcacaggcagatcactgatccagaacacttcaagaactcgtcaaacagctcgataagcctttttgactgtgtacatctgtaccgggaataacattcctaggctgaaatttccacaaagaatagaacctgtacccagttcttcaggctgatttccctgacctcttgggcatttgtatttgtagtaaagtattgcagagattcctaagtattttatagcagccatcaaaattggactttgtattgtttattcataaaagacacttggtaatagacttcagtgaactctgtatgaatgcagtagtgtgtgtgcaaaatccgcttcctgagcgtagggtgctgagctggcgctagggctcggttgtgaaatacagcgtagtcagcccttgcgctcagtgtagaaacccacgtctgtaaggtcggtcttcgtccatctgcttttttctgaaatacactaagagcagccacaaaactgtaacctcaaggaaaccataaagcttggagtgccttaatttttaaccagtttccaataaaacggtttactacctgcgtgtgtttagtatgctgcgtgttcctgtgttccatctcagtggtgtcgacatgaccgcttggaatgctgggaggcaggtaggcttttttgggtaaagtgggcctctgacccatcgtgggatgcctgggcagtctccagactaaatgcctgtggctgtcagaacggaccaggctgtgtcctaaaactgtgcccacgggcctgcctcgcaggggaggtcttggctgtctctgccctccacagctgccctgcgcaccgcatgccctccactcgcgctgggtgccgagggccgggggagaaggcagggctgcctcgggaagggcgaccttggcccccccgtgtgaaacgcacacctgcatgaggctcccgcgctccctgctc

SEQ ID NO: 12940 - DNA, 1282 bp, Homo sapiens
agttcccttcctgagatgcgctggtggaggagggggcagtctctggaatttctgtttggagactttccggaggcgtgttcagacataaaatcacagcagcagcagtcagttttcaagcaaagagacttctctgggcatctctgagacgagtttgagcagtgtggggattcgttttgggagcacggcctcactgacatgcagatgtttgcttgtggaatgcctgcgcctgccctcgagaaggaggtggcactcagctgcttgaaacaaggctgggtcccaagcagcccagccctgccctgtggacagcaatcgaccgatggctacagcatgtcctgacctggggacagctggggacaggttgtggggctgtttcgtcacagctgctgtcacattaactgaccccagccctgggggagggtggctgcaaccccagccgcacagcctggaggaggcagggtgacgagggactccagctgggggagctggcgtgcagagcactgagggggtgggtggattgtggggtgaaacctgggtgtgtgcgtgtgaggatgcacatgtgtgaacgtgtgtgtgagtgagcacgcctgtgtaaactgcctggctccacctctgatgggctccgtgatcttgagcggggtcaccaggctcatgcctcagttttcttcatctgtgaaatgggccgatggccaggctgcacacaggtcctcagagggcataaggcacactcagcacccactgctgtgcctgggcagctggcgggggggcacagcagccactcacatgccactcacatccctgtgggttaccggctgcctggaatgttccagtctaaccggatccttttgtggacggggagactgaggccgggaaggagtatgcattcctgccctggtcccgggctccgtctctgctgggtctcctgggcagaaggtcaggaagggctgagagggacacagtccaaggcaggtaaagccccagctttgaggggaggcacagcagctctgagagggtctgagcccctcgagaccctccccgggatgtttaacgacttgggcagccattgcaacagtggaattggcactgcagcaagctgagcattttttcggttccaagtttcccacaacacaatggctccaggccaggcgcctctgggcgttccaggtcagagggggagcaggggctgggggccgctgcctcagtgcttctgggatggggtcctggcttggagccccaatccagagactcagcagccctgccccggcagagcctagcggagcacgtt

SEQ ID NO: 12941 - DNA, 1214 bp, Homo sapiens
tggtcccttctccccactggctctgcccatcaatgctcaaagcatggaaggggaagcctgtggacaccatgtctgctgtgcccatccctgctcaaagcatggaagggggcctgtggacaccatgtcccgtgcagacaccatgtctcctgcagacaccatgtcccctgcacacaggtttctgcatggagcctgcctgtcgtttgggaatgagtgaaccagggtggccgttgggtggctgagcccaggggatcagggcaggctgccaggcacgtggagagccctcccagactcagtttctcctttctgcccctgcctggctgcctctccaggccgcgtcggtggcccctggttccgtcctgcacagccacctcaccagctgtctttctttttgcagagcgcatcagcgaggaggtggggctgctgcagctccttggggaccccccgccccagcaggtcacccagacggatgaccccgacgtcgggctggcctacgtctttgggccagatgccaacagtggccaagtggcccggtaccacttccccagcctcttcttccgtgacttctcactgctgttccacatccggccagccacagagggcccaggggtgctgttcgccatcacggactcggcgcaggccatggtcttgctgggcgtgaagctctctggggtgcaggacgggcaccaggacatctccctgctctacacagaaccaggtgcaggccagacccacacagccgccagcttccggctccccgccttcgtcggccagtggacacacttagccctcagtgtggcaggtggctttgtggccctctacgtggactgtgaggagttccagagaatgccgcttgctcggtcctcacggggcctggagctggagcctggcgccgggctcttcgtggctcaggcggggggagcggaccctgacaagttccaggtaacccccactgtgccgtcgctgggggactggagcagctgggatggggtggggtgggggtggccactgggacagggacggagctgtggccggaagaggagagcccccaccccagctgtggtcagcccgggcctccagcgcaggcctcctgggttcttggctgctcagccctggcctccggcgcaggcctcccgggttcttggccggcctggctggggtggcattcactttcttggctctctggctcctgcgcccccaggaagggtagccctggg

SEQ ID NO: 12942 - DNA, 1302 bp, Homo sapiens
ggcagctgtcgggggagatggagcagccgtcggggatgggggagatgccagccgctcgggcctcacggcctggcctccattccagggacctgcaggacccaagggcaacctgggctctaagggcgaacgaggctccccgggacccaaggtaaggggctcaggtgctgtccctcaaccccctttgtgacccaggggtggctccagcctgcccagatgaccactgttgggagggacctgggaccccccggctgctgctgtgacacgtgaggggtacatccctgctcgggccgtccctgtggtcacctcccgtgaaaggacccagcctgcgaggcccagtcacagcggccctgccttcggggctctgggtgaggctttgtggggaaggagctggccctgactctgctggacctcctgccattccagggtgagaagggtgaaccgggcagcatcttcagccccgacggcggtgccctgggccctgcccagaaaggagccaaggtgagggccgggcagcctccttccggcaggcgtgggggctcctggggctgtggagacagcctggggagggtcttcctgagggtctggctcctgatgcacgagcctctcccaagcagggctctaccatccaggcctggccctggtggcccctcctttctcgcacccatgtcggcggttccgccggcccctcgtcctctccctgcccctcgtcctctccctacccctgagcccaccctgctgaggggaggttctcagtgggctgcagctctgagctcgcgcctccctggggcctggcctgtggggtgcaggagcccaggctgtaccagctcagcctcagcaggtttctggctgcccctccagcctcttcctgggggccctgatgctgtgggcagggcccggagtcagttcctcaaggggcctgtgcctgcgtccccacccccagcaggcagccgcccagaaaagccctcggggagggtcctggggagaagcctggatctttggagtgtgggccaccggctctcccactttcagagggagcagtgagccctccggggtgtttggggtgggcctcagacacaggatccccaggcccagtgagagctccactatcccacccagctgtgcattggagctggggcctgtggcaaccaggacactgcgtggcacatgccctccaccctccaccctccacccctgcttcagggtcccggggcatgcatgcacgcaccaacctggacgcaaaccccaaacccgaccctcccctcaccagtggctcctgtcctccccagggctgcctgcgccttg

SEQ ID NO: 12943 - DNA, 1296 bp, Homo sapiens
cgcccacagccaccgcgacttccagccggtggtgagtgcccccccaaagtgggcttggctccatctagcccctcggctctcggcagcagaagagggcccagcccctgcagagctgctgggggtcccaggcttcggccatgggtgggggtctggcggctcagggccactcagggcggcttggctggccctgggacttgccctctggtggccaagcagtggtcatgaaagtccagccgctgtcacatccttgaggaaccggcgtacctccgcctacagcggcagctgggggcacccacgtggcccggggctgctctgacctggcagcgtatgggggctgctgcctgggcccctcagtgtgtcacttgcgcgcctcccgctcagcgcccctcggccgtgcctgtccacacaggtgcggggccggggtggtgcgcccggggcctgggtgcagggggcagcgtgggacacagcccgtgacgcgcccctctccccgcagctccacctggttgcgctcaacagccccctgtcaggcggcatgcggggcatccgcggggccgacttccagtgcttccagcaggcgcgggccgtggggctggcgggcaccttccgcgccttcctgtcctcgcgcctgcaggacctgtacagcatcgtgcgccgtgccgaccgcgcagccgtgcccatcgtcaacctcaaggtgggtcagtccagtcctgagggcgcgggctcctcggcccccacttgacctctggggtgaactcccagcggggagctcccctctagggcctctggaggccaccatgttacagacactggcgcctaggctggcgacttcagggcaggctccgggtgggtcacacccctccaggctcaggccaggcctctgcatccctgggcactgccacgtcccccagggcatcccatgaggcccccccgtggccccctgaccccccgctcccccggcagtgcccctcagagggtcccatgctgctggaccaagtgtccacacaggtgatagggctcacatacaagcctggaatcaggaaccgtcctttgggcctctagtgccatgcgggctggtggcccctctgccacagcacccatgtggctttattctgtggccccttttcgtgcactgggctgtggcttctgggtgccccggggagcacccacattccccagaaccaacagcagaggggtcagagacccagggctgggagcaggcggctgtggcctggcgttaggggacagggtcccctgccttagccaaggcctcttggggtctgcagaggctgcctggcc

SEQ ID NO: 12944 - DNA, 1790 bp, Homo sapiens
tccgagcatgtgtgcccttaaaatgttgacagaaatttccagggtatctagaagaacgcttcgtcccaaatgtcgctgtgccctccccacgtgagcgccgcgattcttccaacactcatgcatttaggggtgtctcggggtgccacacagcgtgtccccagcagtgcctggccatctgctgtaacggagatgcacctgccaagggtctctgacaggagtgctgtgggcagggctgggccccagggaaggcctgaaagccaggagcccgggaggcggagctggttcctagcgaggcagccacaggaagcctctgctcagcaggcatgagggccaggttcacccagccaggccaagccctggcccctctcccctctgccgtgggtgtgtctggcagaagcagcatggggggcagtctgggagatgcagccccctccacaggcagccagcagggaggccatgtggccctccaggttgtgggagcctctgcagccccctggtaaccccagggctggcctcctgcctccacctttcctgcccggggagcggcctctgccctaagcagagcaggtctgggtttgactgacggcccggcgcgtcttacaggccccagaagagcgtgtggcatggctcggaccccaacgggcgcaggctgaccgagagctactgtgagacgtggcggacggaggctccctcggccacgggccaggcctcctcgctgctggggggcaggctcctggggcagagtgccgcgagctgccatcacgcctacatcgtgctctgcattgagaacagcttcatgactgcctccaagtagccaccgcctggatgcggatggccggagaggaccggcggctcggaggaagcccccaccgtgggcagggagcggccggccagcccctggccccaggacctggctgccatactttcctgtatagttcacgtttcatgtaatcctcaagaaataaaaggaagccaaagagtgtatttttttaaaagtttaaaacagaagcctgatgctgacattcacctgccccaactctcccctgacctgtgagcccagctgggtcaggcagggtgcagtatcatgccctgtgcaacctcttggcctgatcagaccacggctcgatttctccaggatttcctgctttgggaagccgtgctcgccccagcaggtgctgacttcatctcccacctagcagcaccgttctgtgcacaaaacccagacctgttagcagacaggccccgtgaggcaatgggagctgaggccacactcagcacaaggccatctgggctcctccagggtgtgtgctcgccctgcggtagatgggagggaggctcaggtccctggggctagggggagccccttctgctcagctctgggccattctccacagcaaccccaggctgaagcaggttcccaagctcagaggcgcactgtgacccccagctccggcctgtcctccaacaccaagcacagcagcctggggctggcctcccaaatgagccatgagatgatacatccaaagcagacagctccaccctggccgagtccaagctgggagattcaagggacccatgagttggggtctggcagcctcccatccagggcccccatctcatgcccctggctgggacgtggctcagccagcacttgtccagctgagcgccaggatggaacacggccacatcaaagaggctgaggctggcacaggacatgcggtagccagcacacagggcagtgagggagggctgtcatctgtgcactgcccatggacaggctggctccagat

SEQ ID NO: 12945 - DNA, 1245 bp, Homo sapiens
tccgaggggttcttgggaaatggtgggaaccccccttcaggcctgtgccaggtggtggaggtcgggggggctgtggtgagcactgtggcacctgctcctggggctggcctctgaccgctgtgcagtgttcagggtcagcctctgagctggaggagggtgagcctgggagcaggcgtcggggtgtagggtgccagtgtcccagccaggccctccccacccgcctcacccggcctctctttccagttccagttatactccgtgtacttcctgatcctgtccatcatctacttcttgggggccatgctggatggcctgcggcactgccagcggggccaccacccgcggcagcccccggcccagggcctgaggagtgccgcggaggagaaggcagcacaggcactgagcgtgcaggacaagggcctcggaggcctgcagccagcccagagcccgccgctttccccagaagacagcctgggggctgtggggccagcctccctggagcagagacagagcgacccatacctggcccaggccccggccccgcaggcagctgaattcctgagcccagtgacaaccccttccccctgcactctgtgctccgcccaagcctcaggccctgaggctgcagatgagacttgtccccagctggctgtccatcctcctggtgtcagcaagctgggtttgcagtgtcttccaagcgacggtgttcagaatgtgaaccagtgactctcgggcgcccctgtggtaactttgcaggcggccctcagtgcatccccacgacccctgcctcgagggccgcctgccttagcaatgggggcctccgcttatcctgctagcaggccccctaggattccccctgccctgtgccgcactctggcggtggccacagcgtgctggcgacactcagggcagctgcctggccatgctgtccctgcactgtgccccgcgggctttgttgctggaagaggtgggtggtgggcttctgcgtccaccaggcctcactggctcatgccccttggggggcttgagacaaatcctttctgccccccagggctagtgaagtggcctcttggataccagctcaggggacactggccccacaggagttgtgagccctctagggcagggtgggagccgggaccctcaggtgtagctgagctgtgacattgctggtcatccttggtgctcttgcttttttgaaagatgctttttttttttttaactgacgtagaatgaagaactgca

SEQ ID NO: 12946 - DNA, 1285 bp, Homo sapiens
cagcccggcctcacgtctgcccactgatgagggcgttggttgtgaccgtctctccctctcctgcctttgtctgttccaggctgacgtccgaggtcaccgggatgggcacgctgtaatcctacccagcacccttcccccgcgtcacccacctgccagagcctaaggcccccggctctcgcactctgtacagcccaccttccctgcctcacagataccaatagagaggttttcttaattaacaaaaggacgtatgccatggagaaacacacccgcgcacacagctgctctctacagaggctgcaggctccgccgagtcccccctcagtgttattttatttatgacttacgctcccgtctgcccatgcaccggcatgcagtggtaattattttagaaatattgttccttggtgtcagcgtagctgtctgtcttaggagctgggtcggcgttccgacagcacttcctgtccgcccttctcctctgccatccagaaccgtccagaactgttgcctgagacccctcctctctcacacagccctgccatgctgactcggtttcccctcagagccattgttgtctgggctcgagtttctgccccaggttgtgtgctggaatcggggggtggctctcctgccacccatggggagcgccaggagaggagggtcatggaggatgttggggctctgaccccaggagtggggtggagggcggagcctgctgggggccctgccttcacagagatgccgcgtgctgggaaggctcttggggtcccctgagcgtcttccagggtggctggagagcacagacgcgccagggagccccctctgtgctcctcagagttcaataaatgtcgtggcccctcctcaccggctctggcttgtctctgcgccccccaatgcacccaggccccggcacttccttcccctggggagacattgccctgagcccaatgcttatcgagaagcctgggtttcttctcacacacagataccatttcattccccctttccacaacacacataagcacttctatttgtactttggcaaaactacttaaaatgacaaacacagaaacaccattcctgcccgggcaccaaaatgccagttcctaatttgtgagacttactcccttatagccgttatgggtaccagaggccatgcccggtgacccccagtgcttccacaggtggagcctatccgcctcacacctgcttggggacagtccacgtggctcacttggcagcctgtgctcaccttaagaagcctggctctgcccctgctcaatcc

SEQ ID NO: 12947 - DNA, 1177 bp, Homo sapiens
tgcaagcgtgttggtagatccacaggcctgtgattggtgagaatgcttcttgtatggtggccactcctctcctggtctcctggtctttcctcaggctttacaccgtgaaaagacataacacaagctggctgcagtggctcacgcctgtaatcccagcactttgggaggccgaggcgggtgcatcacctgaggttgggagttcgagaccagcctgaccaacacagagaaaccctgtctttactaaaaatacaaaactagccagccatggtggcacatacctgtaatcccagctactcgggaggctgaggcaagagaatcgcttgaacctgggaggtggaggttgtggtgagccaagatcgtgccgttgcactccagcctgggcaacaagagcaaaacttcgtctcaaaaaaaaaaaaaaaaaaaaaagttacacagagccctgccaagccctgacgggagtgttttgggtcattgtcccagaatagctgggatgtcctgttcttccccgcggcgatgctttatctgagcctcaaatatctttgcacctgttggaacagcagtcacttgtcagcagtgtgacttgacctacacttgtggggtgattggattactttccgggataccgcccttgagagtttggttgtgaggaaagtcctctgaaaacgtaagcttgatttctttttgatagaagtatgtatcccataagattcccctgccctgccctgccccgcctgtgctggtaacacgacgcagagctgagtgcagaagtgaatcgcatgcggccggtgtgggatgctcaaggcggtgtcatcttttctcggattgaaaacccaaatctattcataggttaattattttaatattaagataatattaacgttggtttagatagcatttgaatgtcctaaatgcgttctcaattgaatgtctttgccttctgacattggtattctctgtgcatgccacttacttatgattaaaacatatgtgatatttttctataattgtgtggattttagaaaaacctgaaaataactttttttgaaacgtcttttttgatactgacctcacagcttagaagaacatggtcaatttaaagagttttattccaggctagagcctctgccagggggttgcaggaagaaaatctcctttgagccggcccggtcagattgag

SEQ ID NO: 12948 - DNA, 1235 bp, Homo sapiens
gttactattgttgtatcacaaacaacaacagtcattttattgtctctcatgctttctgtgggccaggagcttaggaaggcctctgccaggtggttctggcttgcaggagatggtgtttggagggagcggtgaggggctgagacagctttgtgtgtgtacatctcaggcccccacctggtctctcagagtgagctgctctgggcttccttgcagtgcagtggcctcaacaccgtccttctgtttgccgggcttcacagggctccaggcgagtgtcccaagacaatcgggtagaagctgaattgacgttactggcctgcattggaagtcacacagcatcacaaccactgtagtcacaggcccttttcccactgagtggagtgtcgacgtcacattgcagaggggcatgtagtttggagacattgcagcatctttagaacatgcgtttctcacaagtctgtaacatggagcagtggctttggtgcagaatcatgctgcaggcaaggtgggcccacctccctggaatttcatccccctcgtcagttaaacccatggtggttttattttctaggccacctgatctgggaggaccacctccaagaaaagcagtcctgtcgatgaacggtctaagttatggtgttatcagagtggatactgaagaaaagttgtcagtccttactgttcaggacgttggtcaggtgatgcctggaggtaagagacataaccagagtgggtctttgtccatgactgattgaggtaacgaaaagggttttgttttgttttgagacggagtcttgctttgtcaccaggctggagtgcagtggtgtgatcttggctcactgcatcctccgcctcccaggttcaagcgattctcctgcctcagcctcttataaatactccaggcttcatagtagtgctctagaagcaagcatacaagtaaaagatttctcaagaatgtttttcagtgtaaattggaattttactttgtaaaatatttgctcagttttttccctccctttgtgctaagtttaaagatgagctaaaatataaagatgtgtatatggcctatgcaactcacttacagttctttgatatttgggaagacggtgataatagctcactgtgttccaggcacaggcttcatacttcatatgtgttgaagcatttaaccccatggcaaccatgtgaagtgggcagctctgaggaaaatggtaatgtttgtgaataacttgataatt

SEQ ID NO: 12949 - DNA, 1677 bp, Homo sapiens
gagatgccgtcttaaaaaaacaaaaaagaggtgtgctgcttgtcagcatgtattgtcacggacactcaataagtgccattttggactgtcaaatttagatgctttgtttcagaaagataagccagcatttagttttaaatcactttcctggtttgtaacttgatgctgtttagttaaattgctagttttcctaacactacaatattaattcttctcgtggaagtgtactgatttattatttttattccaagtcagcagatttggaagcattgtggtaaagtctaaggttttcatatccatagtgctgtttggtgagtaccggcagtacagttgaggggagcagggaacagcattgccccgtattgaaggtggagatggttacattcttcactgctttttgcattttgagttgtgtgcctataaaatttggccaaaccattttattattttgttcaaacttgactaagctgagtgatctaaaattatacagaacctaaatcaaagaagagaatgtaaagtcctttagttacttctaagaatttgaagtcaagcacgaatctaagacatagattatttttatatagctaatgaagagtatgttacgaaattgttgggtttttggggtattgagggtggcaaattttgtgaatcatgcatgcttcacagaaacaaccaggtttttccagaattagtctggatcagtgcctaacaaagctgttattaattctccacacatgagtctggctaactgggccagctctcatgttttactcctgtctggctacaaatagcactgtgcatagtagccctgtttccccatggtgttggactgtggtaaagtatgttgtgacatactggaattctaataatcctgttgtaagtatgtacagaatctatgtaacttattgttgacatacagaggtttgggaagtagtctaatggacattccttacaatagaatggctgggaagggaaagaaaaaaaaaaaaaaactacctaactccaatcttaatgttgtagttttatagcaaacaaaaattgtcagctttttgtattgaaaggtcagtggtggtaagacaaggtgtcttgtaaattaagattttaagaagtgcattaaaatgttttagaattactctgggaattctgtatatcacactaaaatttttatatcattatgttaataaaagttattgactttgtaattctgcattttgaaatgtgtgaaaagggtctttaaattaccccgaataggttgtatcttattttgctttttttctgactataaaagcagttatgcttatagcataaaatctagaaagcacattaaagtataaagaaaattaaaatttcttataattctacctctgagtaaacagcagcattcgtatgtaacataaaccctctcagggatttattttttctttttaaaaattttttacaaaattaggatcaagtgcttttttaaataatttgcttttgtacttaataaattatagactttaaaatctattacatatattcttctacatgtttcagtggctgtattttacaagtgtgccatgagtaaatgtagtatttgctgtattgccgtacatcagcgttgtttcaacaggactgcagtgagcccagatgcacgtttacactgccatgattacaattactgccttgggctcagtt

SEQ ID NO: 12950 - DNA, 1199 bp, Homo sapiens
gtgggtaagtgctgggaggtgagtggagtgagcttgtcagggagctgctggtggagcctggaggggaaggagggaggcagtgagagagatcggggtggggggtggggggatgtcgccagagctcaggggtggggacagccttgtgcgcatcagtcctgaggcctggggcacctttcgtctgatgagcctctgcatggagagaggctgagggctaaacacagctggatgtcacctgagttcatttataggaagagagaaatgtcgaggtgaaacgtaaaagcatctggcaggaaggtgagtctgaagccctgcacccgcgttccgactatcagtggggagctgttagcacgtaggattcttcagagcagctgggctggagctcccctgagctcaggaagccccagggtgcaagggcaaggaaatgaggggtggtgggtcagtgaagatctgggcagaccttgtgtggggaaggggtgctgctgtgacttcagggtctgaggtccaaagacagcatttgaaaagaggctctgaagccagtgtttgaagaatttgttcctgaagtacctcctgggggtaggctagaggcttctggcttcagggtcctgaagaacacattgaggtgccgtctgacactggaatagggtgcccttcattcctatgcctgagtccttaactatatttccaacctccagtgaggaggagaagattcggaaatgtgacaggagagcaaacaggacagtttgcatgtgtgtgtgcgcacacatacatgtgcgtgaaagattatcaataaaagtgcataaatttgttgatctggtaagagtttctagcaggaaggtcgagccacttactgtaggtcaagaagttgctagttgcggagttttttcttgcagttagactttacctagtggtagcagggccaccaaagctctgtgtcccagatggtgtatggcccataatccacccaacagcagcaaaggaccaggcaaaggagaacaggagcagaagcctcccagccactagccttttgggctcagtctctccaataatcctggagaggggcttcgttgggtctggacacctaccatgcattctgtgacctttccctagcttccaataaataactgtttgacgcccagagtacaggataccacaatgcactcttcctgcgtagagcacatgttcccatctgctcccattcc

SEQ ID NO: 12951 - DNA, 1173 bp, Homo sapiens
ctgcctcccccatttcagaagtccctactgaaatgagaaggacactgaggcacacaggggaagagaatggcctgaggttagactgccacgaaaggcacgtgggaactgggcccagaaaattccaaccgttccatacaaaatgctacccagcagggaaaaagagtcactgtcttcttccaagtgaccagtaatgccacactcatggggcagcaagaagggtggcaagggaaccaagccctgacctgagcccagtgatcaggccagagcccagccaatgggactcgcccacaggtccaggctcaccccctcacctccaccgcactgccctcactccaaagcccagccctccttgcggaagaccagctgcacagcctcattcacgtcattcaccacgtgggaggcctccatgagccctggactgaagcataagtctcggtgcccgtggaatggaggctcccctcctccaaggacaggctccgtggactgtgggttcctgggattgtagacgcctgtacacaccaggatggagatgcagctctggcttgctgagggctgttgctgccgtgtgcccccggcccctagttctggcgccccatcatgcgttgccttctgcaggtactggtggaacaggttggcgccgtatacgtcagacatagggttatcactggcaggggcagccacaccggaaaaggaaaaaggagaaaaaaccctaaatcaatgttgcaaagcaaagggagcagagaagagtttcggggcagaagagtgaattagatatagggaaatgggggtgagagtagaggaggagggagagaaggggatgtcataaaagggacaaaggagggagagcagagcctaccccacagcatagagcttccggatgggggcggcccagccccgcctctccgcctgtcgcctgatcaggtcctcggcatactggtaagtgaggatgctgggtttgcccatcaggccctcgtatctcagctccttgcccgtcactttctggtaaatggtttccaggcacagcagaaaggtgccatgtccaaacctgccagaaacgagcacgcagcagttcagtcttcctgatctccaggctcttctagagaacacgactgccactgtctaagcagcaaacacacagaccagccttttccccagggtaagagctgacatgta

SEQ ID NO: 12952 - DNA, 1129 bp, Homo sapiens
gaagatttgtaaccctcttacataaaatacaacaaacacgatttttttttctttaaacattttccccctccttaaatacactcaaaggaattacagtgaccgaatggcagtagtacagatctgtgatctcgatccttaatcagaagttgaagaaaagagtttctctttactacctctttagcaaaagattaatgaaaatttatacagggattagaaacacatcaaacaagaaaaggtacctgtaatgttatttaagaaaagttgtgttaaatgggttggtagggttacaataaaggcatttagcaatatcctgcatatgtcacttgactgtctccagtctggaaattatcttcgtgtattaggcaggcaggacttgccgaagtgcagaatggtaaactgcttttcttaagaggtatgtaaaggccctgtttcttctgcttgttcccgctgctgtgagaggttggggctagtccccttgctcacttctgagttgttttcccagcagccactgcacggctcgaaggatttgtcgttgagggtggagaaggtggaaggatgttgaacagacttttccctaatgagctgtgatgccagctgcaaaggcggcaaatcctgttactcccttcagctactctctgaagctgcagaggggcagtggtaactggtctccctgccctatgctgattagctgccttttctgctgtttttccccccttcctcttctgtcccagagcatcttggcaaagttcagatttctgtgctcacagctcaatgctcacagtgaaaaggaaatacaaaagaggaggagagaaagtgagaagaaaagagagaaaaggttggggtggaggtttttagtagagtcccttattgccttagtctaagacttaagctctgggttgaaaccttaagtggtaaagctttgtaagtagtaacctggatttccaaatagttcttgcagatagttttattggcacatgaacacagcaggccatatattaaaagcatttgaatttctatcgtttagaaacctccgaattttgaaaaggacacttcgcagtttttccacaaactatcattgtgaggaagatgaaataattgtaagataaatgttttcatgtggcatttactg

SEQ ID NO: 12953 - DNA, 1044 bp, Homo sapiens
acgaatcgggcaacccacggttaaggacatttccattctccggcccactgtaagagtgaatgtagaggtgctaggttttacctttgtgtccgtgaaaggagtgaaaggaagtgtacagggaccccaatgtcctgccctctttcagggactcaaacaatttccaggtggggcttgaatcaccacacatccaccttaatctgactcaggcatgttcttcacattaatactgtcatttcagctactgagttattttttctcctcttttttttttttttttgcagcagagccgttgcctggccttgaagagaaaccaccaggtgttggtacttcagagggggtctacctcacacaactacctcaccccacacctcccctgcagactgactgcaccaggcagagctcaccacaagaaagggaaacagtgggcccggagctcaaaagcagctcctccgaatctgcggacaactgtaaagcaatgaagggcaagaatccctggccctcggatagcagctaccccggcccagccgcccaagggtgcgtgagagacctctccacggtggcagacaggggcgctctatccgagaacggagtcattggggaagcatctccttgtggatcggaggggaagggccttggtagcagtggttccgaaaagctgctctgccccagaggcagaacgttgcaggaaaccatgccatgcacgggacagaacgcagcgacaccgcccagcacagaccccggtttgacgggaggcactgtgagccagtttcccccgctgtatatgcctggcctagagtacccgaattcagctgcccattaccacatcagtccaggcctgcagggtgtgggccctgtgatgggagggaagtccccagcatcccatccccagcattttcccccaaggggctttcagtctaaccacccacattctggaggctttccccggtatcgccccccacaaggaatgaggtattcctaccacccaccgccacagccttcctaccaccactatcagcgaactccttactatgcctgtccacagag

SEQ ID NO: 12954 - DNA, 1994 bp, Homo sapiens
agtatatatagtttttattcgttttaagtgaatcatagtaaaatcagtcatggtgatttaaaatagctatcaagaacaagttcttggaattatctgttgtatctgtgataggaaaccattttacagtattaaattactttattacagttgtagagttgaattacactggattctccctcgttagcattctgtatttgattttagctgaaaggtcaccaaagttaggacccatgttttaaacttttgaatattccacaaaagaaaaaactaaggaaaatactgaaattacaggtctttgtaaagaatagcatatttttaagcatgcttttgggatagtagaagagtctctatgaaatattaatctgccctagtttcttataaattcagctgtgggaggggccagtagagtgtttccctccaattccaggattcctagtgaagcatggaactgtcgtgtttacagtttgctaaacatatgctgtccgtggaaaaggaagctaatcggaagcatccatgatacagagaaatgaaagccaagacaccagttccaggatgatggaagttcatatccgtacgcaaatgctgaacctggtgctgctgcctagggctcaggcagatttgagagttgagtagggaacacaggtgcctctaaggtataatgcacaaaaatacagattttctctcagagaggttttaattttaaatttgatgtatttgcaagtggattgagttttgagcctgtgttctcactggatcctaattcttgttagaaacctatcactggcataacctggtttagaagagtgaagaggacagaaggattgtggatgggtctgccctttagctagtatccgctaacatggggcattactacttcagtttctgtgtttgtgcagaagcagggaggaggtaaaaagctagtttggagctggttagacctggtctaggcccagagaatttggccactgacagcctttctcttttcctggtaatgctggtttgaatcagaggcctctcacttctccttaacaggagcactgacactgtgggcctctccccatgactaccccaggggcctgggtgggagtggctgtaagcagcagttgggccattgccccctttccttctgccctcgtggtccttgagcagttgtgtgcacactcttccaggtaatcctgtctcctctctctcccagtgaccgccccaatcagctgttgctagagcgatgctgtgaacgatacaggaaaagtcagtaaatccctttatccttaatctcccttcttggttttcgacagaaaatattaaggaagagcaataggaaatagaactactgtattataacactgtgaacaagaacatcagcagcagcagaattgtcagccttcctgcgtcctgtgtgggaatgtgtccatgccttataggtactagtgcttcgtccattgtccagggagtgtcctgagctttcactggtctttgaagtgcagatctgctataagctgtctggagctgcaaggttgcaggaatccacaggagcgtgagctgctgtgaacccctagcccacccatccccaagcaggatcttcttctcaccttttcttcctcctctagcacttctctttccaagtgtcttaagcagatgcaatgtcttaaagcagatgcaaatgcatttgccatcttctccattaggaaaatgatggttatgtgatatgttatatttaggaagtagtgtgtaaggtatcctgaaaaggtttgctctcaagctagaaggacatttcaccctgtgggtcactgtcaccttgtcagcgtgccggctctcagtggtccccaggaggatggggatagctgagatcgtggagaatgggaaataccattgcatctctttgatttaacactcatggctcacctttagtagagttgttaataagttagaaacttgtgtccctaaggcccaagagaaaagatgagcttcttgggaggattctgggtttgttttcc

SEQ ID NO: 12955 - DNA, 1635 bp, Homo sapiens
acaccaagcctcacgcactctccccttgggacagtagtgtttgggtgaatgttactgcatcccgttttttttcttttctttttttttttttttttttttttgagacgaaatcttgctcttgtcccccagactggagtgcaatggcacgatctcggctcactgcaacctccacctcccaggttcaagggattcgtctgcctcggcctcccaagtagctgggactacaagcgcgcaccaccactcccagctaatttttgtatttttagtagaggcggggtttcaccatgttggccaggctggtctcaaactcctgacctcaggtgatccacccgccttggcctcccaacatgctgggattacaggcgtgagccaacacaccggaccttcattttttaaattaagctgggacacaagttttgcctccaggctggatgttgatcctgctctgtgctagacagatgtgcggagggactgttccgggctcggcttgaccttttcctacctagtttctccctcttgtcctgcacaagaggactaactgaactctaacgtcagaacggctgacgagcagttgattgtccttgcttgtgttgttgacaggggtgggtggggtgggagcaggggtatggatattgcataagttattgaaatgctgacccccgttcaggaaaccatgcagccccttcccttcccttcccttcccttcctttcccttccctagccagggctcaggtacctcactctcctgccttgtgcgtagctcctggggccccggtcagtccccagcagccttggcacacagtgtctggagcctctgctcctgctgcaaaagcagaaaccatgtgaaccttctggccagtactggaaaggggaatgctatttatttttatattgtgtatattttgtcgtggtctgctgattccctgtttcactgagagcgacacttacctcaatagttagttcaatattgtgtgttggataattttttaaaagaactttttaaaaagctttttgatccttggaggtctgtagatttatttccatatgaactggttattttgtataaagtacatgcttaaaatagcaaggctcctctgtgtgtgtggtgtgtctgtccatgtgtcatttccatatcagggcaaacccagacttccatcaggacgaaggcgtgaactaggccacaaggccaccagctgaaatgccacccctcgtccattctcatgcatccagaatccacggaggcggggcacgggtcctgtgcatgagacagaggaatatggttccagagaacttcaaaacagtcatgtactgactggcagttctaaaccatgtcagggataaaacgctcctcacagccgatccttgcgaagctggcccggccgtcagcatctcactggtaaaggcgtccgctttcagaaggttactacacctgaggtgcacgacttctctccttgcaggctttagggtgcctgggatgggaaaggagtataacagtggggcagcggggcagctccagcctggagcccgctgtgcacacacatggccagaagtgggagctccagcctaagcaagcgggcaatcttatacctgccaaggtcatttatgttttatttccagttactgggagaacagttt

SEQ ID NO: 12956 - DNA, 1237 bp, Homo sapiens
ggtttccatagtcctcagcaaccctggagtgagttcgacgggaatgcaggcccagagaggagaggtcacagtcaggatgcaaactcagttctgcctgaccttcagtccgtttgtgtgagaactgcacacgtggctccaggcctgcggaggagccagaggacgggccggggaagcttggggcagagcggtgccctggtggcggcccatgggggcagagctgggctcctcccagaagcccctgcaggtcccagctccagggacttcccgggttgcagcaagatgcctcacccgggtgagtgcggctgtcctgtctggaccagacctgggccagggaggctgaagagggtctctggacacctgtggggctggggttccccactgtctgtgcccctgcccattcctggctgcatccgctccctaacctgcccctccctctgcctctctcctccccctgtcctccccctgtcctagcatcacagccaaactcatcaatggaggtgtagcagggctcgtgggggtgacctgcgtgttccccatcgacttggccaagactcgcctgcagaaccagcatgggaaagccatgtacaaaggaatgtaggtgctggcaggcgagcgtggagggcagaggcgcccgggggagggatggggcccccttccctccagtctccaggcagcgcgcgtgagcctgggggctggggatctgatcagctgggatgtgcccgcgggagcagggcatggaggcggctgggaggcccgctgcacacttactcctactctggcctctgcttccaggatcgactgcctgatgaagacggctcgggcggagggcttcttcggcatgtaccgaggtgggcttctcaggtcccctgggaggctgggcagcaggtgtgagcgtatgggacatggggaactggtgttccttccgttgctgcggggatggggccagggctgccagggggtccttcctgatgagcctctgtgctcttgggtggagacagaggcagctctgggtcctggtaaggcttccggagacccacagagcacaccccccgccaccgcctcagtaagagcaggcgagccctccctacctgcctgcctctctctgcctggctagaagcgaagagagagaggctgaaagggactgagggacggggcctgagctcctggcaaggagttctgggtggctcctccccagctcggtccagcgttgctgcggtccctgcggggtccccagcca

SEQ ID NO: 12957 - DNA, 1271 bp, Homo sapiens
aatgcagttctcataacagagagtgaggcccccagggctgaccatgttagcaccatcctcttccttgttagcccaggtttcacagtagatgggactattgtaaacaccagctcctgcagcaggtgctgattttcttaggacttggccctgctgctgtgacattatctctcctgtagcagcctttgggggaggaatcgaggtgcgtgaggagggctctcacagcaaactcagctcctcaagacgattcacttatgaagggatagaatcaaggcttaaaacccagtgtcactaacaagcagatatttccctatggctgtgttcctccacccccacaagtaacagtttgaagagtgacgggggtctgcttctatgccctttttaatgtttggttttgaaatggacgtagaaaagtagatggtgatagcattcactgcagcctatctgctgtacccactgatgaacagatgagattttagccattcacctttatttcagagtgttccttggttacagggaggggtgtgcaagaccctgggctctgggggaggggctgagctgcccagtcagagccggcctcagccccctcagccatccagggattcgaaagggtgcttggtctcaaactaggtgctgactctgagggctttcacggtcccttgaacttctgatcctccttttcctcaaaatcagtgctaggactcataagttatggagtccaagattaacaatgctaaatcctcaagctgactgaagaatgccgagtttgactgtgaaatagaaatgttaaaatacagaaacaacccttctattgtgactacctgttaaggtcctgcaattaatacaacgaaagtaccatttttgttgaaaagtaggtggttaggggcttccaaaagcccctggtagctgtgcccacaaaggaaaacgagtgtagacacgaaggggaagaaggctgtgctcaacttgttagaatatagggctgtttctcccgagattgaggtagcactacaacgcagaggaccaggcaggccagagtggccccacctgcccttgccccctctaggctaagtgaaacagctagagagagggcggcaagcgcagggacttgacctccagctctgtctagtcaaaacactttaagatgcgctctccaatcccaataaaatagaccccttgagcaatcccaaagagaggtgctatgaccagtgcccggcagccagcgcctttcatgaaggcagatggtccctcctgaatccagagtttcctggggagaa

SEQ ID NO: 12958 - DNA, 1421 bp, Homo sapiens
acttgcttcagggaaggagagggtggctttgatgtgcgtggctttgtgagtccttcccagccacatagaggttcatggctttccacctgtggttaagatgtgcagcactctggccaggcttggtggctcacgcctgtaatcccagcactgtgggaggccgaggcgggtggatcacgaggtcaggagatcgagaccatcccggctaacatggtgaaaccccgtctctactaaaaatacaaaaaaattagccaggcatggtggcaagcacctgtagtcccatctacttgggaggctgaggcaggagaatggcgtgagcttgcaatgagcggagatgcgccactgcactccagcctgggcgacagagcgagactccgtctcaaaaaaaaaaaaaaaaaaaagatgtgcagcgctctacaacttcttcagctgacattgcgtatttattacactttctctccacagatgatgccagaagtccggggagccttgtttggtgcaaatgccaacaggaagtttttggactaagccttcaggaggtggagctcgtcgtcagctctcctgctgtgatgtggaagcttctgatatttgaagaaacacgaatgtctctgtagcttcctcttcactgccccagtattgctctgtatttatcagcgatgcccctctgtcactcatgccttgcctaattgttcacaatggtggaaagcttcatgtaatatgatcaggacccacctccagttcttctgaaagtgtgacagtgtccagccggttctgcagcactaggggagggggcagatggtggttgcatgggcttcctgggtctccactctccgtctggcctaaaggtgatgtatttggtgtttggccctgcagtccccactcttgaggcttaaggcgcatgtggcacaccactccttccagcagtagtcgctttactgttacctgtttaggcctagaagttttccctcatctgtaaatgtgatttaaaatctaagccatgaatatgctttatttattaaaagagttatgcggatttaatgtgatttctagtgtaaggcactacaaatttaggttttgacagagtcaaattcttactgaggcacctagaaaagaagtattttcccaatccccgtggcacttgatggtgacagctgtcagcacctggacccgttaaccctctgggggtcccctgggctgttgcccgttgttcccagcccatcaccaggagcattctttccacccttgcaatcttccacacaccccacatggctcttcagcgtgacgtgcacaactttattgaggaaatagttttattagtgttgcccgaatgagaaaaaccaagttgtttgttttttctttttcttttttttttgagacggagtctcgctctgttgcccaggctggggtgcagtggtgccatctcg

SEQ ID NO: 12959 - DNA, 1087 bp, Homo sapiens
cctggcagtggccatcggggtagccctggctctgagaaagaaataggaggcttttcagaagagaaagacagaaggatgtaaggttggagttgtattggctggaatttgaacctccagcagctgtctggacatttgtggaacactctgggataattggggacttctgctcaacatggcagtggcatgttaggcatgttagggcttgaggtggggcattcacattcatctgactgtaaatcccaagggcctccgctcatgctaaattgagaatcttaggggtaaagcaccccctccaggaccgggtttctcagccttggcactagtgctgttctgaccattctctgtgttggggctgtcctgtgtgtggtgggctccacccactagatgccagtggcaccccctcccagagatgacaaacgaaaatgtctctagacattgccaaatgtcccgtgtgaacatcccctattgagacccactgctttagcgagagagggtttacttaggaagaattgggatagaaattcccagctgagagaacttagctgtgggctcctcagctactgacttcttagctcttaatccccttagaatttcatctttctcgatgagcaggctctgcacccactctttttttgccccccgccctcatcctggagtgtgagggtgctcgcccgtactctcagctgcctctcagggactgcactgttcctcttcacccccaggttcctgctaagatcccacgggcgagggcttgctctggactcagtctgtcaagtccccgaagcttcctgcagctccaccttgtaaaaatgctgcctttgggaatcttcgaaatatgtacacagagaaaatcacatgaaggagacctggggtccccacttgtgagtgcaactgcaagtaactctggctagagagacacatgtgtcttgtgtcaaggcaggaggataacctggatgaccttctgaggtctcttcagcccttttcgctagtggtcacccaccaccatggttacttgccagcaacatctctattgctggatggtccctgtctataaccttgggctagtatattttttccaatatgggac

SEQ ID NO: 12960 - DNA, 1459 bp, Homo sapiens
cagtggcacaatctcggctcactgcaagctccgcttcccgggctcacgccattctcctgcctcagcctcccaagtagctgggactacaggcgcccgccaccatacccggctgctttttttgtatttttagtagagacagggtctctactatgttagccaggatgggctcgatctcctgacctcgtgatccacccgccttggcctcccaaagtgctgggattacaggcgtgagccaccgtgcccggcccagagttagtttttctaacgtcctcaagcataggcgaggcaaggcaatgattttgccggtttttatcattttcctggcactgcaaagcagtattggcaggtcccctgcaaacagttgcgccagttgtttactgcataaggactgactggggacaaattccgacgtgcagcctgtgctctgctcaccatgctgtgggctctgggagaagcgaagtatttttctaatttgtacaaaggcaccatataggctcacttaaacattaagcatgttctactacaaaaaaacaagagtgagggttaggtccaggactggtctcagcttccaattatgtagctgttttccctgtagacattgagtgagatgctttgtggttacagaattcacagtcattgccgatgagctttcattagctttcttgattaaatatttttgcttgtagacaaggttaggcaatctgtcccagcagttatcacaaagtgctaaatgaggggggtgaagacagcaccacgatgcatttcttggtctttttctgtttgttcgagttcgtcccttctcccctgtgtatgccatcataagggtggggctgtggagtgaagtaggggaatacctggaagcattgcttggcctctggacagacaaagaggttggggacttaggagggttgaccaggtatggccacaagtacgtcagctcctggaggatcttcccagtgaaaagcctcctactacattccacagcacttcatggtaattataaccttggctagataatacctgctgtatggtacagaatagtgacattcaattacctcatatataaagagagctccatggagagctggaaagtgcatgccactacaatattaacacatcccatcttccctttctttttgcaaggctgttgaatttcagcccggcatccccacacactaacaccatcaggtcttccacatttgatggttacaccacaggagcccacaccagactgctgcttccctgtgagctcagagtgaaattgttctcaggggtatttgcaaggccttgtcatcagttaaagactagcagctgactccaggtgattctaccccgctgtcacctctccaaaggggaaattgaatagtggtattgctcactgtggtgagtgttctttgcaccaccagaagaaactggttaatgaatgtactatttagaagaaaagttttgacatttaaag

SEQ ID NO: 12961 - DNA, 1169 bp, Homo sapiens
tgaatacccacctcaccgcctgaacggcctgtttttgcagttgcccccatgtagcaaaaagtaggatgcacggataggacttcaggggtctggagaacatgtttttgcataaaccccagctttgctctactgtggcacagagctctggagcctggtttgtgaatgagcctagctgattctggctttttctcctttcttgctctaggggatggactgaacggacagttccagaagtgtgactggctaaagctcgatgtggtcacagctgtatagctgcttccagtgtagacggagccctggcatgtcaacagcgttcctagagaagacaggctggaagatagctgtgacttctattttaaagacaatgttaaacttataacccactttaaaatatctacattaatatacttgaatgaaaatgtccatttacacgtatttgaatggccttcatatcatccacacatgaatctgcacatctgtaaatctacacacggtgcctttatttccactgtgcaggttcccacttaaaaattaaattggaaagcaggtttcaaggaagtagaaacaaaatacaatttttttggtaaaaaaaaattactgtttattaaagtacaaccatagaggatggtcttacagcaggcagtatcctgtttgaggaaagcaagaatcagagaaggaacataccccttacaaatgaaaaattccactcaaaatagggactatctatcttaatactaaggaaccaacaatcttcctgtttaaaaaaccacatggcacagagattctgaactaaagtgctgcactcaaatgatgggaagtccggccccagtacacaggggcttgactttttcaacttcgtttcctttgttggagtcaaaaagaaccacttgtggttctaaaaggtgtgaaggtgatttaagggcccaggtcagccactgtttgtttacaaaatcaggtaactaactgcatacactttttctctttccatgacatcaagactttgctaaagacatgaagccacgggtgccagaagctactgcgatgccccgggagttagccccctggtaatagctgtaaacttccaatttctagccatacgctcagctcatccatgcctcagaagtgcatctggagagaacaggtttctaagcataaaagatgaaagagca

SEQ ID NO: 12962 - DNA, 1600 bp, Homo sapiens
acccggtgcctgcctcaccctggcgctagaccatctggaccactcatgtgatgagggtgcatttccgttctgttttgggccaggccaacagcagagctgccactctcaccctcccagtgagaattccggctctgcagaactcgcccttgtctcagtttgggggccagggcatcaccttcctccgcacatatgttaaagaaggtttcaggatgggccctcatccacacaggccaagagggtgcaaggtgggaccctggaatcatgtggctggtgagaattccctcctcccagcctaagattcacccagacggaaacgcgagtgctgcagtggatgctgggatgcaggctggtgcctctcaagcagatcagcgactcccgcccttccttccgaaggcgacgggcacctgccttgtgccggatcttcatggggacataaagggcgagccccgaatcactagctcctatagccaaactgttcctttctcacggttccgcaccagcctggctgtgtacagctcatcaagccactgagctaatcggggtggggtgcttgtccatcaaagcagtcagcacatagcccagcgaggagccatccggaccagacccgcctgccaggggcgctccagccgcctgccgcctccgtgggctggggccagctgggagcagaggcctggcccctccaaggcgtcccgcagtggagcaggctgagtggctgtgctgaccttgggctttccatgggaaccacactgtgcttcaacttgaacattcatcccagctgcaaaggagcaaagaacctgtgtcatccttgtctgtccagaagctgccatctctctcccatgcacatccgggagataacgccgctagtggccgccacagcgctgattctccacctgttctcacgtgaggcaaaggtctccttttcttttctctttacttaaaaaaggggagaggagggtttctagattccatcttcaaaccccagtcgtcccataaaattggacgtgggaaaagaccttcactgcctgcgtggcctttcccagacctctcctcgaatgccacaaaaccggtccagccccggcagagccgccttcggcccttgtagctcctgctggccccacaacagggaaacagtttgcaaagtggcttggaaggagtgtggcctagggatctgctgtaagtggccagacgtagcaggagagcccagtgtcaccttctggtcctggtcagccttaacactgtggcatcctccacagcacacacggcagcctgcagtctggaaggtggacccgagcctttgcagagaggcgccgcagagccgcaggcctgcgccccagccttctgctcccgactgtgaggacacccagttctagtagagcactttttttaaagctcccattttgtaaccactagtttgcggttgacttgagtactctggtgacttcctgcgtcaagcgttctcaagctgtgagaatgtgcgcagctccaggcaggttttctctcggagagttaagtcttcccttgaaggcagggaagcaggatggatacacatatatcacacgcataaaacaccaggtgcgggagcagcccagactcaaggctg

SEQ ID NO: 12963 - DNA, 1195 bp, Homo sapiens
ccgcagccccagccacccgtggcggcctccacgcccccacccagcccactccccatctgctcccagccccagccttccaccgaggccactgtcccatcccctacccagtcccccatacgcttccagcctgccccggccaaaacatccaccccactggcccctctccctgtccaaagccaaagtgacaccaaggacagactgggcagcccccttgctgtggatgaggccctcagacggagcgacctggtggaggagttctggatgaagagtgcggagatccgccgcagcctcgggctcacacctgtggaccgcagcaaggggcccgagcccagcttccccacgcctgccttcaggccagtgtccctcaaatcctattccgttgaaaagtccccccaggatgagggactccaccttctcaagcctctgtccatccccaaaaggctgggcctgccaaagccggaaggcgagccgttgtccctgccaaccccccggtccccgtccgacagagagctacgcagcgcccaggaggagcgcagggagctgtccagcagctctggcctgggcctgcacgggagctcctccaacatgaagacactgggcagccagagcttcaacacctcggactccgccatgctcacgcccccctccagcccgcccccaccgccacccccgggcgaggagcccgccaccttgcggaggaagctcagggaggccgagcccaatgcctcggtggtcccgccgcccttgcccgccacctggatgcggcccccccgggagcctgctcagccccccagagaggaggtgcggaagtcgtttgtggagagcgtggaggagattccctttgctgatgatgtggaggacacctatgacgacaagactgaggactcaagcctgcaggagaaattcttcacgcccccgtcctgctggccgcgccccgagaagcctcgccacccgcccctggccaaggagaacgggaggctgcctgctctggaggggacgctgcagccacagaagagggggctgcccttggtgtccgcggaagccaaggagttggccgaggagcgcatgcgagccagggagaagtccgtgaagagccaggcgctgcgggacgccatggccaggcagctgagcaggatgcagcagatggagctggcctcaggcgcccccaggccccgcaaggcgtcctcagcaccct

SEQ ID NO: 12964 - DNA, 1173 bp, Homo sapiens
agtaacatgatgaaaccccgtctctacaaaaaatatgaaaattatccggacctgcctgtaatcccaactactcaggaggctgaggcaggagaaccacttgaaccagggaggcagaagttacagtgagccaggatcatgccattgcaatccagcctgtgagacagagcaagaccctgtctcaaaaaaaaaaaaaaaaaaaaaaaagcatctaggggaaggagctataaatgttgtcttacttccctgggtggccgtaggacacaggacgggaagtgcgtggtgtttttctctgtcttccctacagcaccaagcacagaattgggtgcctttccagccgtcggtccttccttgctgagatgttagactggaagatgagaaatggcatcattttaaggcattaaccgttccagccaaggaactctcatttcacaagttcagtgaactcttaactttggcctctgctgcaggggacagcagcgtgatgtttcagaacctgactttggagtcaaacaaagcctggatttgaagcccagttctgccacctgctagctgttggcaatttacttaacctctccctgcttcagtttcctcatctgcaaaggtgctgcacttcataggtttgttttgaggattaagtcgtataaagcacggacgaagccttgatgcccggagttactgctcctgttactctcctggtacagcacaggtctccctcaccacagggccaggggcagggccaggcagccttgtattggtttccttaaacggggttgatgccgggacttgggtttggctcaagctcaccctgtccgagaatgttggtaaccaagctttcccatgccagagtcacccagggcttgtgatgaaagcacaacacgttgggctgagtttctgattcagcgcctctggggtaaagccccagaatttttagttctcaaaagttcccaggtgatgctgtggtccaaagaccacaatttgagaaacaccactttaatgtttctaaatttctctgataataaacatcacctgggatgcttggctaaaaatataattgcagccaggcatggtggctcacacccgtaatcccagcactgtgggaggccaaggcaggaggattgcttgtgtctaggagttcaagatcagactctgcaacagagcaagatccagtctcta

SEQ ID NO: 12965 - DNA, 1988 bp, Homo sapiens
taagaggaagaatgttctacatagtggggagagaggatgagggttggcagtgtggttaaagagcaaaaccaccaagaaagagtcagagccctgaggacgtctctgtccgcgtggttcttgattctgagccagaaggtgacttggtatagcacgggagttcaaaatgtggtgtcccaaaggaatcacagtgtggacctttacagttaatgacaggcactgtcccccagcttgggtggcaaaggccagtgagctcagggctgaggggcttaccctccggcagctcagagtccagaacatcttagtccggcagctcagaatcagggcaccttgcctcccggtgagctcactctgctgctagccttggtagaaaaggaacaggattatgggcagtattttatggctggcatgaaatagatacccttttctcctttgatagagatttccttctttaaatatgaaactgaagctttgaggacttaactagacttccttttgaaaagtttcagaaaagctcaggtgtggccaggcacgatggctcatgcctgtaatcccagcactttgggaggccgaggcgggcagatcacgaggtcaggagatcgagaccatcctggctaacacagtgaaaccccgtctctactaaaaatacaaaaaaattagccgggtgtggtgtggtggcggatgcctgtagtcccagctactcgggaggctgaggcaggagaatggcgtgaacccaggaggcagaggttgcagtaagtcgagatcacaccactgcactccagcctgatgacagagcaagactccatctaaaaaaaaaaaagaagaaaagggaaagctcaggtgtttcagggtcccagaatgtatgttgtagagaacagtcattagctcaggcccatggtaaccgcctctactgtgcactcgaccagtagaggcgatgatgacggcacttgattctcttgtgtgtaactcagccatcctccctagacccacgtcccaggaggcagggctggtaaagctatgactgggcagtgtttgacccagctgtgcttttactctgtgcctcctctttatattgtggcatttctctcttctcctttatgttctttttctttttatgccaaaattcttgctgttgccaaaacaaaaacaaaaaaacacacccacacccaattacaacctgcagttcaaagaaccactctaggtcggctttaaagtattgtctttctctggtaaccaaatctgtacctgctgcctaatttagtgtttgggggcattgtttacagtatttctgtttgtaatgtgcttttaatatagaaatcctcttttttgttcttaaatctatgaatgctgtgtttccaagcttatacttactactgcgtgttagtggtcctggcacagattttcttaccctggccttgtactgtccaccatgactttagaaaaagcttgaacaataggcagagaaaggaaatccccaaaagggattattttccccttggacatgagaagtttagttacaggtttcttgaattcgtttttgtccagaggaatcctctttttatctgatacggttgatgaccaaaaatgaagtagggaagccgaaggcatagccggaaaggaacagaagagctttttccccgagtgctcatcaccgggttcattaccggccagagatggacggggagaagcacgttagtttcctgtcatcttatggaaaagatgatctgaagttaaaaaatgaaggtcacaagtggcagttgcctgacccctgtccccagacattccttgcccgataaccatgaggttccatagttcggatcctgaatgggcctttaggaaatgcaggcctttcccacaccagctagaagggtagccaggcagtagaatttcattcaaccctagggttcccacctgacagagggaagttcggaagtcttactgcttcccacgtccccttcccttctaggcatttatggaaagctttttagtgg

SEQ ID NO: 12966 - DNA, 2937 bp, Homo sapiens
aacatgcatagctttggatcactgtcttctcctttataaatggcagaagagtgacaaaattcattcagaccgcacatgttagaggcagggaatgaagaaggtactgtgggccatggccacacctgatgcgtttttggtgggcttacttggtgcagtgtgctgtccagagagacctgctgacccagtctgggacaggcacagtgggagctgccacagtgccccttgctggccgccctcaggagggggcctctggaccgtcagtgtggcgtaggcagtgggtctgcttcagggaggcagcctcttgactttgtcacaacggttgcactgaagatggcccccacaagcccagttgtgaatatcaaggtgaccctgcccctggctgggagctcccctggggctctggaacctgaagccctgagaaggagagcttggaaggaggttgagctcttcactgtgtctttccatctgggctctgcagcccagctctgtggcaggaggcctgaccccaccccatcagtccctctcccagcattgctgtgcatggctccctcaggaagaagctctggagtggggccgaggccccagatgctctgctggggtctggggactgagctgcctcctgtctctccactctggagccctgggctcttgcctcctgttgaattgcccctgggcctgcccccggccccatttgtgccataaagggttgcttcattgcaggaggggtggctgaaaccaccatcctgggctgcatctatctccttaaagtccactccttacatcaccgccactactgcagctcagtgcccagcggccgcatgcacacctcccggcccctcctcagcagcgcaggggctgggggcccttcctggcacccttttgcctgacggaccctgttgcctgctcctgggcagtggttttgttgcctgacacagggcctttaacatttctgaggtttggagattaagcgggttctgtgcgatttttagcacatccatatcttttctacgttgaatgtctggatctttcctttgtatgtttgtgtctctgtgtgtgtatgtggccaagcgtctgcaggtgagggtggcacatggaacttcacgggtcactgggggcccactcttccagggtcatcgatgcatcctgggctgtgctgaggcagtgctgtctcgctcagtctttccagaccagcggggcagcacctgggaggcctgtctgaagcatgcagttctgtggtgctgctcggggatggactccatgcacagtccacttcttgacacattctcacactgtggctggagacccattttttccatcccatgtggaatgagaatcttgagttgcccacagacagacttgacctttgtgccagaactgtccagagctgtgagttttgttactgaattgcctgtccctgagcttggcctgctggagcatgatgctggaggctgtgtgcgggcaggcttgtgctccccttggagaagggctgctacttaacaaggaagtcctggccacaggagtcccctactggctgcagaggacgaagcaggaagcatgccgtggatcccacatgcactggggcagggcagccaggttccagagcagcaggcatgtgcattatgggtgccaggtggccagtgagggcccgaggaccacgcagcagagtcccccacgggcctgagcctgagagctcagaggattcctgccaggcctcagaactgtgtgtgcgggacagggtggctggcacgagatgtgtgggactgggacgcttcctttggggaccagaggaacattaggggccggtcagacacgtagggggcagtgaggaaacggggtaaagtggaccatgcaggctgcagagggtgggccttgggctggccggggttgctgggtggccccttccccatgggcctccacaagcactcaggccactggcacgttgggccaggcagaaggtccacatggcagggctgcctggaacaccgctgccactgtggctccaggaggcccttgggagcatgaggagagctggactcgctcatctgttcttgcaccaccatccagaatgccccctttgcaaggcctgctgcagtccccagtctgaccagcaagtcccggggtcacccttgctgaaccttgtgctccaggggtcctcctcctctaggaccagcttgccacggtttctcagagcccaggtgccctctgacctgccatgcggaggtgggatttgatactgtacattgtcttgatgcctgtttttttatgttttcattaagggtttttagtttttggttgggttgacactaacttttcttaagatgctgtgagaatcatttcatccaaatgccaaataaacttgtgttccggaagaggcatggttagtccttggtgtggcccccacggctgccacaggctaaggtggaagaggctgggtacccacctttcagcagaatgcacctagggtttgcagcccttgcaggcgtccatcaaaccccctgaggaccaggcagagctgagcctggagcccctaggtggagtgtgcagggagagcagcagccctgagctgcctacagctatcctgcagcacccagccctgcttggggcatcggctgctgccttggcaggtgttgctgacgtgcacaggatccacataaaggcaaggctgcttgacaccatctgggagctagcatgggacggggtggtagggcagggcttggaacctggccgtcagcgccatttcctctaagctcccctcatcatccgggtggctggaaacagcccctccctccagtccaagccacctaatgttacaaagtagcctaggtcctctggggcctcttcactcatgtccagcagtgccatctctaggtctcagagggtagtgggcccaggaagtgtgattgcatgccctgctctgggggcactccagatgtgtat

SEQ ID NO: 12967 - DNA, 1203 bp, Homo sapiens
gtatatattcccgcggcggcggcgccccggccgggccgggcatggcggcagcggctgggggcgcggcgagccgccggggtgccgggcggccctgccccttctccatcgagcacatcctctccagcctgcccgagcggagcctcccggcccgggccgcctgcccaccgcagcccgccggtcgccagagccccgcgaagccagaggagcccggggcgcccgaggctgcgccctgcgcctgctgctgctgctgcggcccccgcgcggcgccctgcgggcccccagaggcggccgccgggctgggtgagtgggcgcggagcggggcgcggggcccggcggagcccggggcgcggcgcagtgggtgccgagcttggccccagccccgcgcctcaccgcgccctcgctccgcaggcgctcgtctggcgtggccgctgaggctgggaccggcggtgcccttgtctctgggtgcgccagccggaggttccggggcgctcccgggcgcggtcggcccgggttcgcagcggcgcacgaggcgccaccgcaccatcttcagcgaagagcagctgcaggcgctcgaggcgcttttcgtgcagaaccagtatcctgacgtgagtacgcgcgagcgcctggccggccgcatccgccttcgcgaggagcgcgtggaggtgagtgccccgcccagcctttccccggagcgcgcgggccgcggctacactggactggggtcctggcgggcgggcgccctttgcaaagacggcctcggcccaagccccgccctggcgcgccggagggaggaggtccctggacggcgctgggcgtccgggggtatgaggagcgggtgagagcagggaggtgccgcgggaaaggaaccggagggctacttttcttttcttttgttttacactttcctctggtgacgaaagaggcccgcgttcacgtccagaatttgggaaattcagaagagcccgcaacccaagaaggggcgtcctggtcgccgccagctggaggctggggcgggtactaagggggttcccatctcgcgtccagacccaccgagtctgtccgcagcgaataagggcaggtggcgcgcagccgcggcccgggtgtcggctctacagcgccgtccgcccacatccctgttgcgaagctcccctctcggtccctgtgggaccctcgggagccggtgggacgcaggacctggggcta

SEQ ID NO: 12968 - DNA, 1368 bp, Homo sapiens
tcactgccccccaggtgcatccttgccctggggcttgacctcaaacccctggcaaacatcagcatgagggaacagcccctcctgaatggccagccacctgaccctcagccttgttctactctcatcctgccctggatggtcagggaactgctcagtcactataaggtcagcagtggctgtgcccacggatggaggagcagaccctgcattggcctcatcctcctttatccccacactgtgttgctcccattccacctgccacttcatcctgcacatttgccccacagctctctcacagtttctcacctgcagaggaattgttctttccttctcccgtgagcagacacaaggttctctgccaggccaggaaagtccccacaatctaggtctcttcactgacacttgcactcagctgtcactctgtgtccacagggtctgcggaagagggagctgctgaaggagctgctaccagtcatcgggcagaacctccgattccagcgcctcttcaccgagtgtcaggaacagctcgacatcctgagggacaagtagcctgccccagcctgccctggctgcagcaagggcagggccacactctcgccgctgatgacatgcaggaccgcctctcacctgaccaggctgtagggggaggagacactggcaggagatgtgctgtcctgcaccagcgccagcccagctccctgggcagatgtgccctgtgtcctgggtctgacattgcctcaggagggggaagctcatccctccctccaagcccccgatgcggagctagggctggagctctgcccaggtgccctggggccagcaaggcagtcccaggcctgccgtctccagcacggccccaaggtggacactagcccctgctgctgcaggcaccatgctgcttcagcagtgacgattgagccatttgtgagagagaatccggaagcgttaggtattacagcagactgacctaagacctatgtaaaaggaaagctgttccaacacacggactatttttgtactagaatttgctaacttgtaatattgaatttcctttggccgataatcaggatttccctataagtcacttggacattggtcacttgtaggaaatttaaactctaattatgacagctacactgaaaaataattgtactgaaattaacttgtctatcttcatttggttttaatttttaaatgtttgtaaaaagagactgttttgggggaatggggcaaaggggtgggcgatttcttttgtaagtgtaaaataaatgaacacgcattgaataccaaaccctcctgatttctcttgccttttccttctaactttcatcctccccacacagtgcatctctctcctgaagtagatgg

SEQ ID NO: 12969 - DNA, 1273 bp, Homo sapiens
gctgctggggctgccattaccaccacatgttctggtgctcttcaggactcctctcaggtgtcctggctggaagccacctccacctccacacacagccctgggcagcctcaggcttggtgtctgtgggaatgtgtggtcataatctatctcccaaccatcctgctagctttgtcttctcagtgtctggcacagtcaatcatcagagttgtttgagctcttggaatggaagcttgtaagcatgtggttatccaaaacacaattctggagtaaataatcctttatacccagagccctcctggtcacttggcccagcatagtatctaggcctctcctgccatggtgccgtcacacacactgctgcctctctgcatacccttgtacctcagctcaggtgcgtgtcctcgagcagccttcttggaccctgcttgcgggtcacttcccactggctacacactgctctgagcccaggttggtcctcacagggcaccagagagcaggcgtcagcccttcctaccataggtccttctgggccacagtgcagaggaatgaagcagggaagccaaagggtaggaacccatagggtttgttcttattgctggtgtgaacggaggcaggggccctccagtggtcagcagcgttcagacgtgctcttgcactcagaggtgttctgacttaggttccctcctgggtgccctgcttctcagcacagaactctcccaaactcctccagcccttcccctaggcatcttgccctccaagcactgcttgggactgtcatttctgggtctgtgaagggggcagtcagccctcggcccagctcacccacttgagtggccacacaagcacagactgtttggtggttctgcctattttaccacagggaaaatctgttggtcagctccccacacacgcgtgtggctgagcccatttggtgccagacactgaattaggtgcttttcatacatgctgtgccataaacacccctgccagtttagtctcagttgagcagaccaagtctcaccaccacaggaactggagagcccctttgggggttttctaaacattccctccaagcactgacatggtctctaatcttgccaaacactgccatctttgaagattcttcaagtaggaggctagaaacccaagtctcactcccagctcggtcctttgcagtgtgcttttgggcacgttactcccttgtgagatgaagtggcagggttgggagactttggggtctttaaccctggcactgcttctcttctctggctgt

SEQ ID NO: 12970 - DNA, 1184 bp, Homo sapiens
gaatagaagatgaaagttgtgtgatgagcacttggagcataatgctaagaatgtgacactgtcacagggagatatgggaggggccgctcaggatggaggatgcctgactaagggtaaaagcagaccatggcttcaggaccccaggtgcaggcttatctcatgagactcattgtcaaagtgggaaaggtgagtggctggagtggtttggggtagaggtgctgtatttaagttgtggagatagggcagtgtgactagagaaaagggttgtaagaaccatgttctaggcctcattctacccgcaaaagctctcagaacagtgcaaagggggaaatgtgaatgcatttgctcacaaccttctaggtgtccataattttgacacatgaaaattttaaagaaatgggagtagtagattgtatcttgacattttttgtgtttatggaagtttgatatttgtgccttttttagtaggctccaaataatgcaaatactagacctccagatcctttcaggattgcgcttgacatgcctcccctcttcttcaccccagtatgaatgctacctctactcctgctgcattgtcaccttctgtgttaacgaccccgtccaagatcgaacccatgaaagcgtttgactcccggttcacagagcggtccaaagccacaccaggtgctcctgccctgaccagcatgactccgacagctgtggaaaggtaggtggtagctgcaggaccctgaaggaccaggcagggtgcaggcatgggtcaacagcacagtggcagtgttcccaccaagcaacctgccttcctgttggggaaaagactctagccactcaatacatgggagcaagactgcagagcccttagtgagccaccaggagaaagaggtggttccttgaagtgggaaggtggctggaaggagtcatgggggaggacgcggcaaaagaaccacaaggtcaaaggcacaaggattggtcagtgcagaggctgaactgagaataatggtgtttggatggagcccagagtttgcacggaagagagcatgagattagttggagaggtggaagactctgatattgatacatcatggaagtgacggccttccactcagaaactgaccagaggtagagagctgcaataaaaatgatgtaagtgaggtctttgtcaagtcagattggcttctgagctc

SEQ ID NO: 12971 - DNA, 2276 bp, Homo sapiens
agaagctgcagcagcacctatgggagcccaccatcccgtgaggaagtgtgtttcttccctgcccattgtcctgcagttcagggccagccagcagggtagccaggcacttgtgcacaagtggaaaggcctaccatagttgtgggaacgtggagtcagagtgtatgccagcaattgagtgactcgatagagaatatgcacagtgcatgctatgcagtcatccagaagagacttttacaggatatttaatgacatacttattgtgtgttaaatgaaaaaacagacacaactatgaagaataaaataaattcttactttgaagaataaaataaatatttgcacaaaatagaagataataattcatcaaagtattaatagtcggtaactaggcccagattaagggcccaggtgtgtatttctgtactacctacacatagtgtagaatgagccttggataaatgtgtaccagagtcccttgggcccagggaagatgtgttgtgttctctctcagggtgcctcatcccctgtctaggctttggcatcgtgtctcctgctccatagaccctctcagaggtccaccctggggctgtccctctcctccgaccatagcccttcagaaacccactcccactctgccttctctgttgctagttatctgtgtataaagctatttcccctgtcagaccacagcaagccctggaggcagggtccactctaggtagcatgcacatttttggcaggctttggttcccacagtttgggatctctgcagctgcagtttgaatagagttgaagatgccttaaatatcagcagccactttgacccaggcttctaggttggttatgttaactgagctgaatacagaaggggatttcagtaatttcattaaccttgactgtgtctttccttccagctcacatgtctgaaacggccgctggtggtcatccatgaactgtttgacaaatccatcatggatatttcctggtaaggtggattctacttacaggaataggttaagaaaggagaagccacacattggaacatgaggccttctgggtgtgactagggtcaggtggccagtggcccctccccaggtgtcatagtagcgcagaccaagagtgctgtttgcacgtgatttgggaactggcagcggtgtacctgctgctgcgagaatgtcctgcctgtgtagaatttgccactggaaaatgccttttcaggatttgtctaagacgaggagaatgacgtgatcctagtatgttccactttactccgtcagtgcatgaaccaaagtcagaagcacactttctgcttctcagtgacctgatttatatgtatactttgtcaagttttttttattttaatagtttcaaaagtaagataagtaaaattgaaaattcttacagaacatatggtaaaggagatattttgtacacctgcttagagctaaagaacaccagggccctttgggatacaattgtcgccccctcccccccccgcccaggccaaagaagggaaccaggccacagaagggaaccaggagtttccagcatctccctagaacactgcccaccatcctcacaggccagctactgcggcacatgtgtctgcctggggctcttgctaccaggctgctgatggccatgtctttcaggactctgaatgggctgggcatcttggtatgctctatggacggctctgtggcattcctcgacttctcccaggatgagcttggcgatcccctgagcgaggaggagaaggtaggctgacggctcttgtgctgctgggtgctctgtggccattgccacaatagctctgagagacccctttgactacaccctcttcttgtgagatacacagacaagtcatttcttaacatgtaatggggtattcatcttttatatcttgtaatccttctttacaaaatagattaattaaaaaacgagtccccatttcagaaataagtcctggagttaagagtagaactattttaggcatctctttttgagctgataataggccatccactgggaggtttttgccctgggaaagagctgaagtgactcctcaggggcccctgctcatgtcactttcaccttcatggtagtaatattggtcatttcttagaacgcattgtctgccaggctctgggaatgtgttttgcacatatgatttcatttaaattgcacaaaacccttcaaggcaaggctcatccatttcgtggatatggaaactaagcctcagaaaatagcatggctctttgcccagactgtatgtgacc

SEQ ID NO: 12972 - DNA, 1606 bp, Homo sapiens
aaagagattcatgcttaagaaaaatggtaactgagtgctagcatggcatgccacagatcaggagggtaatggatgggcagctgttgttggggaccctgatgctcctaaacctgctgtgtgcacccccaccactgggctctgggctcagctcagtcaccatctcctctgtgaaacccttgagcagatacgggctaacacaaacccagttttgcaaaagattgatttttcttattcattgtgtttaaagtcacaacagatggcataacctggcacagtgctgcagtttataactagtaaaattcttctcatatttcagctctgtatttgaagtatgctttccttatggatccaggtcattttaactctttgaaagccaccagcatgtgtggaaacactcagtctggctatggagagggaagctttagagaccggagtagcatttggattacagatctatatggggtaccgtcgtacacacctttgtcttcagccataacttataaaagactcagccacagtcaggccctttgagctagtaggcctcctccttatcagggagctaccagggaggctaacgtcagaagtgctggtgtcacagcccaggaagggcagccataggcagggccgctagatacagataagacctggatcagaactagccccttggtgcctgcctccttgatgctgtcatttcttcaattggcttttgccttggtggagatcaaatgaggaggcccttctgcttctgtctggtgtgggggctggccatggcagactgctgagtcccctctcttgcatatccatcccatggcccatggattgcaggtcatgtttccctcagacaacacctctccacattccttttttcttcacagaaattctagctactctgagaggtcattctggcttggtcaaagggttgacatgggaccctgttggtaaatacatagcttctcaagctgatgaccgcagcctaaaggtgtggaggacgctggactggcagttggagaccagcatcaccaagccttttgatgaggtaagtggggacagctcagggagctgagcccccgcagctgccccagcctcttcctgacttctgtgtacagagagggagctggccatgggccaggccacctggggaatgcacagagtccgggggcctgagcggattcaccaaggctctctggggtgggactctggccctaagagtcagataatacagaatccttcatttctgagacgctgtttaatttccaactttgaaataaaagggatttatagttttgttgttttttgctttgttttggcgacagagtttcgctcttgttgcccaggctagagtgcagtggcacgatctcagctcactgcaacctccgcctcctgggttcaagcgattctcctgcctcagcctcctgagtagctgggattacaggtgcccaccaccacacctagctaatttttgtatttttaacagagatgcggtttcgccatgttggccaggctggtctcgaactcctgacctcaggtgatctacccgcttcagcttcccaaagtgctgggattacaagcatgagtcactgcgcctggcccggatttataggtttaa

SEQ ID NO: 12973 - DNA, 1262 bp, Homo sapiens
tcctctggactcttcccacccttccaggatacccaggacatgtatttcttccccgtcttcctcccttctccctaacacactcctccctgcagctccccacagctgctctctcagactcttctctcctctccacccagcacccccaggctcactctcagcaggtgaatatgccccagactcacgaggtcaaccagagccattgagccctgaggtccaggagaagatatttaaaaattcctcaaattattatgacctattcagtagtttttcacagtagcttgtgagaaaaaaaatgatctccatctctgtgcgctaatatggaagaatcgccaaggtatagtaggtggaagcagctgtgctgcagagtggtgtgtaccataggccctgcctgtccatctgtgtttcagagggtgatgagaggggggaggtacaggggtcttgagggtgctcagagcctggggagtgactagagtctcatttgcacagcaatccctctgtgagagcgagcgggcacgagtccgggctgcacggaagcacatcctggtgtgggccccgaggcagagcccccctccagactggcatctccctctgccacaggagaaggacgagtgacaagcatccctgccattggcctgtgcagcttcctcagtctgtttcaagttgctgttgcacagccctggggactgtgaccagcctacacagtctggtgggtccctgtgagctcttgctcacaggaacatggagcaggacattgctagccctacttgcccacccctcacctgcatgcaggataccctgacactgcgatgttctgcaggacaattgcaccgctttagagcttccaggaggccaagcattatggcaggtacttgtgagcagccaggtcaggctgggcatggtagcataggagatggcggtcctgaggtctaggcttctcaggtaaactgaagggtagccctgacctgtgtggacacacaggtgggtcataatgaggtagctaaacagttgtgccactgtgaatgtctttcctagtccttgggaaactgcctgccacgtcccaggtttggtgagcattgtgagtgctcacactctgctccactcgctcagttccactgcacatgcaggcaggtgtgccgagcaggtagggcttgctggcccctctgcaccagcaggcttcacttcttaggctcccaggtcggcccctggagactctggtttttaagaaatgcacacagctacagaacacacaaccttgcataaag

SEQ ID NO: 12974 - DNA, 1169 bp, Homo sapiens
ccgcttgaacttcagcctggggcacaggatgtgttaccgggctcacggagtgactcagggaactagtgccgccccagggccccaaggtgggcggttcggtgattcagagagggcagctctgtgttaggacacactggggccagccaggaagggtggaaaagatagggaccagcgtgagcatagaggctaagggaccatgggagctccaagcgcgctcacagtggggaccaggtcctgggggctggggacaccagggaggtgaaatacccctccagcgggtagggagggtgggcagaggagggccagcggccaggcatttgggaggggctcctgctctttgggagaggtggggggccgtgcctggggatccaagttcccctctctccacctgtgctcacctctcctccgtccccaaccctgcacaggcaagatcgtggacgccgtgattcaggagcaccagccctccgtgctgctggagctgggggcctactgtggctactcagctgtgcgcatggcccgcctgctgtcaccaggggcgaggctcatcaccatcgagatcaaccccgactgtgccgccatcacccagcggatggtggatttcgctggcgtgaaggacaaggtgtgcatgcctgacccgttgtcagacctggaaaaagggccggctgtgggcagggagggcatgcgcactttgtcctccccaccaggtgttcacaccacgttcactgaaaacccactatcaccaggcccctcagtgcttcccagcctggggctgaggaaagacccccccagcagctcagtgagggtctcacagctctgggtaaactgccaaggtggcaccaggaggggcagggacagagtggggccttgtcatcccagaaccctaaagaaaactgatgaatgcttgtatgggtgtgtaaagatggcctcctgtctgtgtgggcgtgggcactgacaggcgctgttgtataggtgtgtagggatggcctcctgtctgtgaggacgtgggcactgacaggcgctgttccaggtcacccttgtggttggagcgtcccaggacatcatcccccagctgaagaagaagtatgatgtggacacactggacatggtcttcctcgaccactggaaggaccggtacctgccggacacgcttctcttggaggtgagcccca

SEQ ID NO: 12975 - DNA, 1169 bp, Homo sapiens; identical to SEQ ID NO: 12974

SEQ ID NO: 12976 - DNA, 1261 bp, Homo sapiens
ttggcttaaacagaattttagcatcagaactagctttctgggattggaggcaaaccatcaaggtggtccctctccagtctggacacgatgccagcaaggatgacgtcctgccacctcctggagttaccctggcctcctagggtccctttttctgatgaagtcttaattccctaaaagcgcctctttggacactgaggccctctctgcctttcctggcctccggcaacagttttttacaaagattttttgcagtcgagtccatatgtccacccattgatttttaaagcttttgtgatattttagcattttgaaagactttcacagtgagagtagaaggtagatttggaatcatgcattttagcaagtggacttgttgaaacaggaagcaagggccttcagtgtagcccattcttgatccagagctgttgcctgtgacagcggtttctctggatgtcaaaggcagctgcctggtgcccagcttgcttctcgactggtggcccctatgggtgggtgtgcgatggaaatgtgttcctgccggagtctgaggcaccagggtgtgctcaaaggctggccctggtggtggactggcacctgtgcagagtgccgtgtgcttgtggtgcgccatctgaagcaagagtccagcgttctgccgtgtctgtcccccaccatgccccctacaggcggtactgatggcgcttttttttttttttctgtcaggaaaacaatgttggcctgtgggccgcccacaacatatccttccctcactacctgtgtgaccaaggttggcttctgttgacctttaaaaaagaaaccctcaactcaaattgctataattagacacttgcttctgtcttgcctcctgtctgcagctgtgaatagtcatttgactgtgactgttgcccttagccagccagatgcgcctgtgaaccaaagcttcgtgcacatgtgttcccctaaaggttggggagcctcgctgtgtcttgctgttcccaggcaccaccacagcaggtgctgccatactcttgtggtctctgtgcgccccccccccccccccacccgtctgccaagcatgggtatgaatcgtgcacacagccatgcttcaaggccggggcaggggagcctgtgctgatgccatccagggcactgggctgtgcctggaaggcgagccttgattgtctgaacacataaagcaaactgtccagaagggaatggctgatgtctttattctgagggtgagaggctggcaccctgtggacccttg

SEQ ID NO: 12977 - DNA, 1139 bp, Homo sapiens
ccctgctcagaggtctttccagtccagatcgtccaagctgcgtccagtggctcctggaggagtcagtgggtactgtggcctggcgcctggtagctggccgtttggtgccaagtgaccttgtccttgctgtgggcgtggctgccccagcagcctttccaacacggttgggagccgagcctgtggcaaagaggcccatgccccttggttgcctgagggtccgtgctctaccgctctgcccaaatgggtgcagtcagatgaaggagacagaaggccagggccgatgtcaggtggaccagtcctttcttaggtcagcaattaccatgaaatgggtcttctgtgaatcctgactcttcagacccggcagggcatgtctcttccactgctcacagctcttaggaagtcttcgctctcccttccacagatgcacagaaattcaaaacaaagtttgaagaatgcaggaaagagatcgaagagagagaaaagaaaggtgacgtggtgccatgggttggggggcttctttgcagactcactctgcatctgactatacttccaggcgggtgctttttctgtctgccagataaacattccagggtgctgtggccgcctcacgtatccagagtgatgcagctccctggggacacaggtgcttcctggggagccctgagcacttgtcagtgttgctggcctcagtccaattgggcaggcattggagtccgggcactgcctggagctcaccagaaggtgctttatgatggtcctcggtttgtctctcagagggcttggtcacctctgccatgaggctggactgcagctgtggtggcaagtgaccagatgtcactgagcagcctgaccatggtctaggcagtgcttgagtgcatccacctggcttcctttcgtcactgaatttcaagaagacagactccaggaggcggcttggccaggcaggagtctgtcccgagggcgggcaagccgctgtgggtgggtgacggcacttgggaccagcctggcgagggccatgtgcttgaatgcaccgtgcttctgttttctcactgtgctgcttgtgtttttagcaggatcaggcaaaaatgatcatgccgaaaaagtggcggaaaagctagaagctctctcggtgaaggagg

SEQ ID NO: 12978 - DNA, 1193 bp, Homo sapiens
gaggctcctcctccctctggctgccctgagtggtgggcccctggggctgcatggctccaagggcagaaccccaggtgtctgcagtagccagctgtggcctccctcctgttgcagagcccctgcccctcagccgtggatgctcagggacagggccatgggtcactatgtggctcttatggctccttgaggcccagttcctgaggccacggtgccatgtgtggcccccgtgggtgctgactggcggctgcaggcggggtggcaggtgggcagtggtgagaatgccttctccctacaggttccaggccctgattccctgaccctgggggacgacagcatccgtagcctggactttgtgtccgagccgagcctggacctccctgactatgggccagggggcctgcatgcagcctacccgccatccccaccgctcagcgcctctgatgccttctcgggcgctttgcgctccctgagcctcaaggcctcgagccggcggggcggggatcatgtggccctgcagcccctgcgctctgagggggggccccccacgccccaccgtagcatttttgccccccatgcactgcccaaccgcaacggcagcctgtcctatgacagcctgctcaatcctggctcgcctggtggccacgcctgccctgcccacccagcagttggcgtggccggataccactcaccctacctgcatcctggggcaacgggcgacccgccacggcccctaccccgcagcttcagccccgtgctgggcccccgcccccgggagccctcgcctgtgcgctacgacaacctgtccaggaccatcatggcatccatccaggagcgcaaggacagggaggagcgtgagcgcctgctgcgctcccaggccgactcactcttcggcgactcaggcgtctatgacgctcccagctcctacagcctgcagcaggccagtgtgctgtccgagggcccccgaggtcccgcgctgcgctatggctccagagacgaccttgtggctgggcccggcttcggtggcgcccgcaaccctgccctgcagacgtcactgtcctcgctgtccagctccgtgagccgtgcaccgcggacgtcgtcctcctccctgcaggctgatcaggccagcagcaacgccccggggccccggcccagcagtggctcacacaggtcacctgcacgccagggcctgccct

SEQ ID NO: 12979 - DNA, 1139 bp, Homo sapiens
agcacagctgctccccaggcaggctctgcatccctcacctgctttccaggtgaaccctccaagcccagagggcagggactgcacggggccccacaactcggctgcactagtccacgtccgcgtcgtctctgtcttgctgcctcctccgtcctctgtccccgtgttcgtgtgttcaccgtgtgcatgtgtgtatgtgcttgttttgatgcagggaccaccctcagctgaagactcccccaagtaagcttaatgggcagtccccgggcctggcccggctgggacctgccaccggccccccagggccctctgccagccctacacggcacacgctggttaagaaggtgtccggcgtgggtgggaccacctacgagatctcggtgtgaggactgactgccacacatccgccatggtgccacggggaccaggaccccacagcgcaccccccctccccaccaacttctctgccccagggacccgaggccaccccagcctggtgtggacccatcggcgggagagagtgccacgcctccacagcttgccccaagcgctctgcctgcccgtccactcatctgcccatggggaagtcggctcactgggacaagggccactgggctggtctgtgtctgggcctgtcccatggctggggcagtgagggggcccagtcagcctctttggggcaccctctctcagccaggcttggcccactgccatcacccagcaccccagatcaccgccaggccagcccccaatggtccccttacggacaggtcccagagatggacagaggcacccagggcccccaccgtccttctgacacagcctgtgggctcccggaccgagtgtcccccgccaggctactcctaactaacgcgttgcctttcacggaccccgctggaagcttgtagcttggcaaggctgatgcttctgccctggcctgctctgggtggtggtggataggtggacagacggccagccagccagctgtggccgggggcccggctccatgtgtcccgtgtctgtgtgctgtgctgccgcgccgtgtctgatgtgtcagtgctccggccgccgctgtccctttcatcaaagccttaacctttgctttatgctcttgtgggaggcgacgggggggcaggcgggag

SEQ ID NO: 12980 - DNA, 1243 bp, Homo sapiens
ggagggcccaaaagacagcctcctgcagactcggccatccctgggtgagaaagcagcagcctggcccatggacaggatgtttcaacactggccctgtgccatccttccagggggcctgacctgtcagaatggtgggtaactgttgccaccttggtcagtgggcttgtgggggagctggcagcctcgtcccagtgggtgctgggctttattctagccttggctttgcaggtggcctgctacagctgcacgtctggacagtggtcatctgtctgcccactccctgctgggcacggtgagcctggcattgctgtgctggacaacaggatctatgtgttaggtggccgctcacacaaccgcggcagccgcacaggctacgtgcacatttacgatgtggagaaggactgctgggaggaagggccccagctggacaactccatctcaggcctggcggcctgtgtgctcaccctgccccgctccctgctccttgagccgccccgcgggacccctgaccgcagccaggccgacccggactttgcctctgaggtgatgagtgtgtctgactgggaggagtttgacaactccagtgaggactaggctccctgtgcctggcatcagagggaagggaggctggggctgcagggcagtgaaacccacgcagcctaggccagagcactttactccaggcagggcccctgcccctgttggccacagcttatgggccctgccctctttcttcacaccagccccttggccagcctgccgcaggcatctcagggccatgcagatcccaggctgtggattacgtcactgcaggaactgcttctgaaaggctttggccttcctcagtgagccctggaggggttggccttctctcctccctgcctagatcagtccttctccaaaaggacctgggagctggcagcctgggcaggggggctgaggcacgtggtagccctctttctgtgaatggggtggggctgtgggggcagctggggttggaggatgagagctcctgaggggcagaggagcagagatgcatcagctcgcctgggactggctctgtgataaaaagacccctcccgctgggttttcagaccccatgttgttggtcaatgaaataaagcatcttacagaaggtgttaactgtttttctgtagccacagcctcagttcctttccacagtgcacccaagctgcgtccccaggaagcgtggcttctggggtcagagctgccatctgggaga

SEQ ID NO: 12981 - DNA, 1202 bp, Homo sapiens
cccacatcatgagtttagtgtcagatattatttacaaacattttaaaagcagggtcagcaggcccggaggattgcatgtccagtgggagtgggggaggggtggaggccactgagggtgggtcagcggtccccagggttctgtggcttcttccagactggcttggaaaaaatgcttttattttcttggagttcccccatgcagatgttaactttaggagcaaaggaaagacaaaggctacatttcatttctgagtctatagatgtatccgctattgggaagaggttagaggtcaatgactaggacagtatgtcccatgagaatcgagggaggattcttgtctgtatgtgagtgggaagtggtgaagcctcacagcgttgtcaggcaggtgtggggtggtgattggccttgacagagtacccagccacccttcctcactgccctctcacgccatttctcctggtggctccacacaggtgtatgcccacgcaggcgcgacgctggaggggaagatgtatatcacctgcggccgcagaggggaggattacctgaaagagacacactgctacgatccaggcagcaacacttggcacacactggctgatgggcctgtgcggcgcgcctggcacggcatggcaaccctcctcaacaagctgtatgtgatcgggggcagcaacaacgatgccggatacaggagggacgtgcaccaggtgagtggggcccggggcagtccacacccgtcatcattcccaagcctctcagttgttattgatggaaaatgtaattgaatcatgtgccttttaaaaatagactattttttagagcagttttaggttcacagcaaaattaagtggaaggtacagtttccatacacccccttttccccccatacacatatagcctccccactgcagacctctcgctccagaggggtggatgtgtcacagttgttgaaactgcattgatgcatcaccatcaaccagagtccacagtgttcactcttggcacattctataggtttggacaaatgtcaccatgacagtatcacacacatacacatctacctttgcttattactcttaaaaacttttaggccggatgtggtggcacatgcctgtaatccaagcagtttgggaagccaaggcgagaggatcacttgagctcaggagcttgagaccagcctgggcatcatggcaaaacccca

SEQ ID NO: 12982 - DNA, 1171 bp, Homo sapiens
aagagggaactgacatatatcaagggtccactcctatgtgctctctcattttcatcatgttcctcttcactttaatgatccccgttttatagatgaggagactgaggcttagagaggttaaaaacattctgtacgggaggctgaggcaggagaatcatttcaacccgggagggggaggtgttagtgagccgagattctgccactgcactccattctgggcaacaagagcgaaactttgtctcaaagaaaagcaaaacaaaaccaaaaaaaaacatgctgtatatcctgtcacccagtatgtttccaaaccaggacttaaacctagtctgcagtaagccccagtctccagtgtgtcagaaaaggtcggggacaattaaggaggacttcccttctgctttgcctggcccacaacagcccgtatttctgccatcattctctctcccacccccagatgctgttcaccagcccaggcttgaatgggtgtcattctctctgcagatcccagaaattatccatttctgctgtgatttcctcatgtcctgggtggacgaagagaacattctcgatgtctaccggctggcagagctgtttgacttgagccgcctgactgagcaactggacacctatatcctcaaaaactttgtggccttctctcggactgacaagtaccgccagcttccattggagaaggtctactccctcctcagcagcaatcgcctggaggtctcctgcgagaccgaggtatatgagggggcccttctctaccattatagcctggagcaggtgcaggctgaccagatctcgctgcacgagcccccaaagctccttgagacagtgcggtttccgctgatggaagctgaggtcctgcagcggctgcatgacaagctggaccccagccctttgagggacacagtggccagcgccctcatgtaccaccggaacgagagcctacagcccagcctgcagagcccgcaaacggagctgcggtcggacttccagtgcgttgtgggcttcgggggcattcactccacgccgtccactgtcctcagcgaccaggccaagtatctaaaccccttactgggagagtggaagcacttcactgcctccctggccccccgcatgtccaaccagggcatcgcggtgctcaacaacttcgtatacttgattggag

SEQ ID NO: 12983 - DNA, 1126 bp, Homo sapiens
cttgccttgggagggactgagagatgacttcatgtggccccttcattttataggagtaatcgagtctagaaccagggtgctaccatctggcagagttcatggggaacgcaggccactcagagagcaggaaatagaggccagctggccacccagtagtctaatgcgtacttccttgatcctgaactggttgtgagccatccctaggggcaacccctcccccgccccgtcccttcatgccagggctctctctttgcttcatggcgaccacctttcctgtcccttttttctgatcaccctgctcagtggcctgtcattgctctctgttgagtgccccttcccatatgcctctcctggacctcagccaggctggtgtgctggcgatagcaccttgtcaccaggggcagctgctatgcagggcctgttggccagggccctgcagcggtggagtcactggtgtgtgcaaacgtctcttctccttttgtgtttcagcgaggatgccatgaggaaagctggtgtggcacacagtaaatccagcaaggatatggagagccatgttttcctgaaggccaagacccgggtaaggccctagtaagtggagccactctggcagagagacttggagaggagagcatcacagactctggaacccctctgttgggtgtcctagggtgtaggggtggggtggttgctcatcgattgatcacaggcacagttggttttgcctgcagcagtctgggtcctcctgtgtgtccatggtacagggagggcacttgggttgcaggcccagcctctggccccagacctcactgccgtcaccttccatctgtggtcagcccctgtgaatcctacaggaagcttgctcaggcccctagctggtcctgtggaagggatcaatgccgtgagcaagaacctggtttgtcctcagcccctcctaggggtccttacctaagccctacagggccctgaggcatgggcccagaagcattcctgtccccttttgctaagtgaagaaggtgatgcttatctagaactcgccacaggtggagtggagaagaaggatttccactatatgtgggctttctccctgggtggggcaccacactgagggctttatgtgaccacctcc

SEQ ID NO: 12984 - DNA, 1196 bp, Homo sapiens
ggctgagttggactctgcaacagcacgagtggagctgtgtgtgcctgtggacttgtgccctccctgggagagcgtcccctggccactgtgttaccgcttgctcagaagggcccatcgtgctttgtacgctcacccagcaggagggctggacagccaggagaggcaggggttgccacctgccctcaaggcctcagcccatctttagtgtatctgcaggcatcagagaggtcatttgtcccttaacattaggactctggtccaggccaggctagaggtatgggtcatgcagtgaccaacacacctggcgtcctagccattcatatttgggagtctccaggagcctagtctcttactgcttggggctgtgaggggattgagcctgtaggtaggcgagatctgtgctctgtgagccttacgccctttgagccatggtcagtctggtaggccctttcctgagaagctctgcccttgtgttcccacagatcctatgaatgcactccagagcctgactggcggacctgctgcgggagccgctggaattggcatgcctcctcggggcccgggacagtctctgggcgggatgggtagccttggtgccatgggacagccaatgtctctctcagggcagccgcctcctgggacctcggggatggcccctcacagcatggctgtcgtgtctacggcaactccacagagtgagtaccacacttcttggaggatttgccgctttccttgcaaacgacaacacattttattcctgtgcttatgatggtatcaagaaaagcatggagaagctccaaatcgctctggtttttttgttttttaaatctttgttgtatgtggagagaaaaggcttccaattttcgttgagctcccagaagggttaagtgatgctgggccctcctcctcctcctagccctgggcaggagggtggggatggcctgagactccatccaaaggtttgtgttttgtggctgaaatagatacagtgtgtttcagagggttctcagctacaaggcagggctgagtgccagcaaccacaactccactgtctgcccgagctctgggcaccatctcttctagtgctgcccttgccccttggtcaccatgggtgtggcttgcagccatattatcttctggcttcctttctgtgaaggagactctgtgtcctctccacacggctgctgtggtgggaa

SEQ ID NO: 12985 - DNA, 1215 bp, Homo sapiens
aatgtgtggggaattgggtgagcccctcttccccacgtgctcccatctgtaactctccatctgtgatttgcaacaggtcttccactggctcgaggctgcgaggctgaccgacaggggcgcccaatagagtttgtgggaatggagtattgcacagatgcagctgcacaatggtcttcctccacccctctgggaatcaccattaggcaggcctcagtagggcaaaatgtttatttggtaccgggggtctcctgacctgtctagcattcccacccactcttctgcacttcttgcaaggtaacttgaatcatcacttatttctctgccacctggttttaggactggcactctataaatgacgctgactttgtatagaaggattttgctaagggggcaaaaagcccagataccattttaactggcccagttcattttctcctttcattttacaaaagaaatcatgcagaagcatcaattaaaactgatttatttatgttggtacatccaacaaaatagttggagccacaaggcccttgtctttttaaaaaaacaaaatattttgaagatggtgaaagtgactgattttaataatgagataggtcacttaaaataacagtgcctttgaccttaaaacatggcactggcccatgtgacctttgccatttcccagtacttccctttacagtctgcagcctataaacagtggtgtctcaaagcaaaggaaacctccacaagtgctgcaacagtgcattagtttttatgtagcaatttgtttataaaaattcccatcccataatgcatgaccttcctaaaaatatccacagcctccataggcaaggtgagctttctgtgctacccacttgttagattccagccacctcagggattctgatccatgtcattaacgaccatcccagggtgtgagggcctgattaaagcttatcgaactagacatttgtttattagatgagctcggcattattattttctcaataactggtagaagggaaattttaaacataacactcaacccaaacaaaactacttcgtgaggctttcagcaaaaaggctgcttaaaagcatgaacccgggatgcagagcagcttttgtgcacggttccacttactgtaattgtttctggttctttcctctaacaccttccatgtatgtcaactttttatcaccgtcaggcatagactcgtggagattagtcattat

SEQ ID NO: 12986 - DNA, 1120 bp, Homo sapiens
atcccagctactcaggaggctgaggcaggagcatcacttgaacctgggaggcagagtttgcagtgagctaagatcacgctattgcactccagcctgggcgacaagagcaaaacttgtctcataaaaaaggaaaataatttattatagaggagagtggtatattaagaagtttgacaggcactggcttagagtaagatttttctcttagagtaattttctttctctcttaaggtatccaagcccaccaatgggatctgtctcagcacccaacctgcctacagcagaagataacctggaatatgtacggactctgtatgattttcctgggaatgatgccgaagacctgccctttaaaaagggtgagatcctagtgataatagagaagcctgaagaacagtggtggagtgcccggaacaaggatggccgggttgggatgattcctgtcccttatgtcgaaaagcttgtgagatcctcaccacacggaaagcatggaaataggaattccaacagttatgggatcccagaacctgctcatgcatacgctcaacctcagaccacaactcctctacctgcagtttccggttctcctggggcagcaatcacccctttgccatccacacagaatggacctgtctttgcgaaagcaatccagaaaagagtaccctgtgcttatgacaagactgccttggcattagaggtaaaatctgttcagattagctttttgggtcctttgacatttggttttaatttttagttttagtttagtttctgctcatttaagcttatattcatggaattagagcactggatgattttggaagatacgcactgttagcgtttcattttaaaatttttttatagagacgaggtctctaattttaaaagagttgtttgcccaggctgatttcgaggtcctggcctcaagcaatcctcctacctcgacctcccaaagtactgggattacagatgtgagccaccatgcctggcccattattagtgtttcacagcttgttttgttctgtcctattccttgtttgccccaaattctcagccttcttgctctttcttgttcccaaagcctaacagatttagttttgcagttgttggtttttcttccagt

SEQ ID NO: 12987 - DNA, 1198 bp, Homo sapiens
gaaatgctaactttgtcttcttcatccatacaggttggtgacatcgtgaaagtcacaaggatgaatataaatggccagtgggaaggcgaagtgaacgggcgcaaagggcttttcccctttacgcacgtcaaaatctttgaccctcaaaacccagatgaaaacgagtgattgctgttgccctgtttcctgctgctttgttgttctgcctgtcctagtctcctttgaagtgggaaagcattttctctcataggcaagtcacactgcattgccgaagtccagctttctgcagactggcagtcgcacacacatttggaatgcacacagcggctgcctcctgatgtttgtatcatagtcgtattgtcaaagagtagccgattttagagttcttttggatcataaactggaaatactgatggaagcacacaagtggagagaagttgacatggaaagggtcttccttctcattgctgcccgtttgtacatgggactgattctgttgtgttcaccagagaaagcttgaggccatggcgagatactgcatgtttgctgttccacaaagcagtggcttagctgccatcttgcttttctttggacaacaggaagtgaaccttaaggaagagagaattctgttctaaaactccaaaatctggcttttttttttcttttgttttggtttggttttggaaaactaattaattagacttgtgtgggggtttttttttgttttgttttgtttgttttgttttgtttttttgagacggtgtctcgctgcatcacccaggctggagtgcagtggcgcaatctcgccttcctgcagtctccgcctcctgagttcaagcgattctcctgcctcagcctcccaagtagctgggactgcaggcgcgcacaccacgcccagctaatttttgtatttttagtagagacggggtttcatcatgttgaccaggctggtctcaaactcctgacttcaggtgatccacccgccttcagcctcccaacgtgctgggattacagccgtgagccgccgcgcctggcctagacttgtgtgttctaaacaggttaagtagcaggttgggtttttatgatagtgcaaggaatgactcatgcctctgagcttctaaactgaagctgctgtaactaaaggaatctgaaaagaacaaccctgaagcagaggcctttattgtcttggttgccagta

SEQ ID NO: 12988 - DNA, 2531 bp, Homo sapiens
aggcctgttcatacaagccaactggtatatacgtgtggttcatccatcatctgctgcacatagcagactagaattctgggaaccctgtgcaattcagtctgctctcccttgtggaccctggtaaagaaaagcctcagctcatagtgaacacagcagacctagaaatgtagcagcagcctactgagtagctttcatttactgatcatctgctgtgactgtggccctgtctggaggttcctaggttttgagatttagagcaatgcattctggagacagaaccagcagaacagccatttttcaatttttctttaaatcagtattccatcaggcagataactgctgtattcatgaatcttgagagtgttcctgagacagaattaatggtcatttgggaaaactatcgccatggcttcccatctgtggttttcctctaaaagccttggagattagcccttccttgccagtgagaacggtgaccgcctcctgctctgcacggtctgcggcagttgccgcttctggttaggtgtgtcaggttggcttattttgggttcaggcctggcgtagcacccacaagtggcagacatatcacaagagtccccagactctgcctagaaacagtgtttgccctttggccagtgacgtggttcatcccggcccatgttgagccatgagtggagtttccaacagagggaggaatgtgtgccttgttcaaggagggcacgacccttaggcctttttcaaccagatttagctgaagggcttgacacctttgaattacagcagttgactcagagtgcaagaagtctggccattttggaaagcaaggtttcctttcagccctgtctactgaccaataccccgactcaccttgtgtggcgcacttcagaatcagatatacctagagtatacctgtggtttggttttataattaatcagctcgttacttcagcccatgaaaatggcatccagggctgccaggagattcagagctcaaaacaaggcgagcttgagttctgcactccagatatgtgccaaaactagtaaaacttaacggacttacaaccttgtcagtttttttaatgaggcagggatactctgtttttcacactaaacatatgaatgcagcactgctgcctcagctcagcttcgtgcctgggttccccactggtctgggaagactgttgtgctccatagagcagtgcacatctgacccagagggtgggtgttcataactgctacttgctctgctctaccatgtttaaagaaatatttggatgttaaattaactcactatggtttttcacctgggaaggaaacaaattacgtactagagggcattgactggttaaaaacttgtgtatcccgggaaggacctgcggtacaggagtcagccatgtctgtgctgtgtggaaccacctgatgacatggttaacgaggaagacgatgtgttgaccggctgccgtttgaggactttggtcacccagactagacaccttctgtgctcatgtttggaaagctgaaagggaaggacagctgtgccctcctgggagctcatgtgtccctggcgctgtgctagctttcctttacagctgtttacagacaaggcaggcctgaggcagatggccactgctcttgtgatgtttgctcagaggaatatgaacattttatttttgaaaagggatgatgtggttttttgccaggtgtttataattaatcctttaatattatggttattaacctcttaaacatgaatgaattcttgattgttttaacacagtacctaagactaatgctttctgtggacaccactgagctctgcctcaactccaccctctgcgaccggaggactatgcccctagtaactgctgtcggtgtggacgctgtgctggttctgttttctaaaggagcagaaggacaggtctctgagacaggatcgttgtccctacaggaggaacagtggccttgcttcttagacggtcttcactgtgtgttttaaaacaacaacaacaacaacaacaacaacataaaactcttttgacctgtaacttaaagatcataaacttcaggcaataatattttctgtgtaagcttttaaaattatttttggggatcatagcttgttttattttgtgctataaaattaacagtattaaatgacttatattcttagaatacatcgagtgtcttttcttaacagattagtgcctttttatttttgtattccgttttacgttactggtcccagcatcaaaacccttgtttccatggcctgtttgtatattgtctcaataaaacttgcatcagccggtggtggcggcagcttcggtgtttcagtgtctcctcagtccgcccccactagcctcctggcagttcatcagtggtgaaatctctgatgcttctcagagacccttagtgctgctgctgaccaagagctagaatgaagtcttggcatccgcccattccaacactcgggcacccagaggagagcacctggggtctccctccaaaagagaaatctgcctcccagagtg

SEQ ID NO: 12989 - DNA, 1207 bp, Homo sapiens
gaaccagcagaggaccaagggcttcctgtgtgacgtcatcatcatggtggagaactccatcttccgggcccacaagaacgtcctagccgccagcagcatctatttcaagtccctggtcctgcacgacaacctcatcaacctggacacagacatggtcagctccacagtgttccagcagatcttggacttcatctacacaggcaagctgctgcccagcgaccagccagccgagcccaacttcagcaccctcctcactgccgccagctacctccagctgcccgagttggcagccctctgccgccgcaaactcaagcgagccggcaagccctttggctctgggagggcggggtccactggcatggggcggcccccccgcagccagcggctgtccacggcctctgtcatccaagctcggtatcaggggctcgtggatgggcgcaagggggcccacgccccccaggagctcccccaagccaaaggctcagacgatgaactctttcttggtggctctaaccaggatagcgtgcaaggtctgggccgggctgtctgcccagctggcggggaggcgggtctggggggctgcagcagcagcaccaacgggagcagcgggggctgcgagcaggagctgggcttggacctgtccaagaaaagcccacccttgccccctgccaccccaggtccccacctcactcccgatgacgcagcccagctgagcgacagccaacatggctcgccccctgcggcctctgctcctcccgttgccaacagtgcctcttattctgagctggggggcacccctgatgagcccatggatctggagggggccgaggacaaccacctgagcctgctggaggcgcctggtgggcagcctcggaagagcctccggcactccactcggaagaaggagtggggcaagaaggagcctgtggctggctccccctttgagcggagagaagcagggcccaagggtccctgcccgggagaggagggtgagggggtcggggacagggttcccaatggcatcctggctagtggggctggccctagcgggccctatggggagcccccctacccctgcaaggaggaggaggagaacggcaaggatgcaagtgaagacagtgcgcagagcgggagcgaggggggcagcggccatgccagcgcccactacatgtaccggcaggagggctacgagacggtgtcctacggg

SEQ ID NO: 12990 - DNA, 2697 bp, Homo sapiens
tgcccacacccagagctttaatggacagtccgtaccaagcagagccgagaggagggaagccaggggtcccagcccgtctacctccccatcccacccaggcccccagctccccgcgggggccaccgcagggcctgtgggctgggtcacgtgggtctcgctgggacctggtccctttgttgcaggcggcttggagaaagggcagtgggacgctggccacggccagggtggtgtcgggagcaggcctcaccccgctggccgtgtctgtgtgtgtgcacgtgtgcttgtgtctgtgcgggcgcgtgcagccctggttctgcagggaacaggtgctgggggtgcagatccctccctccttgagccagggtggcactgttcactggcgctgggacagtcagggtgaccccaccgcctacctctctacatctaaagagccctctgggcctgtgttgctgttattcctactgatctgttcctctgtttttctttttgatttttgttttttaaaccaaaacagacaatagcttattttctttccgccccctccggggctgagcctgggtctgaagactgaatgtaacaggggccgctggcactcctgcgcgtcccccggctctggcgctgcaggggtgtcggcgcgccacctctccaggccccagaagcccttcttgcccaaaggcttccctggtccctgagccctgcctcggctgcctcaggggagagtgcttttcctgtagtttccaaggaatattctttgtttagaggtacttgttttttattaagagaaaaaccagtgtaacgtttatgtgactgtttgaactggaaggtctggggttccggggggtggggggaggctagactcaatgccggggccgtcggtactcttgttttcatttgtgtgtgcgtgcgtgtgtgtgtgtgtatgtgcgtatgtgtgtgtctatgtgtggtgtgtgccgtatgcatgggcagatgtttcgctttccctccttcctcgctgaacaaggtggagacttctgaccttttgctacctcttgaattcatgacaacgatatgttggtgactggcagtggaagcccttgacactcttgttttccttcgcttagcacctaggaagtcgtgtgcaggagccagcagggcgccaagtggcccagtgcctgcagctcacctgtgggttttccctttgagcctttggccacatccacctcgaggggaccctggcaccccgggcacacaaacctctgtggtataggtgaggggtgtgaggccccagcctggagccaggcactgggtgctgacaggggaaccatgaggagggtggcaggtctttgcagctcccggccagggtgaggcggaagtgagccctcatcctgccactcctatcctccattcctgcaagagttttaagcttgagagagctgaccacagggccccccggggaacagggatggcacttccctgagcagtcctggcccccggccactgtctcggggcccacctctcgcccctcatcttggtaattagccagcctcagatacttctgtgggccctgaagtgggctctcaaggtcagaccaaggttgctgatctcagtcccactgtcttcagccagctgaagctgtggggctgggctggcagcctttattgtcatcttgcttcaccatttttttttctctctcttttcattctattttaagtttagaccaaaaaaatacagagtcatcccctacccccacccctctagagaccctccagctaaaaacagagcctgagttcagggacccaagtggtgagcggcgtcttttgggggtgagggagcttgggtagatgaggctcctggctgagccctccctgtggtgatcccagcctaagatggcccctcttccctcctggtgggagacagaggactggaccctgggtctcaggttccagcaagtcaggctagggacctggggggaggagacccatggacttcacccatactcagtgagggggctcctgccgtcctgacgccaccccgccccatcagcacttaagccacatgacacaaagtctgtaccgcacgggaaatgttcacgcgcctggccgtgtgcatggcctcccgggctgtgggcagccgcatctgtgaggtgactcgtgaaagtaggtgattcctttgcagaacttcagggactgggagcagaggcccctcactcaacgacgtttgtgcgacatagtattgtatccaccttagtattgtatcgagccttttctgtgttttaatgagaaagcagaacactagtttcctatttaagactttaagggtttgtggggcggggcgggattaacacaacatttggctttgttttctttttcctttgatttccacatcaggtgtgtgcgagtgtgtgtgtgtggagatgttaagagcctcacaaggaaactgggttattggaggccaaggcggcttacagttctctgcgttcgtcacttaattcctgaatgtttcagagaaacaggaatcagaaaatagcagatatcatgtaggaaagagaggataaacaaagaaaaaagaaaaaaaaataagctcatacccaaattcacaaagcctattttttaaaccaaagcacattttgaatgagtatggaacctccatgggctcagaaaaaagatgctaatatatttatctcattgtttacataagcttttacagtttcagacc

SEQ ID NO: 12991 - DNA, 2148 bp, Homo sapiens
agggaaccctcccctgctgctggaaacccttctgagttggccctggagtggctcacgggcagagaagggtagccctggggctgggggagggattggaagcctccctggagtcacctgagccctcgtccccattcccagggcccctccaagcccagctggcaccaaagagcttgggcccgtgctgaccagcccccaaggccctctggccggaccatgctggtcctgaccagctagcctacgcggggatggccgtcagttctggccacaggacccgagtctgggcttgggtccccctgctgctctgcccgtgacccttggggatgggttgatgcgagggtcccactcaagccaaaaagccgggacctttgcgcagctctgtcgactctggtgggtccccactcctggggccccctaaccccaccccaggcagcggaaggggctgactgggtctggtccttaccaacatagacggtgcaaacactcttaacagtgttgtttttgtatcaatatgtttgtgcagtgatgaatgtatttatttctcagacttggggcgagtgagcgggtggcaggccgggctccgccactgcatgctcccgccggaccgagccccagcaagggctcctccaggattgcaaaaaaaaaaggaagagaaaagatgaacctttaagcaaataagaatctcagagactcgcagcatagccatacacctcagcctgtgaaatgaacgatccggaccctcaccaactttccccacctcaggcagccctgtgtgtttaccgttcatcaccactcgggggcaccgggccgcccacccactcccaaaatccgtcagtattcactggacctcaggccctgtgcaggagtgcgatccgggctgggccgctgggcaggctgaccccctgccctcctgcggccatcctgagttggggtgaggcctgggcagccggagggcagggctcagggagcaggaggctgcatccgtccacccccaggcgtgggggacaaaagccaaaggtgccaggccttagagcagacaagggctctcagccctggcatgccccctaaagggaccaaggtcctcctatttcccagaaccccgttggggcagatgttactgaacctgtgaatcagacgccaggagtgagggctggggagggacctaactggagcctcagtctgacattccacgccggggtgggggtgggcatgagcggtgggaactgaggctgcccaggacccccttcctaggatgccccggcttcagtcaccccactttaactttctaccaggaccccctccccctacctcaccttgctatttattgctgtaatttattgacctcaaaaatgctgcataacagacctcactggggcagggaggatccccagggctcccaccctccacttggcgggccccgtggggccaggtgctgaggggagcctctctaccccacccatcactagcttccctctgccctctcccaccccgggggggacccaggttgggcactggctcatttctcgcaaatacctcgaaggggaggggggagggatggggttatagctgttttgtttaattggaactggaagagggatcatgttttgttttatgcccttcccagaaggggggagggacaccgggatcgcactcctgtactggccaccgccgctgtcacttgtcacattgagttcatgtcccttgagagtttgtataaattcaggtcagagctgcagctacacagctgcccagtgtcatagaaaagcaattcaccaacgactgatctctccattcagaagtgtgcagtcttaaatgtacagcgataagaaactgttattttatgatcttttcattaaaagcttgattgaaaactctggtgtgggacctccatattctgctttggctgttctctctagcaaagtgacacggcttctaagtcttagaagggtggggtctgggatgggcatctgcctgccactgttcagtggtgcttggtgggtcctgggggtgtgcaccgtgccagggaactagcactttggggtcagcatcctcttgggcagtgttggcctgagttagctgaggctgtctgggaagcagcgatgtgtgtgcagttacagcagcatggacctggtgactggggagaggaggatg

SEQ ID NO: 12992 - DNA, 2359 bp, Homo sapiens
tttcttaatcaaaagtggtctaggtaacctgtaaagaaaggattaaaaatttaagatgttctagttctgctctctttgttttaaaaatcactgcttcaatctacttcaaaagaatggtgtttcttttcttgtccaattttatccaaaatcttcaagttacatttaacccataaggtttaaaaaaaaggaaaaaaaacggttgtggttccctttcttccctacccttgccactcccactttctggcaccgagtttatttttcacttacttacttccccagaccccgggctcgcctccacaaaggagaaaagactgccctggcggtcctggtggcttttcttagcatgtgtggcactgttgcccagtgtgggagttggtttaaattctcctgactccagtttataacatccttttaaaaaatttaaaaacaaacagccacacccctcctccagtccttctcctcagttcttgtgtgaaactccagctgatgttaccacagtaacatcagttaattgggcaagccctgatgtcagtgtgtgtaactgacctctggcctggcctgcacagagaagccctataatcacaggtctgtggtggccccgaaatggggggcctgctagtcaggaggatgctgtgcacactgtgtgtgatgaatctcgccagaaaggctcctgaggtcccaggttggcacttctccctgcagccattgtagaagatctgctggtccttgcaggcaaagctacagccagaatgtccgtttgaaactcctagctcatctgtcaccgagcttcatccgaatgtgccacggagcttgctctccacttcctccgtgcagtggccctgccacagccctccctcggcacactttgaccctttgtaggattggaattagcaggactcggctatttaaagcaccagtctggggtcgcctgggcccctgctgaccccctcctccagagcagccagcccagcccgggaacaagacggacttcctctcccttcggactcacagcctttgcagagtcaagctccacttgaagctcactcagtaatatcctttcaatgtgttttatattgttttgactgcctttttttgtagaaataaaaattgaccttagaatttatcgtcagataaacttgtaaagatttgaatattaatgtcttttcaaggcaaatgggattgtccccgcactagtagagaatccatgtcgctctgacaccccaaggaagccgacgatccaaatgccgtgtgtcaccaaccccgcttctgccactggcggcttcccttcttggctcttgggggggactagatcctgtggagaagatgacttaaactttgctttttgttttaattttaattctataacttgagatctttccggggcctacaggcgtgtaagacagcttggtctggtctgtgcagaagtggggagtgatgggcaggttcggcagcctaacattgttcaggcgcatggcccctgcggtgtgtacacgaactcggcttcttttgtcctaggtacgccaagggcaggtttctggagactcccttgtgcccgggatggcaagggcaccgggctggcgtttccacatctgtcttcattagcagaaaagtgatgatggattttatttcactcacactccagtttgtaataaaatgccaaattctgtcagctatccaaacaagccaccatttgttcttgttgcttctctggatccagaaatgttgccattcttggaaactgtcccattgcttcgtatttctgccaacgtagctctgcctgcctgtcaacccctcactgcactctgctcatcacgggaggatacctgtgtgccggcagcccctcagggactctcagccctggcactggcaccccagggttggccccgtcagcagaggcttggctttcgagccagtgggtgtctctcctttgggcctgggcggcttgctcctgccagccatgccttcagggtaggctctgagcaagctggcgaacagccctggctgctccaaaaccaaaaagctgggtcctctggaggaggggcgagctgtggagcagccacccactgctgccccaagctcactcaggaattcacacccgcctggtttcttgaagtgtgctgggtccttccctctgctccctactccccaccacggcagagaataggctttctaagatgctgcgatcccgttctgctgcccgtaataaaaatgctctcagacactggttagtcgtgtgggtttcttccttcctgggagcgggcagtgccaggggcctatgctcttggagatgggagggctggctggggcccaggtcctggggcttctgatctctctccccattcccagcctctccaaaaga

SEQ ID NO: 12993 - DNA, 1217 bp, Homo sapiens
agtggtctctgcacagacagatgcaatggtgtgtgcatgtgtctgaagagcccatgctggggagggagtgctagaggttgcgggggcgggtcatggtgtcaccttttgcagctgtgggagctgaggctccaggaagggtagggaagaacccgaggctcggtgtactaggtgcgaatgccgccttctgtggtgaccactgtcttctcatcctttgcacctataggaggtgagtgcctttggggaagacggcgagggcgacgacctggacctatggacagtgcgctgctctggacagcactgggagcgtgaggctgctgtgcgcttccagcatgtgggcacctctgtgttcctgtcagtcacgggtgagcagtatggaagccccatccgtgggcagcatgaggtccacggcatgcccagtgccaacacgcacaatacgtggaaggccatggaaggcatcttcatcaagcctagtgtggagccctctgcaggtcacgatgaactctgagtgtgtggatggatgggtggatggagggtggcaggtggggcgtctgcagggccactcttggcagagactttgggtttgtaggggtcctcaagtgcctttgtgattaaagaatgttggtctatgattgcgtttcactgtgagcctgaggatgaccaggaggtgccagcccaggcccagttgatcatttcttcctcagtgcaaaacctgtctccagcccagcctgactgctgaatctgtccaaaccctttattatttttttttcggggggcgggggggaggtttgcttttttttttttttttgagacgaactctcgctcttgtcccccaggctggagtgcaatggcgtaatctcagctcactgccatctccgtctcccgggttcaagtgattctcctgcctcagcctcccgaggagctgggattataggcacctgctaccacacccggttaatttttatatatatattttaagtagagatggggtttcaccatgttggccaggctggtctcgaacccctgacctcaggtgatctgcctacctcagcctcccaaagtgctgggattaaaggtgtgagccaccatgcccggcctgggttttgctttttttttttttttttttttttgaggcggagtcttgctctgtcacccaggctggagtgcaatggcactatctcggctcactgcaagctccgcctcctgggttcacgccattc

SEQ ID NO: 12994 - DNA, 1111 bp, Homo sapiens
aaaagtaaactacccaaccacatgccacgtaatatttcagccattcagaggaaactgttttctctttatttgcttatatgttaatatggtttttaaattggtaacttttatatagtatggtaacagtatgttaatacacacatacatacgcacacatgctttgggtccttccataatacttttatatttgtaaatcaatgttttggagcaatcccaagtttaagggaaatatttttgtaaatgtaatggttttgaaaatctgagcaatccttttgcttatacatttttaaagcatttgtgctttaaaattgttatgctggtgtttgaaacatgatactcctgtggtgcagatgagaagctataacagtgaatatgtggtttctcttacgtcatccaccttgacatgatgggtcagaaacaaatggaaatccagagcaagtcctccagggttgcaccaggtttacctaaagcttgttgccttttcttgtgctgtttatgcgtgtagagcactcaagaaagttctgaaactgctttgtatctgctttgtactgttggtgccttcttggtattgtaccccaaaattctgcatagattatttagtataatggtaagttaaaaaatgttaaaggaagattttattaagaatctgaatgtttattcattatattgttacaatttaacattaacatttatttgtggtatttgtgatttggttaatctgtataaaaattgtaagtagaaaggtttatatttcatcttaattcttttgatgttgtaaacgtactttttaaaagatggattatttgaatgtttatggcacctgacttgtaaaaaaaaaaaactacaaaaaaatccttagaatcattaaattgtgtccctgtattaccaaaataacacagcaccgtgcatgtatagtttaattgcagtttcatctgtgaaaacgtgaaattgtctagtccttcgttatgttccccagatgtcttccagatttgctctgcatgtggtaacttgtgttagggctgtgagctgttcctcgagttgaatggggatgtcagtgctcctagggttctccaggtggttcttcagaccttcacctgtgggggggggggta

SEQ ID NO: 12995 - DNA, 2353 bp, Homo sapiens
agcgtaggctgggggagtggcgtctttcctatgagtgttgtggaaaccacctcagaactgtctgagaggaggtgcctgtggagtgagggctgaccctggccccttcagaactgccatgtgttatccttgcccaaatgtgtccaaagaaatggccattttgcaggagtcttttttcccttttctgttttcataatgctattgctgctgctgctgttttaatgtggttcactgttgtcacttttgtgttttgtgatgctgatgatgatgctgttttcacatggctcactcttaactcagtggtctgtttgtgtttctataggacaagggctcagaggactggacgtgctcagacatcggtgttcttcttcccagttcttgacccctggtcctgtctccagcccgtcttggcttatccactttgactcctttgagccgtttggaggggcggtttctggtagttgtggcttttatgctttcaaagaatttcttcagtccagagaattcctcctggcagccctgtgtgtgtcacccattggtgacctgcggcagtatgtacttcagtgcacctactgcttactgttgctttagtcactaattgctttctggtttgaaagatgcagtggttcctccctctcctgaatccttttctacatgatgccctgctgaccatgcagccgcaccagagagagattcttccccaattggctctagtcactggcatctcactttatgatagggaaggctactacctagggcactttaagtcagtgacagccccttatttgcacttcaccttttgaccataactgtttccccagagcaggagcttgtggaaataccttggctgatgttgcagcctgcagcaagtgcttccgtctccggaatccttggggagcacttgtccacgtcttttctcatatcatggtagtcactaacatatataaggtatgtgctattggcccagcttttagaaaatgcagtcatttttctaaataaaaaggaagtactgcacccagcagtgtcactctgtagttactgtggtcacttgtaccatatagaggtgtaacacttgtcaagaagcgttatgtgcagtacttaatgtttgtaagacttacaaaaaaagatttaaagtggcagcttcactcgacatttggtgagagaagtacaaaggttgcagtgctgagctgtgggcggtttctggggatgtcccagggtggaactccacatgctggtgcatatacgcccttgagctacttcaaatgtgggtgtttcagtaaccacgttccatgcctgaggatttagcagagaggaacactgcgtctttaaatgagaaagtatacaattctttttccttctacagcatgtcagcatctcaagttcatttttcaacctacagtataacaatttgtaataaagcctccaggagctcatgacgtgaagcactgttctgtcctcaagtactcaaatatttctgatactgctgagtcagactgtcagaaaaagctagcactaactcgtgtttggagctctatccatattttactgatctctttaagtatttgttcctgccactgtgtactgtggagttgactcggtgttctgtcccagtgcggtgcctcctcttgacttccccactgctctctgtggtgagaaatttgccttgttcaataattactgtaccctcgcatgactgttacagctttctgtgcagagatgactgtccaagtgccacatgcctacgattgaaatgaaaactctattgttacctctgagttgtgttccacggaaaatgctatccagcagatcatttaggaaaaataattctatttttagcttttcatttctcagctgtccttttttcttgtttgatttttgacagcaatggagaatgggttatataaagactgcctgctaatatgaacagaaatgcatttgtaattcatgaaaataaatgtacatcttctatcttcacattcatgttaagattcagtgttgctttcctctggatcagcgtgtctgaatggacagtcaggttcaggttgtgctgaacacagaaatgctcacaggcctcactttgccgcccaggcactggcccagcacttggatttacataagatgagttagaaaggtacttctgtagggtcctttttacctctgctcggcagagaatcgatgctgtcatgttcctttattcacaatcttaggtctcaaatattctgtcaaaccctaacaaagaagccccgacatctcaggttggattccctggttctctctaaagagggcctgcccttgtgccccagaggtgctgctgggcacagccaagagttgggaagggccgccccacagtacgcag

SEQ ID NO: 12996 - DNA, 1200 bp, Homo sapiens
cagctccaatttatgacaattctaaatctgtctctcaaattgtttcaaaaaaggacggatgtatactttggaaattctaatttaataagttaatcaactttgtgggtttgttgttgttttgagacagagtctcgctctgtcacccaggctggagtgcagtggcacgatcttggctcactgcaacctctgcctcctgggttcaagcaattctcctgcctcagcctcccacgtagctgggattacgggcacccactaccatgcccggctaatttttttgtatttttagtagagatggggtttcaccatgttggccaggctagtctcaaactcctggcctcaagtgatccgcccgcctcggcctcccaaagtgctgggattacaggcattagccactgtgcccagcccaagttaatcaactatgaagagaaaaataaaatcacataatcttggttgttcagcctctcataagaaagccaaattgttttttgcttttccatgttgtttacttgtatttctgaattgtagagtcaaaggagaagttcagagtcccatcagcaatgcacctgtcatacaggaagatctcatcatgtcctgtaacaccagataccattttcagtcttttctctctttctcctgcagggctacaccaagtccattgatatttggtctgtaggctgcattctggcagaaatgctttctaacaggcccatctttccagggaagcattatcttgaccagctgaaccacattttgggtaaggttcccgagcccttcaggagctagatttactcaagtttgtacagcttacatcaaagtcacttcattaaattaagaagagttctaatatactctttaacctgtggtaggtgtgaatttttaaccttctctgatttaaaatgttaaggacttttgtgtaaaaacataagaaaggtaaacatcaggagtggtgataagcaacggctcatatcaattatcagggttcattccgactcagagttgatggtgtgtagtcatttaccttggtcctgataactaatagctaatttttttatctgataggtattcttggatccccatcacaagaagacctgaattgtataataaatttaaaagctaggaactatttgctttctcttccacacaaaaataaggtgccatggaacaggctgttcccaaatgctgactccaaaggtaaatgtt

SEQ ID NO: 12997 - DNA, 1092 bp, Homo sapiens
gcggtggctggcagcacgcctgccttgctctgccccatgccctgaacaggcatgagagctccacgtcccctagtgcaccctgagagggggctcacaagtgaccgatcctgggtgcctcagggagctcactgagggcgtgcaaagttgaaagtggcaaggctgggggagggtgtcgggtagagggaagagggcagggggctaggggaggactcagaggccatctgcagggccaagccacaggaagggctgagctggaggtgggcagggctgctccaggcaggtcagagcagtgcagggggaggagaggagaaagggaggaagctgggctgtgtggtccccatgaaggcattcagagtccacctgcagacagcgagagccccaggaaggtttgcacagctgtgccccaagcaccttggcctcctctcagctcgccgaggaggcacgctagagccgccttcccggtgggagccctctgtcccacagggagcggggagccagctttgctggggccctacctgcatgcccagccttacccctcattctcacagcacagatgaggttgagaccatgcagtcaatgcattgcttaaggtctcttatttacaaaaaaaaaccttaaacatagtcgctgtcattcagacattcagagaatggttggccacaaacaatgaccaagtattgcttggcttaacttgaaggcctgctgtctccttctgggggtcagggacgcagctccaccctcaccactagcccaccctgcccgtgggcataaccttgacgaagagagagaatgattggcatctgcttttctcttttctttgctaataattctgttcctggctgccgagagtgaagtttcaccatgtggaggtttggctcctatcacctggtggtctgattcataccctagcctgaggctccactggaagatctcgcagcctcagtgtatgggaaaccctttccccaggcttgtcccagcactgccgctccccacccctgagccaggaccccagaggatggccatgccccgtgcctggcagaggtctggtgccagcactgggagctgctccgcccttgccttggggccgaggga

SEQ ID NO: 12998 - DNA, 3239 bp, Homo sapiens
ggtggtctcgaactcctgaccttaggggagcctcctgcctcagcctccccaagtgctgggttgtgtgagtcactgcccctggcacctatttattgttttggtatttcatgttactcctaagcttgaaagctcttttttctatatacagaattcatagaatttttgaaatacttagttttctttacagctttttccatgcattcagcatttcatggttaactctagtcagactggaatggctttgttatgccctggcccacttgctgccgaattcccagaagtgcctctgctgtgctggcataaaataacctgaaaagattctgaaaagccaggatgtggaattgaaagagaagctgctgcgtgagcagagaccaagaaggcggaggttagttgagggagagcagtggttctttgttctagttgaaggataggcacacattcattctagtcttggggccaggtcaaaaggaacactgcttcagagtatctttacctacctgaaaacatccaaggaagccaaaccattcaaagtaaaatggttttgtttggtgaagggcccctgcagacatcaaacagccgtcatgtatcattggtttgaggtgaaatagcaataaaattaatagaatggtgcctggtactagctgacttcctgttctgtgatctaaaggtgaatttgattcattccctctcctctcccttctggctagccgttagtggagaatgaactggccatattctcagccacagctgtaaagcaagtttcccaaggggaagaagccctaatatctataatttgaactgtactggacccatagttttaactgaaaagggccaaacaagtggtgtctgtccagttcctggactgggctaaatttagttttcccactgttaagctggaatgaggactgtcccaacaacagtaggtacagtggacaaaaatagcccagggtgactgactgaatttaaacccataatggctttatatttttctgtgcatatatatcttaccctaattgaacatgtgaagcttgcaactttatgtcttgctttggacatgaatgtattacagcttgcagctattctgttaaatgtatagtttcccagttttttgacactaatgctgtttgggtcttacctgacacacaccagtgtgcaagaaatgtctctctaattcaataagttttaagacttagagttaatgtccttcatctgatctatcctatctaatctgtactatgggtgaatctttttcccttgctctccccaggggctgtttcacagtattctggagtaccttttgagtattggttcctgaacatcagcagtcttggctgcctctgtggactcccggagttgtctccctgcttgtgttctggtgccatcctttgttcctccacccctgaccaaggtgcccagcagcctgtcttcaccagtcaaggaatccgccatcttggctgtagacataggtctggagaaatctctccctttttccttgatttctttttaaaggtaccttatctctccccactcctttcttccctcctcaatctagttaaatttcctaagctttcacaaaaatccgggaagagataattaagagcttagcatccctcttagagtagaaggcagtacagataacaaagaagttgtgagtatattatctacattttagaaaattttctgactctagatccatagattctgttgtatttatttgccggacactcatttgattgatttgcaccttgaacactatactaggtcttttcagttacgttgcttgggttaagacactttgctaaaattacagcctgaatcctttctttagttgaagaaagggtatgtgtgtgcaagtgggtgtgtgtgtgccagtttttcttgtctcaggtagatactcccactgtgtataaatagatctacagacttttcatacttacctcccgtattctgtttctgtggtaaaaatatgaagtgttttagttgtatgttgagtgattggttggtattatcaacactgttgtttgcagtttcattaaagcatgctcttaaggagtacatatggtcattaattgccaactgtagattccagtgatctggcccctgcctacctccttcctctctttttcattctctgtcatgcttctccactgttttccccaatgacgcactattttgacacactggccttgctattccttaagcaaatcacattcttcccaatccaaagactttgcacatgctgttgtctttcttagaatgcccttcccctaggcctgcatggcttgctacctcacttaattgtttgacacttcctttggttcattgagcttcaaggctcttaaaatgccactgacaatgagatctccctttaaaaaaaaaaaaaaacttctacttttcctcttaaaggcactttactctctccccactcttttcttcctcttcaaagtatttaaatttcctaggttttcatgaaaaagctggaaagcgatcagcatcaagggctttgcttctgtcttagaattgagctagcttgagtcaatttctgtgcctgcaaccaaatgaaaattaatatagtgagttctttcaggagctttctctgtttttctattgatacctctatatatttttaaggcaatgtcactttgttttgtttacaaatatattgaatatgtcaagattactattttgttattgccctttgtgaatttccttgtctattttgctcgcttgttctttcaggtgaaatttattattttattaatgttgccaaaaattataagtaaaatatcaattatagtaataaaatgttttgtgaaaaaaatgctgttgctgtattgttgctgtattgtctttccaccataagtaaaatgggacgtttgttttgttttttgagacagagtctcgctctgtgacccaggctggagtatagtggcgcgatcccaggtcactgcaatgtccaccccctgagttcaagtgattcttcctagcagctggtactatgggcgtgtgccaccatgcccagctaatttttgtacttttcgtagagacgaggtttcatcgtgttggccaggctggtcttgaactcctagcctcaagtgatccgcccacgttggtctcccaaagtgccgggattacaggagtgagccaccatgcctggcctatttttagtttttaatttttatttagtaccactgtataatctttgcctttttgccacttgtgttcatttttagccttat

SEQ ID NO: 12999 - DNA, 1120 bp, Homo sapiens
gtgaggaggtttctcaccccacagataacccaagacacaaatgtgcaattaaaagtttattttagaccacagcctgttgtgtgcctctctcgatggcctgtcttcagggagctccctggctgatgaggtggggtcaggatggatgtctcactacagtgtgcaatccatccccttaatcagggccctgggtggggaggaggagccctgttgcaatctgcactgtgggtagcacaggacagattccttgggcagtccagagtgaggtggagaggcattagtcggtgatcccaagggcatctgactctgagggtggaatcccaggatgaacccatggtctcccccttatcagggatacctgccacctctacccttcttgtctctacctctgcatcccattctctgcacccacagcttaggtgcccctggcggcctcaaatcctgtctgaccttgcccctcttgctgatgcaacttctcagcaattccagattctgcaagaggagtcctgctgggttgttgtctgtttgcacctgatcacacaaggcagaggtcatggctaacccccttgggtctgagtccaacttggctagttggcagtagtgtgccaggtccccaagcctgccagaatggaagaacaagcccttcaaacccagtgtgggccgtgccatcacacaccatgctgccgccttcattgagttcatccagcagttgtgcactgagctcctactgtgtgccagcccctatgccacatctgtgaagcctgaggacattccggcccttagtgcgctggcactcccgtggggtggtggggacctgtctcagggtacagtgtgttccatctgggggtatatgtgcgtggagttggtgttgagggtctgcccctcatcatatgtgtctgtcctgcaggaagggatcccactctgggtgtctctgtggatgtccaaatctgctctgtacctggctccctgccccagctagcaactcctgggtggcagggagctcacctttctgggccttgaagtggggctttgctcatggcggcctcgccgagtgcccatacgcttcctccagttgtggcccacagaggagaggcctgacagcctgcgcagttcctctggaagg

SEQ ID NO: 13000 - DNA, 1184 bp, Homo sapiens
cactagtgaaactagtgggctttgggtcacggcagctctgtgcagggtgaaagggtgctcttcagacactctgggggctctgtgggagacactcccatggagacatttgggtgtggacacagcatgtccttgggcaggtggcaaaactgcttcccacgtggcaatggcgccttgtagagagctgccctgggcctgggtgtgtctgtgagcatgtgcgcgatgcttcgtagtctgccctgtttgtttgtgtctgtaggtgctgctgtggttttgtccactgcgggaaagtagtggttcttttaatgcaggagccggagcttctttttgatctgctgctatgacatttccactcacttgcttaaaacagtttcctttttgttccccctcctcccctagcagagcatcagtcgctaacacagtgagtccccagctttgcttccccctccgcaagtccctgggctaagtcttgggagataccttccccataagcgattgatttctccaggagaagccagactgggcccacagacaggtagctcttgacggagattccccggaagagctaggggtcgagctgcctagaatctgtcctgcttcccaggcagcacgtgtggaccggctcggggatagaaattcgtgtttggtgtgaagcagctctttccaactctctgggctcttgttttaaaagaaaagtattcttcatcttccattccatctccccaccttgcatcgtgttgtggattgtggtggtgtcagacctcttcccactggggtgttactctgggagctttcttttcccctgagtgaggaccaagagaatatgttctggagtcgagtgtccccgctggtcgtgctgtattgtagttgctggtgctgccctgagcacttccctctgccccgagccagtgctcctggggcagattagtccaaatcagtcccattggaggctctacccagcaggacttgtaagtaaagcactcagtccagattgcccttttggaagaggccagcattcagcagtagtaagtttgacaccttgcttttcccacctcccgcatgcgaggaccttgatgtgctgcatccacttggctggctgctgtgtgccaccgccaccagcagagtgacccagtgatgtttgtctgttacagatcacggatacacgactctagccaccagtgtgaccc

SEQ ID NO: 13001 - DNA, 1371 bp, Homo sapiens
gagaagaagatccgcgaccaggacaggaacacgaggtacccctggccctgtggtcctgggctctgcccacaggcacctggctttccaggcagaggcagggccattgcctttcccagtctcccatggtctctgagacagagtacctctagtgctgctagaggcaggcaggcttctgggtgataaggccccatccaaacgccagggtatgtttccctgcatggaacaaacataattcctcaggctgagggtctgaccacagcccagatccaggttttggggtccctggagtgatgagcagggcctgagtggcagacaggcgaggctgagagaaggctgggtctgaccctgctgggggcccacatcctgcctctgttcccacccctacacttggctgccctgtagagccttgggaagggcagcgcccaggctgggagctggccccgactcattgccctccccactcctcttccaggcggatgaggcgtcttgccaacacggccccggcctggtaaccagcccatcagcacacggctcccacggagcatctcagaagattgggccgcctctcctccatcttctggcaaggacagaggcgaggggacagcccagcgccatcctgaggatcgggtgggggtggagtgggggcttccaggtggcccttcccggcacacattccatttgttgagccccagtcctgccccccaccccaccctccctacccctccccagtctctggggtcaggaagaaaccttattttaggttgtgttttgtttttgtataggagccccaggcagggctagtaacagtttttaaataaaaggcaacaggtcatgttcaatttcttcaacaggtcatgttcaatttcttcaaagttttaacataaaaataatgagagccaggagtggggccggggcctggggggacgaaggtggtatgtgaacaaggttggcacacaggcctcaccctcctctgcctcagattcccaagtgggcaggtgggggtgaatggggctccgggtagcacctcagctcctctcagctcccctcagcctgttctccttccagacccagagagctgagaagagtagctgtgaggctcagggcaagaggctctctgcctttcaggaacagccctaaccctgctccccttgcttggcctcaggaaggtgccgcgagctctcctgccgtccctgggccgccctggctctgctgtgtccagatggtcaggctactgccagctggggccttgctgctctgaagtcccctgcggagggcccagtcctgtgtgggcactgctgggctgtcgccagcctgggtgcaggagggctgttctagctccagtggcacccatagccaggtcagctggggccc

SEQ ID NO: 13002 - DNA, 1078 bp, Homo sapiens
actagcagaaaccagccgagcctctttagacctaacagagggggaatcagaattaatctcgggctttaacgtcgaatatgctgcaggcccatttgccctgttctttatagcagactatataaatatcattataataaatgccctgaaggccgcaagaggttcgtgggtgcagtgcacaggagaccatatctggggacagcagctgcagcagaccccaagctgggccatccctgccacttgccaggtggtgcttggcgaaggcaagcagctcccacccgcccggggaatacagcgcgacccccggcggcatgctcttcagcaccaccccaggaggtaccaggatcatctaccactggaaattcctgatggagtgttgaaacttacccgtgaccaaaacactcccaagggatctgcccaccattcccggggtcaccagccctgccagtgatgatccccccaacggaagccagccagagccacctgagcaatagtccagaagataagcagggcgggcagtgaagaagcacagttttgagatggacatttaaagcaccagccatcgcatggagcactgccaagggacccctcaggcccttcctggaggagtcccaccagccaggccttatgaaagtgatcatactaggcaggcattggtgtggggccagtcaccccagccctctctccctcactcgcggcacctgccccctcctctttgtgaacaccagcaggtacctccttgtgcctccgctgatgcaggagcagctgccccaaggggagtaacccctgccagcacaccctgcagctgagggccaggaagtggacaagaatgaaccctttcttccaaatgatcagctcttccagcccctgctgggggccccacgaccccttccttaggttgacgtgcctgggaaagctcacctccccctcttccctaagagaggaaataaaagccaccttcgccctagggcaaaaaataaataaataataaatcccgtaatcactattgtcttcctaggagcactgcataacatatatataccagaactctataccacaaatttcgtcacccaaactctca

SEQ ID NO: 13003 - DNA, 1259 bp, Homo sapiens
tggggctcagtgggctgagctgatcatggttcttgggattttctccctaatctcccaccaatgatggcaaatgagatttggcagagtgggagttttccaggaaataaatagggtgagaagtcagagttccctttctgccattggcacttgtttgtagagctttgtttgtagaggttcccccaggaagggagcagggaagtcagggagtgggtaaggagactgagctcaagtttccacatactttttccctttgctttgttctttcctctacttaggctcataacctttgggactgaactcagtgttgatcttatggaagccattggcccaggaagctcaggtcctgaaactgggttcccaagccatcttgttggagtgttagggtggcaggagagagatggaaatccaccaggaatgcagatgtcccgacagggagggagggaaggtagggggaggtgtttcatagttgccgagggtgaaaactaccttgcagagctgccttgtgcctcctgggttttttccacctctggagagacagcttccaaccctgaaatgtgtcacgaggacacagtcccctgattgctacttttctgtctggatttattgtgtctggaggatgggctgcaggacacatgttggcagctgttcgagctgctgtgtgcttcagcttttgcccagaaactcctcagaggtggtggtgtaggagaacaaatgctttccccatgatgtcagttctcaggcaaggggaaaggctttggagccagagcgttctagctgtatgacctggaagcagtaacctgacattcctgttgtggttccttctccaaggcagtattgtgagagttcattgggaacacctgccatcagccatttcctgagcccctctcatgggcaccccatatgcaaggtgaatgaggtgcctattctgctctgaggatggcaaggtagtgagatggtgtctagtagagcttctgaaacacagcaggccctcagtgactgtccctccttttcctgtctgaggtattgtgacctccacaccacaaggacagggacattggcattgtgccctgtatggggaaggggtgggggcttagcctcttcccaagggtctgcatggtaccagatgccagcccagatgggccacttcacagctaccctttctttcttggcaggtggctgttacaggtgccagtggcagaacagggtgggcaggggggctagtgacttggtccaggtcacacagctacaaagcaattcaa

SEQ ID NO: 13004 - DNA, 1691 bp, Homo sapiens
acatgaattcagtgagtcatggatgcacttggtgattagtaagagccatagtgactccatgaaactgagctccccaagggctgcaccacccagggcggggtcccaagccctctccctggcaggctgaccaaggcctatgagaacaccatgtgtgtgcatcgtcccttttcagccttgaggcaggtgcagcagtacctccttctcacagctgagcacctggaggaggccagggaggttaagcagccagcctacgaggtggggctgttgggagttgagccaggactgcctccaaagcttatgcctggtagggctggctgtggcttggtagagggcatcaacttgaggctgttggggaggagtccttgccagcccccaaccccaggcctcgtgcattaagggccaggaagacttggctctgcagcaaacatgcttggtggccctgggcaggtcccctcccataaaatgcccagagctgcccggagttcacgtcatggagtcaaaggggagctgggcaatgctgccccagctcagcccaggcctgttattcaggagcagtgccacctccagagtcccgtcagccccttgctacctggaagagtgtggtggggtagccagaggtgcagaggagggaaggcctttctcaggcaggtctctgggcccagtgtccttctctgataactgaaacacagccctggccagctggcagatgtccggagccacacagatgtcaggtgggagaggcccaggttgggctcaccagcccccagaggtgactcattgcagtggagacaccagcgacacagcttcttacctttggtttctttgtaggggtcagaacgcccagggcccaaggtctgtggcctccccggagccaggatgaccaccgatgtctcacacaaggccagtcctgaggatggccaggagggcctcccccagccgaagaagccccctctggctgatggctcagggccagggcccgagccaggaggcaaagtgggcctcctcaaccaccggcctgtggccatggatgcaggagacagtgcagaccaaagcggggagcggaaggataaagagagcccacgggcagggcccactgagcccatggacacgagtgaggccactgtttgccactcagacttggagcggacaccacccctgctgccaggtcgccccgcaagggaccggggccccgagagccggcccactgagctgtccctggaggagctgagcatcagtgcccggcagcagcccaccccgctcaccccagcccagccagcccccgcccccgcccccgccaccaccacagggaccagggcagggggccacccggaggagccgctctcccggctcagccgcaagaggaagctcctggaggacacagagtcaggcaagacacttctgttggatgcctaccgtgtgtggcagcagggccagaagggtgtggcctatgacctgggccgtgtggagaggatcatgtcggagacctacatgctcatcaagcaggtgggtggcaggcagaggcctgggggcactagtctgctggcagcatccccactcttgcctttctatcctcaaggagggtctcccaggcctgcccttggggcgggttttaggtgttgttcccacaccatccctgctgttcactttctgcaatgagctttaaaaagtcaatattcaacctggaaggaagt

SEQ ID NO: 13005 - DNA, 1101 bp, Homo sapiens
gagcaccaggccaagactcctgagaacaggcagcccagtcctgcgactcccgcatccccaggaccagacacctgggacctggatacttgatacctgggcatttaaccccctactctgtcatctcagaccccaggcaggaggcccagtgttccaacacccaagccccgtgctagcagcgctccgtgctcttccccaaatactcacggctctaattccccaaacctgaaacttcataccctgggattctaatacctatgtcctgagccctgacactcccacacctgagcctcagattccaatagctcactccctagagcctgacgccggggcccctgacccctgagcctcagattccaatacctcactccccagagcctgatgccggggcccctgacccctgatctacggaggcctgctcccggaccgtgcgggcaccagtgcagtgctgccttggttcctggacccctgggcccatcctgggaccccagatggggtaaggagaggccccagaaccccaaagcagacagcgagacccccagcggcagaggcctccctcggcactccaggcttataatttcgaactcttctggaaggtcactcaggaacaccctccctgcctgtgcaaagagaaaacaagcgccttgtttccttccctggtctcctggtgttcatgctgcgccctggttctggagagttccatgaccgcctcccggggtcaccaccaacagtatccagagtgaggcaggtctgagccctgcctgcttcctccacgaggttgccggggatgctccctccccaggctctctctccatgtatgcagtgggatggagaactgtggccgcctcgtggggtggggaggccgccaacacagcacagggctcacttgggtcactcaggagatggagaaggacaacccctccctcaacagaggtgccaccccctcaccacgccctggcgtgctctggcaagcactgccctgcagcctcggctccttggctgggtgcagtcgctggcaggatcagttccaagtcctcaggagaccagcgcccaggctccttagcccaggaatgtccagaatctgggcacagagcccaggcctca

SEQ ID NO: 13006 - DNA, 1219 bp, Homo sapiens
aagagcggcaggggcagcttggcagctcatcaggtccactagagggtgtcccagacaagagcagcccccgaactgaggtcaagaaacaggttggattctcagagctctgattggttggacaggggttccagatggacaggggttctgggtagaggagcagtctatgcaaaggctcagagaaagagaagtgcagtcatgtctgcggaatgacaggggtgggggccagccaaggcctcccctgccaggccaaggcatttagatttcatcctaagagcaaagtgtggcctgcctcgggctcccccacccccaccagtctccctccaggatgggcccttggtctgcccccccacctcccctttccagcaggagaaagggtgccctgtctgtggccccagtcccagacatcagatgttcccagtgccaggggcaggccaggctgggaagccccaccacctgccaggggcttttcctggggcccgaaagagatagagacagggcctgtgcaaaggcagaaggcctggagccggtgcagactctctagagacatcaaaggcagggaccgctgcctcagggagatggtctcccaaatagcagcccagggcttgcaggacgggcagccatgggagcttgcgggtggcttacagtagggttgaaatgatggagtatcagagtcacccaatggccggtaccatcgtggtggtaccagtcagagtggggcagatggtaatccagggctttggagacacaggtgatgagagagctgggggggtcaaacaggagccgatgaggtaccagcaggatcctaagacccaccttgggcagaagggcaaagggaggaaggaatgtgctatgggagccaggcccagatcccatggaagcgggcgtcacgcaggcctgtgggccaaggggagtcacagaggtgacagcccagctgcaggtcccctgctggctagagtagggaagcccggcttctctgtgccccctgccctccagcctcccactaggtctcctgttggctgagcacagtgggtgcggctgatctgggggccagggagggctctgactcggtacagtacagtacaggcacagctggggagcaagggaccccttcttctgccaagctgcttccttctgcaagccccagggtggccgagtgcctgctgtgggccagacctctgctaggcccatcaggacacccctgtcctcagggtccaatgct

SEQ ID NO: 13007 - DNA, 1712 bp, Homo sapiens
atttttgttttgttacgagcaatgctggaaaaggtcgctcctgttctgttagtaccaaagttacattgtttcaataagcatagaaatctaaacaacatctgtacattagcatggtgagagcaaggaataaagcaggaaataggagaaaagtaaacaactttagggagcccaggcagtgtcatttaaactcactgagtcactaagacataattctcctaggccagagttaaagaaagtgccttaactcttcttgtgagggcagccactgccctccgtggccaaggcaggacctccaagactcagtggttgagttgtctcctaccaccatgcccgccctccccaggtactgggtccatgccccctgtgcccaccctccccaggtgctgggtccatgctgtttgaaccaaagccttatttaaaggtggtcactggagatgctctcaggccagaactcaacagctatttttgggaatagggatctcccgtgtgcctaacgcagtagctattggtttgaacaatgtccagacaagacctgtacctttgagaatataactgtgtttggcacctgcatagcaccatgaggaagaccagccaccagtggaagcggggtcactgccccacagactggatgcaatgaggggctcacaggaggcccagccagcccgattgtgggctgaggggtctgcattcaagcacgatgttctagaataggagtttaacgtgtctacgtaacctagaatgtggttattaggaaaggggctgtgcatgtgggtgcagctggcggcacacctggtcaccagatggccagaagctgcccatcagccctgcccagatgtcagcctgggagctcaggctgctgccgctggctggatgccctttggtgaaatgcctgttttcagctaagaaaggagaggccaggcaagcaaagtcatgccacaaagcatatcagagacccccgcagactcctggccccgtcccgccccctgtctgagttgtgtttttgttgctgttcctctgttgatggccagctctgctgttggcatgagccactgatgttcatgtgagaattactgtttttaagtgtctctccacttaggtgtcctcagttcccacttttgctctcatttgccttcacagaggccactccacctgtccggatccagctgtctggtcatggtttggtttatttattttgtccttcaggggctgttttgccctaagaatgagggggcttcccctggtctgcagttcccaactttatcccttgctggccatgcgagcccagccctggtgcctcatgggatgggggggtaggggtccccaggatcttctggaggaaggtggccatggatggatgggctgtatctgtgttttccctctgggagtctcatgggtccagcatcaggcctgaggtcagcaacagggaaagagggtgggcacggggagggcttggccccgcctatctagaggcttgcctcgggcccctccttggggaaggtttgcgtgcagagctgcaagggagagggttccagaagcattgccttttgcctcgtctaataggatccttaggacactgtgggctttaggaatgactatagatgctcacacgtgtttaaagtgacatttggagatgctctcagtcctgtggcatctggcacgaagtctccaagaagccactttgcctcttctcccttcaagcacaagctttactg

SEQ ID NO: 13008 - DNA, 1195 bp, Homo sapiens
tcagagaaagggacttggccagtggtttaagtacctgccccttcacctctcagacgaggcagctgacgaggcagctggcccagtcttgggagtctgctcaggacagtggtggagctgggtcttgaaccccagtctgcacctaaaaaactaaaggaaatggatttttttttttttttttgagacggagactcactctgttgcccagactggagtgcagtggcacgatcttggcttactacaacctccgcctcctgggttcaagcgatcctcctgcctcagccccccactagctgggactacaggcacatgccaccatgcccggctaatttttttgtatttttagtagagaccaggcttcgccatgttggccaggctggtctcgaacccctgagctcaggtgatccacctgcctcggcctcccaaagtgggaaatgggtcattttcaaaggggcaacagtgataccatccctgcactcctgggtcctgctcttccaatgcccaaggcatggcatggtggcagctgtgcccccgcccattgctttggagcacagatgactctgggggcagaggtgggctctgtttaggagggcagtgagaccacccagccaaattgcttctcaaccctagacaaagcctttggccaagagggaggtgctgttagttgggcagcccttctgggtttcagagaccggtgttggctctagactggtctcatctccattgccttaatgccaggtggcccaggagtacccatgcacagcagctgtggggtgtgggcatcttcaggtggtgttctggtaaaattgttagaatagctgtatgaaggaaaccagtgggaggaaatgaagttttcaggatggtgggatgtgatttagacagtgcacatgctgttagggctgtcactagggagtggccttcatggagggtggtaacagcacctcagtccagccaaaatgtttagaaacactcagtctctggtcccagaggatggcttctcagggcatgccacaagttaaaggtcaccttcctgaaagatgaatgagaaagctgcccattctcaagactcatctgcctagggagggtcacagaggcaggatgtaagacacactgtgttgcattcttgcacaagtcatgaaaatggagccagagagcctggacatcagggacttttgcccacagcacatgacaccgacag

SEQ ID NO: 13009 - DNA, 1164 bp, Homo sapiens
ctgttgctcaagctggagtggagtggcacgatcatagctcactaacacctgggctcaagtgattctcccacctcagcctcccaagtagctgggactacaggtgtatgctaccatgaccagctaatttttaaatatttttgtagagacaagggtcttaccatgttgcccaggctggtctcgaacttctgggctcaagcaattgtccctcctcagcctcccaaagtgctcggattacagacatgagccactgcacctggcctgaaacacattcctagtcttttgatcctgacttcttatctgggctgctgtctctctttccttcaggtggaaaggaccccttggtaccatctcaagcagtaggaaaggacctgctcttacatatattgatggtcctcatgcaaaactctcaattcttaattagtcatgtctcagctcaaggatatcagacaggaatgaaacacacttgaaaatgagattgacctggagattttttttccctaatctctcataccttaattggaaaaataatcaattaattctatgttaattaggatatacaaagttcaccctccttgaaagtgactagggcaagccctgaagatcttcctcacctccttttatttttctataaccttgtctcctccagcaccacagggaagacaatcacagtgggtcaagagcgaccctctttcacgtgggctctgccatgacctctgagacctgcttatgatcagtgcaatgaagttagaagtaactgatgattgggagcctttgcagatagctgggcaaatgggtgatttacttatccccattctaaatggagtgagctctctttgaggctaagcaaggaggcgttgtatgctagtttctagactttgcctggagacccctttggaaatctgtcttctttttaaactcacttaatatgccttaatcatctgtgtgtaatggagtcatccgctcctcaatctaaccctcctcccctggggctttggctgtcctcaatgagagtttcatgcagaatggaaaatcctctatatgtacaatctctctccccctcatttctcttcctcctcacctccaccacccctttgcacatcagcattttaacagctgatcttttgagaagcctgtatctttttcctcttcagtagatacccttct

SEQ ID NO: 13010 - DNA, 1234 bp, Homo sapiens
atcacacgggctacaaattatgctgttttctaaagaatttgaacttttttttttttcttttcttgagacacggtcttgctctgttggccaggctggaatgcagtggcacaatcatagctcactccagcctccaactcctgggctcaagcaatcctctcatctccacctccagagtagcctagatgacaggcgcacatcaccacgcccagctgatcttttaaatctgttttgtagaaacaggatctcactatattgcccaagctggtcttaaacttggtctcaagtgattctactgcctcagcctcccaaagtgctgggattacaggcctgagccaccatgcccagctgaatttgagctttttaataatctcattccacatagccttatagatcctgtaaatagggggggtcacaaaagtaatatattgtgttatggaagataattttgtactgtgctgtttcctaaatcataccaatatcctaaagtcatgcacttcccagatgatcgtgatcctccaaatgctttgtaagatggggcagggcgtggaaatatatatatatacacacacacacagagacacacacacacacaagtatagtatatattttcctaacctttcttctgggtccttcctcagatctttgagtcacgatagaaaaggagctcgagttctttgtgtaggaaagttaagcttcctgcctgcggtgttcttgcaattgccttaggaattcacaagctctaggagttctgaacggaaggcagacgagaggcactttatccagtcccagaaagaatctctaaccgtgtgactgagaagtcatctagaaaaacttatatttttaatgtaaaaacaaatggggcttaccagacctcacagagtattggacgtctacaagtgcttttatattttgtaactgtaaagaagtttcatatgcacagaagagcagttggaaatctggtcgactgcaataaaacaagatgacctttgcatgtacaaagatgttgcattcagactatgaaaatagcaaataaagctttggtgcaagttgcattggagaagtcggtgcgtccatgtgtgaatgaatagagtctcccatgcatgcaggccctgactggggctggctgagtcagtctgtcctgtgctgagctgtgggccagccagcgagagggcagagctggggtcctgggagagggtgtccatgcagaatgggaggccatggaaacaaggcagga

SEQ ID NO: 13011 - DNA, 1210 bp, Homo sapiens
aagacacttggctttgaatccatgtcacttccccacattcttcctccgtctcagctttcttttctgtaggcagctcttttgttcgattactaacccgtctaacccctggggtgcctcaactgcaccccgatcatcccttaacaaactaacggacctgcgtgcgttcttccttttctcttagcgactcctgtgtgtgtctgctgaggtgccctgtccgctggtgctgtgctctgacttactaacccagcccctactaaccctgttttctcttcttactaaccccagccctgccgagctctgggctccccccgggggctggtccccctccttttggcaagcagatgacctggggctactggccctgtagacagatgtcccactttgctgccccatattggctgtaagatcagagtccactgggccaggtctaaggcaggggatggccctattaacaagactcagaggaggaagaggtggtcctgtggatgtgggaggctggactctgagtatgacatctctcctatgtgcagaagtctggttgccactgggagtaggtgggaccagggaaatctctgggacgtgagtgtggaggcctgttggtctagactctagactgtggagctctgagcttttgtgtcctctggaaggaagctggggaagaatcctctccattgttaagtgacggggatagaagctgtcctgcacaggaagtcacgaggggggcgtatcccacgaggaaggcaggagggggcgtgcccctcaccggaaattagcagaggggcgtgtcccacaccggaagtcagaaagcggagcctttcttacaccggaagtcaatgaagcgggtctttcctacgctaaaaaccactgagtggagtatttagtacacaggaagtcggccagagaaacatttctcatatttgaaggccggaaagagggacatttctgacaccggaagtcagtgagaggactctttcccacacaggaagtcagctagagagccgtctcccctctctggagccgagagaggccggtttcccccaccgtaagtagacgtggggccgtgaccggaagtccttgggaaagatccgtcccattcccggaagctagagggcgttagttgtcgggttgaaaaggggtgtggggaggggaagcagctttaccccgggctcggagtttgcaggagagagaagtggggagcaagaagtgaacc

SEQ ID NO: 13012 - DNA, 2219 bp, Homo sapiens
atactgaagggattagtacaatttctccaaagtactgtacctatcttcagcaagaatgcaaaagaaaatattttcaatatatatacctggaacagattttaataattatcagagtaataccattaatggacaaattgactgcaatgtaatactagctggtatgtttcataaatgtcaagctgtggaccaacatatatagccttttattatttttctcttcttttaagtcagtctgttataaatttttttttagtcccataagcagtagactcccacagaaaatttcttcaaaattttttggtgttccaatgaatctgggatgtaaactctgaatgtatttataactatttatttctggatggtcattatcttgtagccaaatttgacaatataaagtaaggagcaaagttacaggccagtttttacttgtttgccctgagggaaaaatccttttaaaaaaaatttctggtttttattggatttttgtattttaaatttcaaatatttttctacatcaaacctagcaaaaatggagatgacggtttctgatttataataaatactagacagttttcaggctcctgttagacaaacacattgatgaagaaattagtcttaataggattgtaggctgtgtagaaaagttggaaatatagcacttcatggagtcttgttttgaagatgacagttttctgtaactacagcttggaaactatgcaaatggtctagattcctcagagctcacatgataggatatagttagtgatgacattttgctcttcttgtgggaacacacacttcaaggaggagatagtgactttgagataggaacagtttaagatgcagtgtgagtctggcctgcgtgcggtgaggaggccccgccaagagactggtggacatctgactgtgggatgtgctctcaagtaggacgtcatcaggacagattctgaataggcatcatgagagtgctggtcagaaacggctgccactttttttaatttaattttattttttatttaaaggaaggaacaatagctaggtaagatttttatcagctttctctgtctgaatccagtttttcctctgtcagtcctggaagcttgaatagaattatattgttgaagccttcaggtcacaaactgtcttttgtaacctcctgtccctcctaaaacacgccaacccctgcagtcaaatcacattagtaatctgatttgctgacagtcctgccctgcctgctcctcgttttcccacatgtcctgcatccctcccccactggagtgatttcagtgaatcagacaaggaaggatgtgtaggatcactactgcattgcaataccctgttatcctcagcaacaaaacccacatttcatacatcctttgtgtactcaggataaagactgatgtttactctctgggcactgttgtaagataggttttgtcagagcataatcattgtctgcaaagtgtttggtgcgaggaagattattgctaattttgtgaaataaagagtctagccctctccttttaatgaacttaactctcgctggcatctgtagtatcattgggagcttaggcgcacatggaaatgagagcccggcgcatggattttaatgtttttctaacaactgtggagatttgagggaatgtgtggtgaatgtaaaatacctagtttacttgccagtctcttgtgtaaattacagtaaaacaaagtaaatgaaatttaaacaaaaaataaatttgatcacaaaatgccacttgtgtgcttgagtggttgtttccctgagccatgtctggtttgaaacacctcagaccactactctgtttttcatgaattctgtaattcgcagcactaccagtctgggaaaattattttgttttaattgcaaattcttattcttgaaatgtacctgtgccacactaagtggttacgtttgatttcttaagtaattttctgtctttaaaagctaagcagtaaactaaaggattatatattattagtctcagtggttttcagatttatttttaaaggggaaaacagggaaaacccatcgtatttgtaaagcacttaggattttgccgtttgtttctgattgtttgaagattagggctttttggtgcgtggtcacctttcacctctccttttaggatttagtcctttccagtctgctctttttgtgcgtgtcacaaccatattcttgtggttctggctcatattgtaga

SEQ ID NO: 13013 - DNA, 1176 bp, Homo sapiens
gaatagtagaagtaaatattttctcaatttcaatttcttcttttgaagaagaaaccaaggtatcctttccagagggactttgctggcttcacccaatgtggagtaaaagtttctttttcacatcctttgcttcttatgctactgtataaattcttctctgaaaggaaggagcctattgcagtaagcacattggtatgttctcagtgagtatttgtgggatggaaagaaggaaggaccaaagagcaagcagacaagccaggatgctgcacaacatgctggctctggccgcccctctccatggaacacaactgttgtgttcagtgtcatgctgagagcgtctggacagaagggcctttcagttcctggatattttctctccaaaagtctgactctaaggacatattaagcaaattaattccctttttgtcagcatacctaatgcttgtccctcattgtgaatggagttccttcattgttttaggccaaagagccattttaaaacatggatctgtgcatattttaaactaaaatgaaaagatgtgtgcataatttgttcccatttctagggtttaatatccatattaaaaggctgaaaagggcttgtacagatcggctcaggccttgtttctagccactccttgttggggtcaccttgagtatgaacaattggatttgaaagattcatttcaacttaaaatctttcaccatagaagagaattgactgatactgttgtgcatgtctgaggatgatgaatagcccttttctccctcgcccaataggaggtggatagcttctgaacatttcttaatgcagaactcaatagccagcctcagaagtagtaattgctggatctgtgatccaactttttgtgtgtacattaggtttactcattaaagtctcacatgcaagggcagaaggaagccattctcactgcagaatgaattttaaagaggaaatacttttactgtagctttagacattaaggtaccaagtgccaagacatgtttttcttgtcagcaaaaggatagggacttaaaatcaccttcgggtcgtgtaggttttctgggttacccacagtggcagccatgaactaaacttgggattttccctcttttgaaaacatgtgggtgttgtgttctgctttacctctcacatctggtgatcagagctctagg

SEQ ID NO: 13014 - DNA, 1222 bp, Homo sapiens
tggaaacaacctcccacagataccacagatacctcttacggataccaaaggatgactgactggactatattacatttgtgaatgtagattaaagtatttaaattataataatccctcttttaagaatagtaaggctaaaaatcttatgagagatgtagagttttaaattttgaaatataacaaatggataaataaacaaaagaatgcctaaatagtcttttcaatttatgtcatccaggacattaaaaagaaaaacctcacactgaagtggtcagcgtgagtaatcagaatggctgtactgtgctgatagaattctgggaacagcaaagaaatgtgactttttgttagactgcatagtttttcctagagaaactatatttccttttgaaatattgaaaatggtttatgtatctccatgactgtcctgggactgagatttgccaattgcttacattagacacctctctaatgtgtagaattaatttcttagttgggtgttaattgaaattttatatgtaagtagctgagagtcctcattttaatcacaataagaggagtgaaatcctcaaagaagctgctctgaggaacagtggattggtctcaacatgaaacagtgaatggctggtcttcaggcccgacctctgaggtaatgtctcagaactgagttttcaataaaatagataaagaatttttattaagtttcctgagctggaaacacatccatcctctcattttgctggacaatatgtttgccattaagggcctgcccgtctcagggagagctcaaggcaacgtggagggcatgcaaccctgcctcagggggaagtgaagcttgcctgaatcccagttgcattacaggtcctggtggaggtgctgaccttttgcccttgtccttgggaaattcatcagttcctagagctactagagattgcaagacattatctcattcagccctctgactccaagtaggaattcacttaaattatctctggcaaaggagaatgtcctcatgtactactagtataattaaaaattaattttaaagattttaaatcacctgtgggagattttgttctacctattcctaagatctgtagggatagtgagttgccttgctatcctatgagaagtgatgataattagagcttacatatattgagcattttttttcctgcgtgccagatactgaaataaagactttctgtgcattcacttatttaat

SEQ ID NO: 13015 - DNA, 3184 bp, Homo sapiens
cctttctgataagccaaagccatcctctaatactaagaactatacaggagagagccaagctaagcatgtagctgctggcactgccttccctcagagaactgaactgttttcggaacctcggccaacagggatgtctctttataatagtttggagacagctactagcacagaagaagagatggaactctagaaaccaatttctacactaaagttgtcaaatgttagaagaatcctgtgttcagttatgagactctttgcatagtatagggacttgaaagttttatgagacgggtgtaataatatctccacctgtgatttgggggtgggactcttattttgggtagccatttattgacttcacctttttgccaaggacgtttgtctcaagggaaaagcagttttctgtggggcttattaaaggaatgttggtttacattgtcttcaaagacaagtatagaagctgtatgtgtaagggtgacttaaatcatatgtcacattgtctaaactattcagacacttggagaatattctccttgaattaaaaaagatgattaagaaggatgctcctacaactgtatcctgacagttaagtcacagcttaatgtgtagatatgagctgtttacagtggtgactatatataattggggagaagaagggaagagagcagcagtagcttaagcctgttgctaagaaatttaatttcttagcaacttgtaatttagttatcaattcaatatagctctgttgattaaatagccgatagtattgtggctctcctctttgactatgaaaatatagagaaagttttttctttaaggcttttttgccttgtgccactgttgctccttggtttcccttgcgtaattgataagcccagttattcagtaatgtttacaaattaattgactttgatagttaaaagattatgaggtaacccatctgcaatttgcctgtgggagaagcatcctttagttcatcttaaggaagtgctttatcagctaaacccaacattgataactttggtaatttttttaaaaagttatacttgtattagcaagtttttttttttttcccccaccgcaacctccatctcccgggttcaagcaattctcctgcctcaccctcccaagtagctgggattacaggtgcccacctccacgcccagctaatttttgtatttttaatagagaccggttttgccatgttggccaggctggtctcgaactcctgacctcaggtgatctgcccaccccagcctcccaaaatgctgggattacaggcgtgagccacggcacgcagccagcaagttgtttttaaatgttaatatagaaaacagtgaaggattagctgaaaatatatgagcaggtgacattgaggtttactgaaatagccaatttgactggtgcttagactattgtgcagtaaacctaaaaggtagtggagaattgcttcctgctagcaggaagccttcatcttcttgagtacccaaaccaggcttcaggtgtcctttgaggatagccaggtttgaaatttttagtttctcaggaagagctcttctatgtggcaggggctgatagggcaaaataaaatgacaatttctttattgctacagagtatcctctataagttattaaacgagtgtaatggtataatgcccttccatcacacaacaggacaccaccccagttttgttttctgggtttcttccccctttgtaggaatcagataccttttgtagaaaaaaatggcttatgccacgtaaaggtgaatttttagaaaccaccttctaggcgtttttggaacccttactgaaatccctccccttgttacagatggcgtagaagtcacaagtctgttaattggactgttgcttctttgcctgttcctgctttctctttctgtctggatagtcaggaaaagatttaatgtttaatatttaaacaaaatatttaatgtctatacagtaaaattattcaaacttcaaaccagtattgaaagcagttggaaaccagctaatagtttcttaatctcagatttcgagatgaatgtaaactgtattcttttgaaatgtgcaagtgtttgattcatgccatttgataaacttctgccttgtagtcattgtttgatgggaccaacttgtaaagtatgagccttaaataaatctccatgctgaaaaatgtgttctaatgcaacacaaaaacatgaagtgactgcccagaggtagagttagtgtttaggtggaaagggagatgacagctttccaaagaaggacctaaaacacaccaagattgtcttctacaggaattgctgggcaggtctccgactaaaggtcttatgatgaaaaggaagaaacaagcccccaacacaaggctctgatactactggtaaatgtaggagagaattaagaatctgttaattaaaatccaaacagagcttatttcagtagtcaagttacctgacatgataattatttctgcaggataattgatgttttatgttcttttttggactttatcttcttgcaaaaatttctacaaaaattgttttcttcatccttgtggtgcttattcatctgagccgtctccacagtcccaatgcctctgctttttgttttacttttgtagcataaggtttttgcttttgctttgccttaagagttccctagggagttaccagggcttttcgttttgtgtagcttttgcagcatggatcaaacattggcttactgtgctaatgtgtgaagagaaaaaattctctaaagcaggtgagctttaatgaacaaatgtgtattttatctgagtttgagtagggtgcgttgtggattttgttttttgggttttttttttttttttgtaattatatgaagaaagtccagttctcataaatattgatcacttaaaaaacttactctttcttgaaaaggtacacatgtaaaatttaggaaaataactaaagtaggggctggaaccataagaagaatgtttatcagcacgttcatttattattttggatttggaacttggctttgtttttcaatagtgacaagaatggttcagttctaggaatgttctggaagatgctgttaattttactttaaaatgagaatctggtgttactgtattttatcgttttcaataaaacttcttaagtgttttggacttttgagatatttgtattactcca

SEQ ID NO: 13016 - DNA, 1369 bp, Homo sapiens
ctacgtgcacctctgcagcaggtgcaggcccagttgtcacccctccagaacatctccccatggattctggcggtattgactcttcagattcagaggtagggatcattctgacttattaaagagctatataaccagttaattccatctgtttgatgcttgacatccctaactagacagatgagggttgaagttagtttttggtggggttggaggtgaacatcaactaccttcctagttccaggtaatatagaacatggagtgaagtgtagataaatgggtctggtgggtcccgaggtcatcttatcacataatgactaatttacattatggaacccagtacaaagtgttccagttagattttccattgtattctgacagttgtacttcatttaatttttgcctcttacagtctgatatcctgttgggcattctggacaacttggacccagtcatgttcttcaaatgcccttccccagagcctgccagcctggaggagctcccagaggtctacccagaaggacccagttccttaccagcctccctttctctgtcagtggggacgtcatcagccaagctggaagccattaatgaactaattcgttttgaccacatatataccaagcccctagtcttagagataccctctgagacagagagccaagctaatgtggtagtgaaaatcgaggaagcacctctcagcccctcagagaatgatcaccctgaattcattgtctcagtgaaggaagaacctgtagaagatgacctcgttccggagctgggtatctcaaatctgctttcatccagccactgcccaaagccatcttcctgcctactggatgcttacagtgactgtggatacgggggttccctttccccattcagtgacatgtcctctctgcttggtgtaaaccattcttgggaggacacttttgccaatgaactctttccccagctgattagtgtctaaggaatgatccaatactgttgcccttttccttgactattacactgcctggaggatagcagagaagcctgtctgtacttcattcaaaaagccaaaatagagagtatacagtcctagagaattcctctatttgttcagatctcatagatgacccccaggtattgtcttttgacatccagcagtccaaggtattgagacatattactggaagtaagaaatattactataattgagaactacagcttttaagattgtacttttatcttaaaagggtggtagttttccctaaaatacttattatgtaagggtcattagacaaatgtcttgaagtagacatggaatttatgaatggttctttatcatttctcttccccctttttggcatcctggcttgcctccagtttt

SEQ ID NO: 13017 - DNA, 1150 bp, Homo sapiens
tgcttgaatccgggaggcggaggttgcagtgagctgagatcacaccactgcactccggcttgggtgacagagcgagaccccgtctcaaaaaaaaaagaaacccaggtctgcctgggttgcttgttcttgtttttgccaagtgaacagaacttggctggttaggattttgacattaattcaagtctaattttgaacaacatataatataggggttcttaacctgagggtcacagactttcagagatagtccatgaactcctgcaagtgtatgcgtattcttgtctatgggcagttacaactttgcctcttccagggttctgtgatgtgtcccctctatacccacaaggaaaaggggaaactctaatctagtagagcattgaataatccattaccaagagtttgagtggggttcaggctgacaagagttgtacggaagtctacaggtctgggtgcctccattgaacatatttattttgtagacatctatcacagccctattctgtaccagacactgtattgctgttgtcttctggagttcagtctcctatggagacagacacatgcatggataaatgataattcttaccaaatgggtttctccaccgaactgagcccttaggccctgaggcatccattgtctataatgaattaacttccctcctgtgcactgcgcagcatccttgggagaagagagaatatagtcactcaaagacttttctgcatttacatggcaaagtgtaagaacttgacactctgaatgcaggatgtgggaaagcagagtatagttccgtttcatagttcattgaaaaatgaaacggagcacctgtcgctgttgaaatgcctgaagagtagcttctcacaccttcccttgtggacctggaccccatggggtctgtttttgctcatttctggatcgaccccctgggttcccactgcctgctatgcatgaggcactcagtattgaatgaataaatgatggagagtggacatcaggcaggcagtgggttttatggattatttatgctttaattgatgagaacaacttgctttggcttggctaataaattctgggattatccttcctttttgattgttatttccagaaacttgcttggatggaaaggatagctctctctctggttcccataga

SEQ ID NO: 13018 - DNA, 1164 bp, Homo sapiens
caccaagtttacactgtttcaagaaatcaaggggttgaggtataaaacagtaacaatacatcaaatactagcctgaaaaatagtatttctctctctcttcctacaaaatgtgaccaccattctgaatttggcattttcatgtccactgtcacatctagcttattctgtccagcatttggctaaatgtattaccaacacttgcgtattcctaaattggggcctttgacttatgagacagcttttgaagtttgtccttctccttaactacaaaccaagtacatattctaccacctgcaaaccagatcactcatcactttcagagtcttctctatctagatccctgccagcccttctgtcttgttgtttccttctactcaggctcaacctgatactaagatataggagaccagaactgttctcagcacttagactggataaaatgttactttcttttcagcagcaaagtgtgggaacgtggctgatgtccactgaggcagggtggttaagaacccaggctcacagcctgcctgggtttaaatcccagctctgccactaacttgtatgtgaccttgagcaaatttctgaacttggcttcctcatctacataaaaaaagaatatctacttcaaaggtagttgtaagggtcagatgagttagcctataaaactagcagaacagtgcctggaacgaggcaagcacatagtaaatgttagtggctgttattttctgttttagtagttgtgtcggggacggctatggaagtataacatacattatctccaatcttaacaacaaccttataatgtcagtattagtgtcctcgtgtgtggctgatgcaacaaagatggaaagaattccagctgtgctaggatggctgagccaggtggcactggtctgcatgggtctaaagctttgctggttgccctcggtcctgctcccttctcttttgacaggccctgggaaccagctctatccttttggcctaaagctttggcgcagttgaggtgagagttgggcacaccctcttttcaagcatacgagacaaggcaaggccaagaccttactaattcggctggtaaaggtatcacaagccacttttggattcaggcagtttattacttacatagacagcaaaagaaagagtagccaaaggtgccagctcccc

SEQ ID NO: 13019 - DNA, 1161 bp, Homo sapiens
ccaggggtagcctttaaacagcctgttaattacactggtgatttctgtggtctctgcatagagtccgggatgtgtttccagatcctcttgcgtaagttgaagtagacatgttgttgaagtctagaagccaaacaatcttggatactaacatagctagtctcgtctgtaattgctacttagtgttaaatttatggtatttcacagcaatttagattggcatttatatgggaattgtgctgttttctttccctagatcctattgggcagtttccaccttggatcaccatcacttacaaggcagtaaaaaagcatgcataacatacatttataatggctctatagtgttctccccagtgctcagctcattgtgctgaaataaaattccccttgggttgaaaaactgtccccactcttaaaattttaagttttgacgttacttttggctatagcatctgagaaatacacaatatgagtcaagcaaatgtgtagcttgcctgctgaagttttctttccattttatttcctagatgcacccactgggcctatgtaataacaatgacgaagaggacttgtatgaatatggctgggtaggagtggtgaagctggaacagccagaattggacccgaaaccatgcctcactgtcctaggcaaggtaagcaccaggcccttggaatcactgtgtttctggttggtgttttccactcttccatttcagcattcctcaaatagttgattatggagaagagccatgctggcacagtgctccttcccggctgaagttgcatgaggtggggactgagacatgccttgcagtggcccaccagtgtttacaagcccagactgaaagagactgccagtctcagagcgggctctaccctcttgtccattgtgtggccttgggcaagttgcttcccctcaaggagtcttagtctcttgtctgtgaaatgggctaataatagagattcacaatactttatcttacacccttgggccagatgtttcagaattctgagatttggggggtttagaaaggcattaaggggtatagattttatattaagtaacctccaagagacatggggaggcactcagtaaccaaacacattcacatttgtatagcaaaccatagagatcttcacattaagtgggataactaaaat

SEQ ID NO: 13020 - DNA, 1687 bp, Homo sapiens
ctctctacatccaagtgagaggctggctctccaggaggtacctgtgctctcagcacaaatggagcccctctgggaacaggaacctgcttcagccctttagcatacacaggcctgccacatgctggggacagggccacctgagtcccttgcctggtcccatgtgtggtgccagctccctcccctgatgattgttctctctctttcccaggaccgagatctcactcagcagacagcagcagcccgggagcctgagctcaggaggaactcttacctggaaattgggaactgtatggagactccaaactgacttctttcaaaaaacaaaaacaaaaaatttttttagctttgacaaacacacaaaagtggtaataaagagagccctccttgtcaacccaaaatgtgagccccctgtggcaaaaccaccccctaccccattaacaaatcaacagacaaaattctccgagtcctttgcctcttttgataacatgttgttctgttttgtaaagtgtgtgtgcttggggttccgaggtgtgggattgagttctctgctttgtttttttttaagatattgtatgtaaatgtaaaaagttatttaaatatatattttaaagaaccctaactgccaacttttgctgaaaaagaaaaaaaaatcactgctgcattaaatgaaccacatcatgtgtagatactgttgtctccctgaagggagctcaggcctttgaaaagctcagggcttcacctgccttagaaaatgaaccagaaacttgaagtaaagctagttgataggggtacaggctctgaggagcagtgcaaaactgcctctttctttctcgtggcaaatcccaatgtacacgatttcaggtctcagacgccatgcctctccagcccacgcctttaggcaggtgatggcagcagctaggaatagggtgtacatgatccacagccctgcggagccaggtcaagccgctgctatgaaagctccagggtgatggggacgattctgcccagtgtcctcagtctgtcccctcaggtcatggtcccaagtgaaatgacagagttcacagccctggtcttggctgaggtccaggtcatagtaagggcatgttcttggggccctcgacctgaactctgaccctccgggcagggaagaggaggttgtcccctttggttgtcctggctttggagtcctttgcaaaaatattttgggccccctgccactggctgcagaaatggctcgacggggtgtgtggggacagacacccagaaggaatgtacttttgtggccttggtgtccgatggggctgggggagagtgctctccactgacccagcagcacacccatgtgcagtgcgcctgcatctgtgtgggggcagccacaccccttggctgctgcttccttgggctgcctttctgggggcatgtgactggacctacgaggtctgcactgagctccatttgaatgatacctttcctatcccatttcccccacggaagcaccgcttcagggttattcagtcctctgcctcatggctgaaattgctcatctcgtctgcagatgtctactatcctgtctacctaatgcactattatgtattgattctccatgagacagagagagagagagactatcagatagtttacacccaaagggtaggtttttgtatatttttccagccttttttattaa

SEQ ID NO: 13021 - DNA, 1096 bp, Homo sapiens
ctactcgaagttcgtgcaggactaatgcttttaaaatgaggtctaaaaaataattactagtcgagactattattctttaaacagaactgcctttttctactctttatgtaaactctttctattgtgttggtctaacaaggcactattttaaaattttttaatttttcccatagcacttaaaagagattttgtaaagaccttgctgtaaagattttgtaataaaatggtctaagggctctttttccaacattaccatttttaaaaaatgttttaaaagctagaagacaacttatgtatattctgtatatgtatagcagcacatttcatttatggaaatatgttctcagaatatttatttactaatatatttatcttaagccatgtcttatgttgagagtgtgacattgttggaataatcattgaaaatgactaacacaagaccctgtaaatacatgataattgcacacagattttacatatttgcagaccaaaaatgatttaaaacaagttgtagtcttctatggttttgtaacaaattgtacacatgactgtaaaaaaaaaatacaattttatcaagtatgtgttatatgttgtcattggtctgttcagtaaaagtctgcagattcaacaaggggaggtttgcatggggcagtacttttaacttctactcgtccatggaagcattcatataactttctctcctgttaatatagagtccaggttattgggggtttaggcagtgtcacaggagagcatctgttataaggtgtgtgggtttacatccttgtgagaatggtaggctttctgctcagccctatgtagaaggagctagggaaagtgatagtgattgagcctaggggtccactttttattttttatttatatttatttatttatttatttatttttgagacagagtctcactctgtcgcccaggctggagtgcagcggcgcaatctcggctcactgcaaactccgcctcccaggttcaagccattctcctgcctcagcctcctgagtagctgggactacaggtgctccccaccacgcccggctaattttttttttttttttttgtatttttagtagagacggg

SEQ ID NO: 13022 - DNA, 1106 bp, Homo sapiens
tgacttcacccgccctgtcccccacgtcaggacaggcttgaggcctctctgggcgtgagcgaggaaaccaggctgctctaacttctgaagagtgggctctggctcaagactccaatcggccagaagcccacagagatcaaagcactagcaagttcagctgtcctggccctcgggtagaacccacgggcgtgcctgggtgcggctccacccacatgccccactgtcagcccaggcaggagccttcctggccgggctcaggatctgcctgcagcccagccaggccatcacccagccccgatgcatcctggcactgcacgcttactcttcacaagcacttatacgcggatggcctccgagaccctgcctccctggtctgctgaggtcaggccaggtctcccacggagccgggcagctccacaccccaccacctggcaccgttaggtttcagatctcccgtgtggtgtttgatgtcggcttttgttcctaccttgggagtttggattgtttcctctggtgtctttgtttaccttcctcactgttctacctcctggccaggtctcagcttagcttccctggtgtggggtgtttttcaagccttccagccacagctgtctcccctcaggctggacggctccggggtgacagggcttcaccctctgcctgcagacccctggtgggcacatctcacaggcttccgtcttgctgagttgggtacggaggcagaagtggggtgtggaggaaagtcagagggaaatctgcttcagaaaggaagggtctttagacacaaagactggaggcccttccccgcccgcacgggagctgccatcgtgggtctcatgcacgtcaagaccttcccacatccaaactcagcttccagcagggattttgactttggatgacaaggctttatttgtaaatatgctcttaatatgcaactttgagaataaaatagaaacatcatgtattttaaaatataagatgaagtgtgacgcactgtatacaatttaatatatatttttagggttttgttatttaagaaaatggaatgtaatggtacttttacaaacgagaaaaaatgttatttttactttctggaaaaaataaat

SEQ ID NO: 13023 - DNA, 1652 bp, Homo sapiens
atttccatggacaatctgttgagctcaagccatcttctaaaacatggaaatgtcatctttgtggcatatattaagtggcagtttattttctttccctgccagtatacttcgttgggtcggggagaacaaagaatggttttgaaaccagagctttcagttcccttcatggtttccagaggtgagaagcctctgtgggtagtagatttgggatggaacacacacaacccttctaatgaccctaagttgttaactaactgcctttgaatggttgtcttgaaatacctggtgtatatactgcagaaaaggaatgcagctgttttccacagtgtttgtccccaacttctgtttgtactcagaatcgttgaacatatgaagattttggtcccataatccttaaactatagcctgaggtgcacctgattacatagagtttggatggagcaaagaaaaatccaatagcattttgcagagtaatgtatataattatgggctcacttcctactggagatgttgaaagtctaaatcggtttgaccattttgattgatggcacaatctggtttagaaaactttgtttagatcaatgacataaccctgctgcctctgcctgcccttcccctcccttctcccatccccttttccctatctggtgtctgtactttgatgaaggtgagctataatattggtggttaacataatccagaaggcttagttctgtgtgtgttctgtccctatataaactggtaaagaaaaaaaaaagttatgcagaatgttagatatttacatttgatacggtgtgccactattcaaggaaaaattaaatagcattttttaaaaaacagaatgaacttcaaaattaaagttgatttttaacttccatattagcaaatactcttcactactgaaagacagtactattttgcatattctgcataactttaagaaagtctttagtgaaatctttattggaagaaagtcatttgacaacaggcaaaaatttaatgattcggtatgaagtaaaatcaatcttctgatttggaaaatactctattataaaggtttcacttctttttggatgttttaaaatagacatagacacttgaaagtactatcatcacgtctcaaatcacctagaattcctagtatttttaaattgcaaatacaatttcaagtttatttaaatactccagaagttataatcctactaattgtgctagactttgctagtagagggggcccctctttctggatgagaagtctctcttgcagccatagaagagaccatggctttccccataggtttttcaacagactgtgaagcagtctgtcggatcctgtggggatagacgggcatttccctcgttgcccccctttttattgtggtgtggtgatggttttcagtgtcttgtacaggtaaggcactcaatgttgttaacatgccctttttcattgcctcagtattttgatattttcattggctgttaaacgtggaaactttttaacatgctttgtcgcatttatatgctacaggttacaaagtgagagccttgtatacacttcaatacttaaaaagtacccgtactcagtactcagccggcagcataatgaaaagtgggactagacacggtgtccatatggagaggaaaaatataca

SEQ ID NO: 13024 - DNA, 1098 bp, Homo sapiens
gtgcgggtcattttgagtttaatgaatccccatcaaatggtggtatagtagatagctatgtgtgtttgtaaggtttgtagcttgcaagacgtgcactaataatattttatatgatctttcctggttggcaggacccatggatgaaggaccagatcttgatctaggtaattttgaattctagttgtgcttcatatcgtgctttgtaaattaatggtacagaggtaaatgcatgcgtagagttcagcagccttatagaccagtgtgatattcttgctgtcaaggacagtttgggaaatcctatgtgagcatctactcataattgccttaagtgaagtaaaccaaaagtttgatagcattcttcttagtatgcttggtagttttcttagatttatgatgaatatccttgggcagtagtgatcaggtagttaagaaacccctatagatacatgataataattctcctgtcttgttgtctctgaaaggcccacctgtagatccagatgaagactctgacaacagtgcaatttatgtacaaggattaaatgacagtgtgactctagatgatctggcagacttctttaagcagtgtggggttgttaaggtcagtaaaagcataaccaggtcatctggcagaactttaaaccacagagcattttaaagagattgaattgatgttgagagttgttttctaaggttgcctttgcctgacttctttctaggtatcttatggtttgttcctttttaaaaaagattagcctttttttttttttttttttgagacggagtttccttcttggtgcccaggctggagtgcaatggcgcaagtcttggctcactgcaacctctgttcaagcgaatctcctgcctcagcctcccaagtagctgggattacaggtgtgcgccaccagctaattgtgtctttttagtaaagatggggtttcaccgtgttgggcaggcgggtctcaaactcctgacctcaggtgatctgcccaccttggcgcctcccaaagtgctgggattacaggtgtgatcccctacgcccggccttccctcctccacccctagggacagagtgttgctcaatctcagcctcccagg

SEQ ID NO: 13025 - DNA, 1177 bp, Homo sapiens
cggccacgctgcgccgcctggacgccgggctcctccacccacagctctgcgaccttcacgagctcgaccctttctgcgcctcagtttcctcatctataaaatggagataatgcctccgcgcgctgagcccgagcgcggtcgtgctgttacactattgctgctgctatgtcgttaatgacggcacagcccttatggaaggggggccaaggaaggcacggggaccttcccgcaggacatggggtgggcaccagccctaagccatgcacataacccactctgaggtcaggacctgggttcctttcgtgtccactgggggccttagccgttgtcttcacttctctaggtcccagcccttcacaatgggcgcgcctccctgcctgagagggaggccccagccaagccccagtttccaccgcaaaaagccacacagcaaacacttaatggaccctaaatttataaaaattatcccatagagtcctatgaggcagggaatgttactgtacccatttcgcagatgaggaaacttggggcaccgacatttcccagagccaacatgtaaaccaggcatttggcctgagtgacagactggtgcaggtggccagcagcttaatttgtactgagcgcttactgggtccccacagcgatcctgaactgtgttcctgcccacagtgactcggccggtccgggcatggcagacccagtggcgggcatcgcgggctcggcggccaagagcgtgcggccatttcgctccagtgaggcctacgtggaggccatgaaggaggacctggccgagtggctcaatgccttgtacggcctgggtctcccgggtggtggcgatggcttcctgacagggctggccacgggcacgaccctgtgccaacatgccaacgccgtgaccgaggctgcccgtgcattggcagccgcccgcccggcccgaggtgtggccttccaggcgcacagtgtagtgcctggctccttcatggcgcgcgacaacgtggccaccttcatcggctggtgccgcgtggagctgggtgtgccggaggtgctcatgtttgagactgaggacctggtgctgcgcaagaacgagaagagcgtggtgctgtgcctgctggaggtggcgcggcgtggggcacgcctgggcctgctggccccacgcctcgtgcagtttgagcaggag

SEQ ID NO: 13026 - DNA, 1206 bp, Homo sapiens
tcctcttcgtccctcagcgtcctgggtggcaaatgtggccaacctggggactctggccggacggccaatgggctgcctgggccccgaagccaagccctttccagctcctccgatgaaggcagcccctgccctggcatgggggggccactagatgcacctgggagccccctggcttgcactgaaccctcgaggacctgggcacggggtcggatggacacacagccagaccgtaaaccctcacgtatccccacgcctcggggcccccgccgcccctccggacccgcagagctggggacatggcatgccctgcactcagtcaccccgagggctgagccagattcctggatgtgatggaccagctcagctgtccccagaccccatcccttctccttttcctttgtggccttaacccttctgcatcagggagccccctctgcctcttgagtaccagacctcatgggaccagaccccttgggaccacatggcacaatgggacctctgttgtacattccggttgggggatgagcgttgctatttaattactaatattattgaatgccttagaggaggccgggcgagcccggtgttctgaagacctgtggcccagcagagcctctgacagtaaagttttgctccagccacctgtctgtttcttggggactccaccttggggccattcagaccctttcgaggaccctggagttaactgcctggaggccaagcctggcaactctgacctctaggcttaaggcgttatcccgcccagcccagaaatcccaggcgcactcaaattattttcccttttattatcccgtggtaggtgtggcataaagaatatgtccagtgaagctccaggagcaggctgcgtgtttccagtcaagttcatagccaagtcctttccatccaatgggattgtgacccattgaggtcccagaaaggactggtcatctccaatggagcttgggacctggttgggtccaatgaggttcaaaagggggccagtcgcttaggagactgggttggagctttcctcatccaatcagggcggagacttccctgtccagtcccagtgaagttgggcgatcccgtccaatccaggtccctgattgtcccagtcacaaggtggggcccatggatggcactgtccgatcgggtcacatgaggctgcagcgcgcgggatgcagcgccccctgcaggcgcagggcc

SEQ ID NO: 13027 - DNA, 1115 bp, Homo sapiens
acgaccctatctacgtgaagctggagaagctggacatcatgatccgcctggcctctcaggccaacatcgcccaggtcagctgcgtgtgatggtcaggacacgggctcagtgtgggaccattccaccaccaccagactgtaggctctggcccaggtgaccagtctcaccattaacggtttatctcatgaagagtgtttagcatgggacatggggcttcgtaagcaagtaaaagaactgatgtttttattactaaagaatgtttctccatgttatcacctgtcatcccttacaacgtggtgttggatatgttagctaaatcaaccccaaacaaggttgtccaggccttctttccttttcaggcacctgccagctctctcccttgggccttctacctggagcaggaggcagaatcccattctcctagggagtctgtgtatattcactgcccaggagtgttccagcagattgccccatcaggtgccccagccccatcttttctgtttgggccacaggtgttggcagagctgaaagagtacgcaacagaagtggatgtggactttgtacggaaggctgtgcgtgctattggccgctgcgccatcaaggtggaggtgaggctctgggactctgtccttggctggagaaggaaaagggggctgaaaccgggaaaccagtctgattcaagcagaatctgccagcttgcttgtggtctgggaaggcctgaggctcatcactggagcccccatggcaagcattgtgcagatctggtggggttccttctcactctatagtatcctttaggccttcgagttgctgccgatcaaattaacccatcataatcatggttctcctgcagcatttgttaagatgctggggcagccacaagttaatggacttagcattcacttcacagagctctggggtaagggccctgcctgttgaacacttcttggcaaatattgtcatcattcagctgcccacgtgcctctgtgtcccagcgtcccagggccactctagactcctgtgtcctggcattttatccccgtcctttctctgtctgtggagatgttcctcgaccactaagccagattctccttaaatgggtccactggtggcta

SEQ ID NO: 13028 - DNA, 1795 bp, Homo sapiens
taattttgtatttttagtagagagagggtttctccatgttggtcaggctagtctcgaactcctgacctcaggtgatccgcctgtcttggcctctctaagtgctgggattataggcacaagccaccatgcctggccaacagataactattaaaatttaagaaaatgttattctcatcaccaccaaagtcctgtcttatcccataatttgagggatctggtgctcttcatgggcccttccacgagggcaatgggacattcctgtcgcagcatctggggcctcctcctgcccactcaaaggccagcatgtgtgggtggggccaggggaggttgttggcttgcttgagccccctgtgtgacctctgccttctctctccgcagtccccctggtgcgacacatggagtctaggatcatgatccccttgaagatctcgcctctgcagtgatgctgcctacacctccacctccttccccttctccctcaggcaaccccgacagacagtggcactcctggtcctgctgtcttggttttgtcttggctctgggaggactctgaggggcagtgctcagttcagacaagggggaactgaaggctgacaagttctgaggattacagctctgcccaggccctttctactttccctgcctgcctccctccccctgctagaagtagtttctgatttccctgaatgaaagatagtgatcttttaggccttcatttatcttctaaaattcctcatctcaaggccaccagtccccagttatcacccttggaaatcctctgtttagcttagttgcacaaaaggtagtatgtccagtggctagaggtggggtgggaagagaggaggccaggccaggccctcaggaattccctggtttccactgggccacccacttgctggacagtctgagccaagtccctcctgctggagaaaagcctggaactgccaaaacaaaaaaacaaatacaaacaaacctcgtcaccacggtcaggaggaggttcagacattctgcccagaggggctggggaaagggatgggagccaggaaagatttaggggcaggagacagacacgtaacaggaactcggaaggtagaacttagaattcagaacttgggtttcaattgtagaatttggaatctggaatacagaattgggaagaagaacagagatgacaaaagaccacttgaagagaggttcctaatactagacagatggagagtggcttggctgtttccccctgcatattggggttgaaaacttaaatgtgtagttccagtccttctatgcagagtctctcctgccctccctccttcctgcaggcaaatatacaagctagaccctgttccctcaccctgtatcctgtctcccctaattgacattctatcagcccaaccctcattctgcagggccacctggtgtgtggaggtggcgggaggggtcagtgactctgggggtctcctcagtgacccccatacctcatcatgaacccttgggtagcttgattctgcctaccatccaggaaaacttgtgctggaattgctgatggaaacaattaaatatttactataaatcagtgtcttttcttcatctgcaaggaactttagcaggtgcctgaggcagggcacagtagagctggtgggcttagtcccacatggcagatctaccctcctggagggtactgtgttcttgagctattctcaacagtcagtactggttgggtgcagtggctcacgcctgtaatcccagcattttggaagtccgaggtgggcagatcacttgagtgaggtcaggagtt

SEQ ID NO: 13029 - DNA, 1206 bp, Homo sapiens
ggtttcccgggtaaggtcagcagaggtccgccgcctcaaccagtcttgttagagtaggcacaaaagcattcagagtgactgccactgtagccactcaacgccgagcctaggcctgctttttttgcagttagagtgaaactttccattggtggagtcaccccaaaggaggcgggacggagcgggaaagtcctgcctaccttggccttcccagccaatcgcagcatctatgcgtcagcctccggttcggttgcgctgcgcgtagtggtctgggcgacctgagggcggggccgggagcaggccccgggctgtggggagggtgcgcttcccgcgggcgcgcggagtgaggacggtgacagccacgcgcgcgcgtacgcgcccgatgcagcgcggccccgtgaccctagtcggccgctgagaggcgcgcggagtctgggccgctgccgtctaggggtcccgtcccgaggcgtccccggcatctccggcccgaatcccggagtgccgggtcgcgcctgcaccgaaggtcccggctcctgtgccctccctgcagccgtcagggcccgtcccccaactcccctttccgctcaggcagggtcctcgcggcccatgctggccgctggggacccgcgcagcccagaccgttcccgggccgggcagccggccaccatggtggccctgaggcctgtgcagcaactccaggggggctaaagggctcagagtgcaggccgtggggcgcgagggtcccgggcctgagccccgcgccatggccggggccatcgcttcccgcatgagcttcagctctctcaagaggaagcaacccaagacgttcaccgtgaggatcgtcaccatggacgccgagatggagttcaattgcgaggtaaccggccggcagccccgactgctgcggtgacagtcgaggtggaagctcgagaggttctctttatatcatcttatgggtgtagctagagacgggcagaaccggaagggccaactaggcccaaaacctcatgttaaagatgattgctgctttttttcataggacttttgggttttggcatttcctgaaggttattttcattcattgttattggaagaagctggatgctcctgtgatagaaaattcaggatttcagtgtcaggcttaagttaggcttacgcttaaaagcttgaaagtttattctttcattaggtaatattgttatgtaccca

SEQ ID NO: 13030 - DNA, 1108 bp, Homo sapiens
taggtgtgagccaccacgcccagcgctctaagccgtattctatcacggacctaaatattggcagtaggcaccaagaaaaaagaaataaaggaagattccactacttcagataattaaaaaaccttccacctaccataaaggacagtgtccaagactgctgagtgatacatttctagtttttaactattctgtggccctgagaacatttatgccttaatcctagctctgctcacttcttggggctattgattaatttgtttcagaaacaccataggaagtgaatattacctcttgctataggtgactttgtgaatacttcaaactgtaaaatcacaactttcaggaaatgtgataaatttagtgggaaaaaaatttaatgcacgccttgcaaaggcttctttgagggtagcacaggaggaagtgccaatatagtgtgtttgtcttttgctctgcaattctgcaggtactggatcatgatgtttcaaaggaagaaccagtcacctttcacttcttggccaaattttatcctgagaatgctgaagaggagctggttcaggagatcacacaacatttattcttcttacaggtacatcagtcaaggctaccccccagttctgagagaacttgcccaggagtggttgcagagttggcctcagagttgaccacaaacacctttgtattgcaaaaatattctacctctggaaggtcagcccctttggttctgtaatggaaaaaaggcttcagaacagaactatacttgagtgatgaaaattggtgtcagatgaaattgtgaaggtgtgatggtgaagaatggatacaagtagctacctaacttaaaacctccttgaaaatgggtcctattttcttctagctaacttaaaagtactcaatagtttcaaaggaaggctaaagagagagtcttataaagcagtagttcttccaaaagtttaaaatctgctctcattaagagaggactggccgggcatggtggctcaggcctgtaatcccagcactttaggaggccgaggcgggcagatcacaaggtcaggagatcgagaccatctggctaacatggtgaaaccccgtctctactaaatatacaaaaatt

SEQ ID NO: 13031 - DNA, 1191 bp, Homo sapiens
gctggagcagagtgtattcagcttggggaattgagctgtttgcagtggcgaggggcggatagaggagatgaggtaggggtgggcattgtggtttttaatcctcagtgttgttcatcttattcattagccacagaagcaggcccgccctcccttttgctcctgccgattttacagccctcactcatctgtcactgggtaataaaggcccgtttctcacctctcactctctttacctgtccctcgatggcttctgagcatgtgaaggcctgagatgagtgagcattgcttctgactgagctccgctgtcagaggtggtctctgtgatgtatcgcccaggcagggacaggggcactgccagatgagggttgcacctaggtctgagttatcatgcagctttctgagttgctcctccaatagaatggtgccttatttacacgccctctctctgtgtgactatctccctgggtgtagctttttaaaaatagctttactgttttgtaaaaatgatgcataattataaaagtggcaaacaataccaaatttacttcatgtgtaggttttttattttgctctattttttggtaggtaataaatctgtatcagatgactccggaaatgtgggaggagagaattactgcttggtacgcagagcaccgaggccgagccaggtgaggcccattcattgttggtttacattcctttatgggcttttttttttttttttgccttaaagaactgcaaaactaggacatgcttgttaaacaaaatgcagtactgaagtctataaaagaaaaggggagagctggggagctgggagtaacgttggtcttcagttttgtgtgtgtccttttctagtacgtatgacataaagtaggtatgtgtactgcctgtcaagatatatagacctgtactcactggtaattaagtttaagatttttttttttttttgagacagagtcttgctctgttgtccaggctgaaatgcagtggcgccatctcagctcactgcagccttgacctcctgggttcaagcaaacctcctgcctcagcacccccagtagctggcactacaggcacacgccaccatgcccagctagtttttctatttttagtagagatggggtttcaacatgttacccaggctggtcttcaactcctgggctcaaagcaatctgcccacctcggcctccc

SEQ ID NO: 13032 - DNA, 2425 bp, Homo sapiens
tgggtgccacccagccacttagggtctacagggtgggactccagacctagagcgtaagtatggatgttgtggccctgtgtcttcctagtgtgacccagccaggagcggaagcttcaggcgtttgtaaagtgaggtctggctctgcctcctccgttttttttttttttctgtttctgtttctgttttttttttgagatggagtctcgctctgtcgcccaggctggagtgcagtgtcacgatctcagctcactgcaacctccgcctcccaggtacaagagattctcctgcctcagcctcccgagtagctgggactacaggcgtgtgccaccatgcctggctaatttttgtatttttagtagagatggggtttcgccatgttagccagactggtctcgaactcctgacctcaggtgatcctcccaccccggcttcccaaagttctgggattataggcgtgagccaccatgcccggtctcttctcagtcttgaagcccatccctggatttccaccaggagttactttcctcctgacctgtaaatttgttctttaacaatggctgcaggtgggagcatatggtggtttataaaaacgctgtcgggctttgtttccttctttagctgccgtgtctacttctgaagtctgggaagtgccaagccacgcggcctcaagggagctggctggtgtttgagctgtggcagaagcacctggggctccagggagcaggctgggaactgcaggaccttgctcagccaggagcacttccccctccttgaggcaggaatactgaggtgcctccccacagatggagaaggtggagaggaggatgggcctcaggagcatctcaagccccagtagcaggagaaagaaagaaagagatgcctggttttcacagactggttcctgtggctgggatgactgcatccttttttttttttttttgagacggagtttttgcctttgtcgcccaggctggagtgcaatggcgtgatctcggctcaccgcaacctccgcctcccggattcaagcaattctcctgcctcagcctcccgagtagctgggattacaggcacgcacctccacgtccggctaattttgtatttttagtggagacggggtttctccatgtcggtcaggctggtctcgaactcccgacctcaggtgatctgcccacctcggcctcccaaagtgctgggattacaggcatgagccaccgcgcttggccagactgcgtcctttttaagcgaacattttagggcctgggagtttgtcaagtaaggaagtctcaagcccaaagagcagcgtcctgaccatggtggtttcattacgagcccttctgctggctctcaggcagaagccccacagcaccgggaccattcatgaggtcactgcccagctcatgatgtccgtgaggctgtccttttggccagtagccgtgtgcagctgtgtggcacagatggcttcgttcatcctgatcaaggccccacctcagccacagcagtccccccaacctgtgttgtccaccctattattcatgtacctgccaggccctgctagatagcaccccgtggcattacataacacttcatgagtggctgtgtcttgtaattttggggacaggtttctctctttccctctcttttttttgtcaaaagcccagagactgacaaccagctgcagtgtctaagtgttcctcactgacagggtggggcctcaccacccctggagggagcagcgttggcagggagacagcctggcccagtgaccctgggcccaagccagcccctccagggctttcagggaagcgccatccattttcaaagatgtcaaacgtcacttcttcctgtagggcccgagtcctgcctcctatcagggccagatcatagaaggctattttctattctggggaacgattataacttaaatgattgttttaataaaaattctaagctggaaaatacttgccttgggcttcctcagtttgcctgttgctcaggccattgaggcgtcaagaacacggctgggtggtggggctgtcttgtggttctgtggagaaacgagccctctgctgtctctcactgcttgggccttcacctctggccccttgtctttggtggcaaaagaatcacctccttccacagacctctaatgacaccttcgccagggaactgcctccctcttcctggggcacttggggggtggcaagggccctgcatggcgtcccagcactccatttcctctctgtggtccctgcccatccgtgatttcagaccagagaactagggagctgggctgggtgatccttccagacatttctgttttcggcgttccaggctctgggggtgcatgcagagcccctggggcccaggcgctgtctgcagagtaaatgaggcgcagccactgtcagggctatgtgacatttgcact

SEQ ID NO: 13033 - DNA, 1156 bp, Homo sapiens
cagaccactgtggtgacagactttctttataaacatttggaagttttctcccccatcttcttaagaagcaggggggcaggtggaggagagtgaggggagagctgcccggtgcagacccaggacgagggctgcacttggtgtggccgtgtcctgagcctcagtgaggctgggcagatggtctcggagcctccatggggcgtagcaggaaccgggcttggcttcctattgtgactgatgagaaaagtgaccacgtgggggtcagtcgggggcaaggggctcagccccactggactctgggctgcagaggccaccccccaggtgggggtgcccgcagggatggaggcagctcctgaactggtggccagcccacggggtactggaagacagtggttctgatgggttcagccctagagagagagagagaagcggggagaataagagtgcactacagcccaggcttatgccacccccagcccacctgcctcaccaccctggctgtggggagggtcagctgcctgcatgacttttctggaaggcagagcctcgaaaataggcagaccgtttgagccagcgacctcacctctaggaactgagcccaaggaaatagcggggttgcaggcagacattgagctgcgagacaatgggaataaccttcgtgtccacctgtgggggactgattcaatacatatgcacgtccacagcagagaatgccatgcggcctgtgtaagaattaaggcagatttatatgcactgatgaggaaagacatactgtgtgatagggagaaaaagcagcttataaaataatgtatatagcatgatactatttttgtttaaaaatatataaaatatataaatgcataaaaaaatcctggaagacacagcaaaatgttaacagtggtcctatctgagtggtgccattatgggtgacttttttactcctttatatttctcaaaagttttacgagcacacaagcctttgaaatcagaaaaaaacattgtctaaatttttttttaaagcctaatttctcatgctactcactgtcctcctcctcaacgtccaccccgagccacctcccctggaacttggggtccatgtaagtacttgccctaggagaggcatcctccgtgcccagcccggggcaccctgccaaggccc

SEQ ID NO: 13034 - DNA, 1203 bp, Homo sapiens
agttggactgtgaagaaacatggcggccgcgacgttgacttcgaaattgtactccctgctgttccgcaggacctccaccttcgccctcaccatcatcgtgggcgtcatgttcttcgagcgcgccttcgatcaaggcgcggacgctatctacgaccacatcaacgagggggtgagggcctgtgccatccctgaccttggacccgcctgaggggtgacagtggagtagaggtgggatgggactcagtatacttttaccaggaagggggtaaggggtaaaccgtcggcgtcttctgtctcgagtccgccgtctgtccccttggcttgatgtgaattctaaaacgttaagcgaggttaatatatttcattttgcaggggttgtaagtattgctgtgtgccaccctacatacccacttgcccattatcagaagcaaaaactaaaggctagtgagagcaaaggacttactagctgcacaggaagccaggggcaagtcagggccagaaacgggacccctgtctctcagagtttcaagggcagatttgagcaggcgacggtcgtgaaaaggacgttagacaccttagacgccgtggctgaagtttcagacggcgcttctggtccccaaggcttcccacgtagacagttggtattaatggttgagagtgggggctatgaaatcagaaagccttggataggaacactggtccttgtcacttaactgtggcattaagttgagcaagtttcttctctgaactccgttttaactgtgagatggagatattaatagtaacctgagcacgattgtgaggattacatgagatgcaggcagggtgccacatgcctggtaggtggtaccactgaaaaataatcattgcttacattcctcaggagaaagtggaagcatgaggtaggaatcgcaacacatttttgacttttatgtatcatgcactgtgctaggtgcagtgcatgctttatatcgctaaattatgactgtgctggagtaggccttatacatatagccctgttccaccactcacttgtgtttttaatttgagactgtctgactctgcagcccgggaaggcactgtccactagtgctatgctgcctgtgaccagtgcaacttcctgccccatatgaaagcattgctactgtcccatctcttgcaagtggttctgttaaccactcccattgatctggagagacatcc

SEQ ID NO: 13035 - DNA, 1220 bp, Homo sapiens
gtatttcaataaaatatgtgtatttcaataaaatgttagatcaggaggctctctttaaatgttattttatctatatcaaacacatttaaaccatcaaagcccagacataccagcatatgttgtggcatgccccagttcatcattttgtatgcttaaatcaaaatacttagcacttcagaaaatgatttaccatcaagttttaaatagctacctgatatcatatattctcttttaatttcacagcacattgagtaaaatgtgtctgtaggttttgataccgtaaacatcattactttaattcacacattcactgaatatcaagttccagttcctgtggtaaagaatctctgtagtagagtttatgtgtagcatttaaggtatacattgctcctattctgtgcttttcccaaattattatatatttacagacatagttctttgaagcttagataaattataaacaagtgttcaagtggaattcatgaacgtttaaaagtttgtttgtgtgtgtgtgtgtgtgtgtgtgtgtgtgtgtgtgtgtatgtgtttgtaatttaatagactgcttctcaatctgctgcttctaaaatccctgtaagtagtatgaaaatcctaggcggttgctgcacctgtgcttggagcaaattggttttgagtgttagatgctcaccttgcaaatcagcagaatgtttcccctctgcatgagtccttttcctcttactggaccaaattccagttgtatgctactaggagaacaatttgtagggtaaggaaaaagccctgcagtttatacataagcagatggaattgtgaccttcaaaaaaatgtagaacaagtttctgttagaaataatttgtaaaatcaacactagtttttttttctttcactttgttttttggagacggagtttcactctgttgtccaggctggagtgcgttagcacagtctcggctcactgcagccttagtctcctgggctcaagttattctcccacctcagcctcccaaagtgttggaactacaggcgttagccaccacaccctgctgcgaaggaggttattgttaacatttaatgcactttgatctagcattcatataacagtgggagcctctgaaagcagtgctggaggcttgtaaattgtcaaaggtgaacaatagagtttgaatcttaaaccagtgacagtcttctgctgattagtgggtttttggtggttgtttttt

SEQ ID NO: 13036 - DNA, 1144 bp, Homo sapiens
ggaaaataaggagtctgtaaaaggatcttggcatgctagatattaccagagtgttctgtggagaagcagctctacctgaaataaccatctgttgggttaaagatgaaagaaaaatcataaagtaccctaaaatatatgcaagtattaattaaacttggggtatagaaggattttacagacttgactttgtaacaccagaggcagaaatgttaagagaaatttaggggaaaagtgtggtttttatatagtgaacacaagaggctaaaaatacacattcaagaaaggcttagataaacgcagtcagtaccattttagtgatcatggaatggagttcagggaattgggaaatttccctaagtgtgtgcctcatcagggatagagccttccaccaaagggcaaggccgggtgggctttctgggaggctgttagaggggattgctttctgtgacaccaggcttaggactgtcacagtctggatagtctagcacaaatggtctctcctggatgcttccctgcagggtttccaggtcctcgtggaaatggagtggctggattttggccataaatttgctgaccggtgtggtcatggggagaactcggatgatctgaatgaacgttgcccagtgtttctgcagtggcttgactgtgttcatcagcttcagaggcaatttccttgctcttttgagttcaatgaagcattccttgtaagtttcttcattttggggactttctcaatttgaaggagggtcagtacaaatgttagtgggccagttctcacatgaaactgtgctgcctcttcagaatttaatagaggtgatttttttcctgtttctgcttttttttttagtaaataattttgctattttcaaaaagagaaaatccaggtataccaggtttgcatgaagtccttgtgttgttttaaacttagtttttttttaaagggatggtagaaaccctaaatagcagttagaaatagaagcaatcagaatgtctggaccatactccctccagtctgtctaccagacccccatgactgtctcagactctgcaccctctcctttgatggagggtacactatccctgccctctttcagcccctctgtccatttgtataccagctctcatctcctctcatctgctgcac

SEQ ID NO: 13037 - DNA, 2861 bp, Homo sapiens
ccctccgcatacctgctggccaaaactaacattgttctgtttcttctcatctcaaggaattgtgggaacgtattctgctccagttgttgtaaccagaaggttccagttcccagccagcagctctttgaacccagtcgagtatgcaagtcttgctatagcagcctacatcccacaagctccagcattgaccttgaactggataagcccattgctgccacttccaactgaagctcagtgacctgggtgggcagtggccaagctgctgttcctatgacaggcccactcaacctgggcagaccgagaggcccgtgcactttggaatgggagcgtggaaccacctgtacagagtgacagatttgggatgcaccactggattgtagattgatttttctttcctgtccccctactccctccctaccttttccatcctcctcctctgccttcaaaaaaggaaactttcccttggttgtcttaattttttttttttttgatggaagaccaagggttgccaggcccactgtaactgccgagctgcctgctgtcacgtgacactgagggatggcttgtttcttccgggtgggaggatggtggtcagagccaggagtatggagatctgagaccgtgagcagggaagaaagccagtgctaacatgcaaccattcctcacgccaccgccacatcagagctggttgggaaccctttgctgctggggaggctggaagcatattccccaagagcactgccctgggcatcatctccctcctgcgaggagctgagccagtcccctcacagatggataaatgaggctgatgtttggagggagaggcacacggtaaatggcatccccttaggcgcctctttgggaaaggaaagtggatgctcctttgaggcaggcgaggggctgggagtgggtagccgtcatgttgtcccccgtgggatcccatttttaacttgacccagattgtcttgggctccttttactttcagggggctgctttcctgggccaggctgtgtagcacttcccaccctcaggcatgagtacagactggtcaaaatgtttatgcagtcaaggccaaagcctgccctgagcccagacacacctgggtccccattctggggcctggtcccctaaacaatctcttcctcagccagcacagggaaatccagactcagggttccagaaatcccccgttcccaaaccaaaccaatcatggatcttccctttaaggggtagaatcagcctttagagttacaagcccctggaaaagggagcaggtcccatacaatcagcctttctcctcttctcttcttgggacaggaataactgctgagcagtccccctttgccactcctggctgtctgagtgggcacttgtctggctgctggccagcagtgaagggccacttggtgacttcgtagggttccttagagaagtgacatggccttgaggagattcagggcacctttcctcagtgagctttgatatggtccaaaaacagccttaaatcaagaatatttgtggaggtaggtgtggggaaggttggagaagagttaggtttgtgctttgtaatcttggcatccatgttttgtgcctgccctccctcttggggaggccatgcttgactctgctgaaagctgctaactggtgacagggtggatcatggtgaggactaggggtaaggtcagggaatgcttaagctctggccctgccctgtattcctcttccccttggtagcagttccctgaccaagggcaaggtgtgtctcaggaaggtggttctgtgcatgcctgggtgtggttaaggcgtggcccagaaggcttccctggtgctctcagtccaggcaaagcccagagcatctgagcacgtctctgacttccagtggcaacacagtttgaacgtggtgaaacagggtgtagttcttttccacattctgtgtcatctagtcgtgcaggtagggaaaaagttggtctaattgaagattgtgcatttcctagtgacaggtgccaagaggttatgatacgggtttcttgggtctgatgtacagtgtgaataaatgcttgcagctcttagctcttttttgatcgatgaagcacttttttattaatattttcctttgttaaaggaggaaccgtaactctccatagctgtacatataacccttttctcctaaagaggagtcagtcagtgctcctatatttttcattttttgtcaaagcaagaagtaaatactttagaattgttaaatatataaataaagcaaataaagttgagtgttccacatggtagcatttgctaacacttcctaattctttgccctgtggtttatcccctcttcgtcccttttccctctcacacagaagtgtttgagggcctgctgggaaactgacctttggcaaaggaaagctacagatagccttccgactctagaccttggcaaggagcctcaccatgatgttcaagcactgaacgcatttcctcagtgattttgctcctaaaatctcccaggctaaaagagggcaaagcagtcagggatctgacctggcagctattcctccttctctgaagagttcccatcagtagtcattacaactacctctcgcctcaaggctccatttttagctgctgctctgatttcagggcagccagtactctggccccttcagtcggggagtggaaggagatgtggggtgggggtgagaaaatgcttctgcctgttgttcttgaaggatagactatgggtgggcagagagaactgggggcagaaatggaattagatgtgattgggttatgcagtcaactagaggtctccttcccgccctctctccacacagagaggaacctctgctccttagctcttaca

SEQ ID NO: 13038 - DNA, 1224 bp, Homo sapiens
tcaagaaatgtttttgagcctttgctatattgttacactctgagggaataacaaggattaataatatatattgagtctctaggtgatttacaatgtattttctcctctgaatatatttttgaacaaataaataatcttataattttcattgagtgggtggaaaaattcatccagagaccttatgccaaaattatagataaaaatgtttattaaacttatttcccaatgagtatggtcaaattttaattatatagttctcctttggaaaattaacaataggtacttttttcaactcaaattcattttatcgtttagatagagcctgatagaattatcttagcattcattcttcctttgctcttcaaaatgtagcttggtaaatttctctctgaactgaacaatcttgaaaacagtttatacttaactgtctttgattttaattttttgtttgcttttagactttttcagtttcatttttgggcagagtaagagaggaagcattatatttggcaaggtctctaattaattaattattttttaataggttggacttgttgaaataatcctgatacattcctacaatggccactgctcagctttctcactgcatcacaatacacaaggcttctaaggtatttgttaagaattaaaagaaaatcaatgaccatttagtgagttagttcagaattatgattttaatcttttgtgtgtgtgtttttaagcagcagttttatcagttaattggcacataatattctgggagagtatgtgtacattttaactgcctaatagaccaaggaccagaaaattaaaataaatttctacaaagttacttactgggtgcttgtttcatgtttatgtaatatatttaggtcttctagagtaaaagaaatcagaaacaaaaagatgtttaaagagaatggttcttggttagacattcacttcctaaagtgttaggaaacttgtgttgcacaccatggtgtaattataagaacagaaggggagagcactgagagaaacttggatgctaggaggtctaggggagcatcccagggccaggcatatagtttagtttgtctcatgacattcattaatgcatcctttgtttattcattgagactaaatattatgtagtataatattcattatactgtgtaactcactgataaaatacaaaaatatgatcttcatcttccaaaagtttataatctggttaggagttaa

SEQ ID NO: 13039 - DNA, 1509 bp, Homo sapiens
tcttggctcatggcagccttgaccttctaggcccaagcgatcctccaacctcagcttcccaagtagctgggactgcagttgttcgccacaatgcccagttattttttaaaatttttgcaaatgtggggttatgttgccccggctggtctcaaaggatccccttgcctcagcctcccaaaatgctgggattacaggtgtgagccactgcacttggccaacactcacctttaatagattgcctcataaacttaactataagtagtgtccatttctagccacaatatacttttagatactttattttagaaaaaaatcgttgtaggatgaaatcctaagtaagcatgaactctaccttggccaaatatttattcattcagcaaatattaattgggttccttttatgtgcctagcactgttcaaggtataaaaacacaggggtgaatgggataggcaagatccctgctctctagaagcctacgttcttatgaggtaggataaacaataaataaataaataaaaattagtacaaacaatttcagatagacatagtgctatgaagaaaattttttaaacaggtgatgtactagagagtgctgaagtggagaatgaagaaggagggattggatggctgtgttagattgggcagttcctaggaggcatccctgagaggctactgtttgagctgagatgaataaccagaaggagtcagcccatgcaagtctgtgaagggcaatggcatgtgacaggccaaataacaccacagttaacatcacaggcattggcgtcaaatcgcagttctaccacttactagctacatcaataatgagactaatgtctacttcagagtgttggctacacaaggagatgaacttgtgaaatatttagggcagtgcctgaatattattattatcattaaccggagaccacatgttccagaatatagctgtgcaaaggccctaagacaggaaggaatcttgggtgtttgagcatagaaaaggtgccatgagcctggagcttagctgagtgcaagggaaagtggccagagataaggttagagaggcagacaggggacagatgggtagggccttgcaaatcaagataacttttggattttattttaagggtggtgagaagctaatgggggtttttaagaaaatgagtgacatggtctgatttgtattttcaaaaactacttttggctgcagaacagagaatgagcatcagatggacttgcaatttgctttagagatagacctgaaaagtcttgccaatgggttggaatgtggagggagaaggagaggctgcatatgttgctgctgctttggcctatgtgactatatttagtatgattcatagaaaccactgatgagcagttcaatggttcatctttattaggcaacacattagtctgaaaagtgttatatgaggtgttaagaatagtgcctgctgtaaatatactttcctagataagccagagtcagactgaagttaattaaggattagcatctt

SEQ ID NO: 13040 - DNA, 1599 bp, Homo sapiens
aaggaaagcaggaaaaatagttagatagccactgtagtaatcaatgcaagagtgaggaagggatacttttgcgagataatcagacggtagaaagtcccagagctggtgattgattttatgcttgagagttgtagaaatgtctttacgcttatctcacaaatgagctaactgacctagagtgtgtctaaatgacttgaccaaggtcattcagctagttatcagcagagctgatattagatgccaggtcacctaattccaaattcgttgttcttactgttgtggtatatgatttttttcaaatcaaatttttaaaaagatcgtattttaaatgcttttagggaatttgctacttaagaaattctttgtatatacattgcaaaaagtaccatcgctcccctaatttacattctaaaaaagtctcaaaatatactaatgtttaatttatatttactcacatagtcaaaagttttgttccttttgggatagattgccactattgtatatgatcaaaaagtatgcttttttttctgtgtagtcatagcagcagtacaagctttgaaagtggaacaaacaatgaagatattaagaaagccagtgttctactgatccgtaaattgtatatactgatgcaggaccttgagccacttcctaataatgttgtacttactatgaaactccactactataatgcaggtaggtagagaactttaggcaaattcctccttaagtgctgagctaatattttctataagtaaaaggattttgcaggcatctgaaagagaagtctgttgctacacatgaaagattaatcggatttgttgtattgaaactcagttttcatggctttttgcccttttcatttcgcagtgaccccacatgattaccaacccctcggttttaaagaaggggtaaattcacacttcctgctgtttgacaaggagcctatcaacgtgcaagtgggatttgtctccactggctttcatagcatgaaagtaaaagtcatgacagaggctacaaaagtgattgatttggagaacaatctgtttcgggagaacagcactactgagatcgcccatcagggtctagactgtgatgaggaagaagaatgcaatgaccatgtaaggcaaagctttagagattttctatcgtgtcagttaaacacaattgatatttttcagtttctacccagggcatgcacgtggagtgtgccagctataaaaactgaaacaaaactagtctctgacatcaaggagtttttaatctaaaaaagtttaatcttctaaaaggaaatatactttatcagatgaaattgtccataactaggaggaaaaagattttctaatatatttattttattaaagatatcataaatttagaaaatttgaggttttctttcctttatttgtaaatgacataattttagggttgaaaaatattctaggtatttattcatactcattggaagtataaatcagttcttgatactgagataattggatgggaggagttggggaagataaattttatggataaacccgagtcagcgtgaaaacaaataatagttaacttctggttatgtggaggaagacaagctttggg

SEQ ID NO: 13041 - DNA, 1098 bp, Homo sapiens
ctgttcgcctaccagggagtgagaggttggaggtaggtgtggctgtccattgaggtcactgtccacctcctttgtttggcactacctgcactttcccgcttcctggcttcccctactggaactgttccctccacctgagttgcccacctctctcccccgctgcctttgaagtccttcaagcccagcacaaatgccatgttttataggaagccgtgtgagaccacctctttcttccctctgctccccagcaaactcctcatccttccatggggcagaagaccatggtggaaagagtgtgtgctctggactcagacagacccgggtttgcatcccaactctgctaatgactagctgtttgaccttgggcatgttacttagcctctctgagctttaattccttcatctgtagaatggggacaatacttctacgggttgtgagtgaggagtaaataagctatggtgccaagatcagcgctgagcgacaggaaatgcttggtaaactgacagcttttactgcagtccgtatcagagtgcctactatcacgattagctgggaacacatctgcctgcccgcagactggtgtgtgggagcccttgttgtggggcaggggcagtgtctcactcccttcccacttcctgccctgcaacctggcaccccctgacaagacagtgctccaggcagcatgagtgcccagggagtgtctgcagagttgaactatgttaaagagaagtccagttggccgggcgtgggggttcatgcctgtaatcccagcactttagaccgagatgggcggatcaggacgaggtcaggagatcaagactaccctggctaacacggtgaaaccctgtctctactaaaaatacaaaaaatagccaggcgtgttggcaggcccctgtagtcccagctacttgggaggctgagtcaggagaatggtgtgaacccgggaggcagagcttacagggagtggagatcgcccaccgcactccagcctgggcgagagtgcgagactctatctcaaaaaaaaaaaaaaaaaaaaaaaagaaacaaagaaagaggcgtccagcaaagatctcagtggagagtcctaggcagagggc

SEQ ID NO: 13042 - DNA, 1433 bp, Homo sapiens
gcagtgagctatgattgtgccactgtgctccaggctgagcaacagagaaagaccctgtccctttaaaaaaattaaaaatatattgtcagatgaccccggaaagaaggttcttcctgttgtacccctttccaccagctcctggtgaaggttctagtggcatccagctttcccaggtggtgtagggaaatggggcagttgccaaggctccttccagctctgggagtttaggattctcttatctcgagatttgtgggcccatgaaataatgttgttaaagcagggctagcgcatgttttctcaccatgaagtgggtcaggtagatttttttcctgtgagaatttgtgaccttttcttgaagctctgcttttaagggatatagctttgagttctgtgccccccaccctcccttctacacatacctcagcctgaccttcgccttccccctcacaggccaacaagctggcggagaagcggaaagcccacgatgaggcggtgaggtctgagaagaaggccaagaaggcaaggccggagtgagtgcctgcggcccctcacagggctgaggccagcccctagcagctggatgtggcagaggcaggccagaggacctaagtgtgatggaccagagtcacttctcctcctcctttctccagccagccctgacccctcatgctctctggctgggccagtgggcagccctcgcttcccttggatggagctgccctgctggtgcctggtcagagaagaggcctctgtgcccagcctgattctctgctcccaggagccagtgacatgaggtgcagaggcccacccagccccctacctactgcccccattcatcctggctttccacagccccctcccacacagttggacccgtgattctcagggtgctgtgatggggtgagggtagggggagcatttgttattaaatgactggacttttgtgccaattgcattttgtgtccatgagccttcctagggttggaggaggcctacctagcactctatgctgcaggctgggccagccctgggtatttactgagacagagctgggcactgctcagagctctctggatgtccaaggacccctccaggtccagggatgccaaaaggtaggtgcagaggttctggacctgggcttcacagcctgtctgaccatggttcacattctaacccaggcattttccctctgcacctgcttcctcatgtgtcagttactggtagagattctgttctttgaaagggatgtgttgagggttctgtgataactttatagtctcagaccttatggacttggtaatatcaggtgtgtggtaagtacttggtaaacaccaactgatttatatcacttcctgctggactcggcccagaaggtaaaagccagaaccggaaggatctgtgggtctgcggtgaggtcctgccctcagcttgcc

SEQ ID NO: 13043 - DNA, 1111 bp, Homo sapiens
aggggaagcagcccccaccccgctccctgctccaccagggcagcttcggtttcccattttccattttggacctccctgtagagtgtctgtgcactaaagtttccaccttcaaagagagtcatagagcccctgactccgtctaccgtcgtgcaccacaaaatccgcacgtgggtcaaggctgggtctttggtgagcattcggtgtcttgaggacccccatcgggacttctctggtcctcagagcctagtgggcgcatcctggttaagtggttcctcctaggggctgtggtcagctgtggggaagctgctcctgccaggtcaggaggtggcagtggtgaggcctggcttgaggaacggggcatctggggtgggataaggagatcagggtcccccttggcacccacgctgaacaggccccatgtgctgcctcactggccatgcaggtatcccacgttcatcgatgccctgcgggacctggacgatgccctctccatgtgcttcctgttttccaccttcccgcggactggcaagtgccacgtgcagaccattcagctgtgccgccggctcactgtggagttcatgcactacattatcgctgcccgtgccctgcgcaaggtgagcctgggactgcccggctggcatcccaccctgccccctctcctgccaccccatggtcttcacccagatgtctcctcctctcccctaggtcttcctgtccatcaaaggcatttactaccaggccgaggtactggggcagcccatcgtgtggatcactccctatgccttctcccatgacgtgagtgtgcctgtcgggaggggacgggcttgtgctgcctcctagacagatatggatgtggaggaagggggattttgctgtccatggagtttagcaagtgctgggttcccaactgttgatgaggggtgaggcgcggcagaatgtgccacacagcatcctcattaagagcgggagcctaagctagccctatggcagcacctgccagctgcgtgcccttggacgtgttcctttcacctctctgtgcctcagttaacagtgtctacacccttaacagtgcctggtgcttggccttttagggccgaataaacagtgagaa

SEQ ID NO: 13044 - DNA, 1231 bp, Homo sapiens
cttccttttttctattttagccgcataaccgcgaatgaaccaaagagaacccgaagccggtgggaactcagcgcagtctcaccctgcccctcgggaaccgcttctcagcagcggcagccgaagtctgacgacgcttagcaaccgttaccttgacaacgcaatcctatcgcgcaccatggagtgcggcgcccctctgcatcccagaaggcaccgcgctgtccctaagccttccgcccctctccgtcccaacatgcaacgaggctcacagtcaatgaatcgtcatcagggtgattacagaaaagcctgtatatccacgtttgttttaacacttaaagtgtttgtaaccattgtgagcgggaaagatctggaaagagtgttctcagtgatttttttcagactatagttttaaatcttgaggaggaaatccccatctttccctggacttgtacaggcatctcattgggcagcccgcacaaacagacagcgtggggtggggagggtcctcggggtccttggcagggcacgtgcgggaggaagtggagctccctgtacgcgcggccctagtcggctcctcaacgtggagcgatgggaggccttgagaagaagaaggtgattgggaaagacggtggggattcccgaggggtggggtgcgggggcggcagagcatggggtcgactcttttcccgggctccgtctcgtggagactggaaagacgggatcgacgtgaccgtaatcagctgcgagaaggggtccgagaatggacaaggatggcagtattcgtttagtgaaatccgagaacgaactccagagttctttctgtggagagggctgtgaaagagagttgaacttaccaagcgtagcttcattccaaaagcaggccgagccgtgggaccactatttaccgaaagggtgataaacattacgtagagctcaccgttactgcaccgttacattagttggttagtgttgtcttggaagttctcttcgaggcataacatttcggctgaaatgggaaagatcagaacgtcttggatgggttctggggcatgggagtgcttagcgagcaggcctgacaagggaaaccaagtgccaagatcagtaggcagggaaggcttgctgtgtgtaaggagttggaaggacattaggatgactcgcatgtaaaccaagaaaagaatggcatctgataagattggggttggacacgtactgtatcgtgcaaggcctgtaagct

SEQ ID NO: 13045 - DNA, 1203 bp, Homo sapiens
tcatggcctcaggaaccctgtgggaagctgagttcagagtctttgagcaggctttagggaggttccagcttcccaccaccaagccccaggtggattcttacagactctagcctcagggtggggggtctggaagatgaggttgcggggtgcgatattctgcccaattcgcccctccttgctcaatctgtttctgcaggtattgctgactacagacccaaggatggagaaaccattgagctgaggctggttagctggtagcccctgagctccctcatcccagcagcctcgcacactccctaggcttctaccctccctcctgatgtccctggaacaggaactcgcctgaccctgctgccacctcctgtgcactttgagcaatgccccctgggatcaccccagccacaagcccttcgagggccctataccatggcccaccttggagcagagagccaagcatcttccctgggaagtctttctggccaagtctggccagcctggccctgcaggtctcccatgaaggccaccccatggtctgatgggcatgaagcatctcagactccttggcaaaaaacggagtccgcaggccgcaggtgttgtgaagaccactcgttctgtggttggggtcctgcaagaaggcctcctcagcccgggggctatggccctgaccccagctctccactctgctgttagagtggcagctccgagctggttgtggcacagtagctggggagacctcagcagggctgctcagtgcctgcctctgacaaaattaaagcattgatggcctgtggacctgctacagtggcctggtgcctcatactcctcaggtgcaggggcagggacaagagaagggggaagtaaccccatcagggaggagtggagggtgcctgagccgccatgtgggcattgggggagtgatgggaatgccagcagtgatgacattgactactgactgagcacccactactatgactgagcactcactcgctagatactatcttgaactgctctgtgaggttgttgatattttcatttttatctgtgctttacaaatcaggaaactgggaggccgggcatggtggctcacgcctgtaatcccagcactttaggaggccaaggcaggtggatcacaaggtcaggagtttgagatcagcctggccaacatggtgaaactccatctttactaaaaatacaaaaaattag

SEQ ID NO: 13046 - DNA, 2379 bp, Homo sapiens
gcctcctgtgaggaggctcccacagttgtctgagacagtggtggcctggaccttgggcagtgacagagaagggagagaagtgggcatatttgtagtatctgagggaaatatacatctaagacaattgggaacatggggtagaggcagggtgggcgtaggaaatctgggcatcatctgtgcacaatagatgagggaggggagagtgattaagacaggacagaagcctgacatccagggcggggtgggaggtcagggagaggactctgggctccatcccaggagctgagagaagggtggaaaggtgagccccccaatcactttctggcccccagttgatccctaccctgctctattccaggacatagacatcaacacagatgatgagctggacgcctacattgaggacctcatcaccaagggggactgaaggcaggagagagagcagctcccctgcccacctgcccctcaaccctgtagctgcagggggaggggacttcattcatgggttggtggtcgcaccttggtttgacttacacgggacatttgtgtttttggaggaaaagataccctgattctttgaatcttccttaagtttataaatatttattttttaaaagaagatgctgtgcctgtgagaccatacttttttttttttttttttttttttttttttttttttggtgactgcaaaggacagagaacctttccactttggccatactgggttgctaagccggagccatttcagctcctggctcctcaagataacggcgagtccagtgccatcttggagaagctccaggggcagggctgacttttctcctacaggaggaacaatgtggggatctgagggatgggagggagacttccccctagagtggtggtcctgctgggggctcatatccagggacccaaaaggggggctgtgtaggaggttccacattggaggggctctctctctcgcagctgtcagagttggtcctggctgtggcgtccaaacagcttgagggaaaaagatcctgtctaaccacctcatctactactcaagttctttctgaaggagggatttcttcagttaaccatggacagtgaggtttctcaccacagtaacttgagtccaggttgagggggagacagatctgtggtaaatctctgacttgggcagcacactgagtgtggaaccccacaggactccttagggaaggagcttgtgtgtgaaagaacccctggggctgagctggtgacctccatgtgtgggtgcagcagggccttggatggtgccaattgatctggacagcctgttgatgcttttctacttccacccttcggcctggccccactgagccccatcaaggtgcctgaagagggggccagtgagatcccgtggccacagggactccagaggcatctctgcaggaagcacaccatgccttccctccatgttccatcacggcgccacaatctgtgtcccttaacttctcagggtcaaagacaaaggcaagcgttgctgaattttctctttaatggccattggaagagtctggttcagtttttcccaactctcttcccactcgtatttggggcctctgggttttctgaaggcacaaggactgtgactttgtaccactaacctgtggttcaaacctgggtgtgtttctggcatctccctaacccagatcagcaatggccaccctgctcctctgaggtcagcagaagactgggaagcagaggtgagggatgcaggccacactggaatgggaagtcttttccccactggatgtgcctgtctggtgggttttggaccttcccagactacatctctaggagaggcctgtttggagtagtacactgagagaccctggcctcttctgctggaagactgtccaagtcttggggtttcttgagctggtgattcctctgccatcctgctctctctcttcatctcaggcagcatggggtccacttttgtccccaaacctaatgttttaatccaaatgcaaattggttccacatttttactggagggtaatcagtttttaaaattcacacacatgtaatcgaaacgcaatactataaagttctactggtgagactcctgaactcagtctgttttcttagtaaaatccagcaccttccttctcttcattctttgtatcactgtggctttaaactgtcttcaagttattcctcctcatcacctccattgttttatcttcacccccttaacatccacagaaacagactggagttcttgaatgttttagcttcaacttctacatgtgcccactttgctttgttaatgctaccacagctgtgctgaatgaagcctgtttcccaggcagagatcctgccactctggatgggaagataaaatgcagg

SEQ ID NO: 13047 - DNA, 1115 bp, Homo sapiens
caaacactataaaaatgtttgaacaattggatttcaaacattttcgttttgtggagtggtgctcaccaagtggtacagccctaagcaagtgaacacaaacacatttaagtgtattttgtctgattagatgttagccagttatgctatttcattcaaatgtctgaaaaaatcaattgactattcccttttcctaaagggcagagacagataatctcacttccagagaaatgacttggagaaaaaaaagtgttggtctttttgctcttttgtaattaaatccggatgtacctcaaaagacttaagactgtggtgataagatgctttcctcagcagaaaggagggaaaaaaaacaactggaactcaaagcttgaaattctgtggcaaaacatgagatgtccaggattggaggttgaaaagatttcactacagtgttctgcaatagttggagcagataactttcagtgtagccacagccatggactccagatttccagattttcaagacctggacctggaacccgaaagagcttgtcacgatgcggcaggaacactggaggtagatttttttttatttttgaattttgggactgttgaccttgctgtgagaaaagagacaacgactgagcaagcactaccaccagcactgttactgggaattagaagacctgagtttctgtccagaccctcagtgcaaactgaggatgctccatccaaagtgaattatggtacttgccattttccaaaatgccttatcctttaccatctctgcacttttgttcatactctcattctactttggaactgctgctctgtggcttttcatctgtcaaaactgccattttctcagtatccaactcttatgccctcttttccatgagtctcctaactagccagaatagagctttaaagttttatgacatttcgttatgtatcctctatctgtatacaaaatcctgtaaaatagttacttgcctgcatttactgtctttgcagatagcagactccttgaaagcagggtccttgtttagtgcatctttgcccacatacaccacaacatatcaagatgcatttattaggaaggaggagtttagagagcaggctatcagaataaccac

SEQ ID NO: 13048 - DNA, 1089 bp, Homo sapiens
ataggaaaggaatggaagaaagttaattcaccccaaattggataaattccatgacatttagcaatatacttctgtatccctagaattgtatcataactttagttcaaggacattgcatctcaggtgggttaaggaggttgggaaggggagaaaagggatgaggagatattttcttgagatttatctccttgagataatgcttgagaagtcatccagccatggacttcttggagtaatacttacaaagaattggatgcattttgcatccttaggcaaaaaccccagtgctgttacaactgaaaatcattagccttgttctctgatagatacttacaagcccaactgcaggcaatcaaaatttatagcagatgagttctaactccatcaacctgtaatgtggtccatcttagggaaagaataggaaaacaccttggtttaccacaggctttgcttacagtttctgctttctgtgacctattttttgtatttcagcattttgtgaccgacttattcttagatcattggttttccaaaggctttgtggccatgaagccctttgagtgaaaactgtgcagaagcccagagtaaaagtgaagctgctctggatgaagtagtgaagcaagagtaggggcctgaatcctgctacaactatcttcctttaccaccgtggtgacacctaaggggacttccttacaacaccttgaactcttccgaacacagtttgaaaaccactgccccagacagcaatatgtttgacctgaatggcattccaatcttttctgtacctccactcagcacagttcatgttcagtagatgctgaacattcttagaaatactgtgtgtgaacttagaaaagtgcaagaagacaggcatgtctttgaccccaggaatgatcatttgctgaagatggtgtcaagtgaacctagattaacagccctccactccagatggatatccagtgattcctagaatgggatatagccagagaacaattctatgcaccctacactgacagactcccttaagcaacaccagatgctctactggtacttgaagtacatgactttgaagtcttgaccctccatgaa

SEQ ID NO: 13049 - DNA, 1194 bp, Homo sapiens
agataaagattggccagtgatgaagcccatctgggtgcaaaggccgagctgagaggcttctaccaactggagtgtgccagtgagggtgagcagaaggtggtctccagggagaacatgggcagggtttggagccagcacctccccagggttggaggaagcagacccaggacctgcctgactgggatggggctctcttctgccatctccgcctccacctgcctagctctgctcccccgccccgagagatgcctccaggcttgggtagatgaagccaggggcttcctgccttcctggaaggcttttccctgtctggagtttatgaaagaccagcaggcaatgcggcaataaaaaagaccttggggtagaggggcgccacgagaggcgggtctggcgctgacatccaaccccgtgccccctccctgcaggatgctggtggactgtgtgcccctggtggaggtggacgacatgatgatcatgggcaagaagcctgaccccaagtgtgtcttcacctatgtgcagtcgctctacaaccacctgcgacgccacgaactgcgcctgcgcggcaagaatgtctagcctgcccgcccgcatggccagccagtggcaagctgccgcccccactctccgggcaccgtctcctgcctgtgcgtccgcccaccgctgccctgtctgttgcgacaccctcccccccacatacacacgcagcgttttgataaattattggttttcaacgatcctgactcctctctgcgtctcctgggggtggggagggggtttgaaccgaaggcagctccgcaaggtctccaactccagcagggatcctcagaggttcttcttccgacctcccaccccacccgcccgcagcaacgaaggagtcgagcctcagttaaggcaggagggaatttagtggagctggggaaggaagaaagtggggttgggagaacctccccaaccccatccctgctggcccggggacgggcatcggctctcagcaagagaagtattcccgggatgctgagcgcttcattctgtctccaggactcaggcaggtaggtcccagctccgccgcgcccccggacctacaggtcagcgtggtccgaagtttcctctgggggcttcgcgggcgcccacacgtactcggggggcacctgcgcgtcgggcgccgccttgcggtagaagccgagctcctgcact

SEQ ID NO: 13050 - DNA, 1767 bp, Homo sapiens
ccagttggcgatgacccctgaatatcgccaccgctgtaaacactctataacttcaggccttggcattgagtcatctctcatgggtgacaccatgaaatcttgtttcagccagttctgcaggtcctgactctgcagagggaagaggcagaaagagagaaactgtcagagtataatttcacctgagtttaatattacagaaacaaagggatgcaccaaatggtatttctggaaattttcatgtctttaaataccccttggtaagttgcttctgaagccagtgggggctcctcagatagagaggttcccctttcaaatcccagtgccgctctgttctctttccttcccctcccactccccctcttcttcctctgtagagatgcaagaaattgctgtcccataaaaatcataattgcagtagctaaagctggggtcacttcgtgaattcaccagagactcaaagatcttttattggctctgggctgtgctcagtgtctttggcctcagagaacaacttgaatgacttcctggtttcctggcataaattattcctggtgagacatgtggcttaactcacaggtttcccatcagctttctccctaaaactatgttcatctgcctctctctgccagagaacatacagccgagaatactgccgaagctgagactgactactgtgcattaggaaagacctggagtcaggactttggtgggatttggagctccgaggcagtaataactgaacaagcagccctgtcccctaggctgcagaagcttgaatgcatcctctcccagaacctgccacaggaaactgggggctttgtcaggtcagcccaactgcatgcaaaagaccaccatcctcagaagccaagttgtcttttatgaagaggcaaggaaaggggaaacccacatgtgaccctgattttggtatggcttgatagagttccctgaaaactccttgtatgtgtgctaaaaccagggaagcatgtgactgccaagcaggcaacccctgatgatttgtaaagccaggtggcagggccttggggagccccagcacaatgatattgtgtggtcttccctcctgtggaatcgaggggaaattattcttcccaataccttgatttgattttcagtttcataagcttcttcctctgaatcttattgagggactatggtaccaagcaggtaggactgttcacctggtggaacagttcttgctctgccttctaggcttcatcccagaaatccagcctctttctggagaccccaaagctggagggagatgggctttcctctgggcctctctcctactttgccatccacactgctcctggctaaccccagcaataaccaacaaatggtaggaagccccatctattgctttttctcaattatgactgcatagtttatggaaacaaagatcttgaggaagatgagggaagccctcccctcttcacagtccccatctcttctcctttgtacctgtcaacaccagagttcagtgtttaaacagacaaaatataaagtattgagtaggtggttcatatgccgaatccacttggtaggaagaaaccaccagctttatagtgtgcctgatagattttaaacattcctgggcacccactcaagagtgctctttttatcaccttctggaaatccgcaaagttgcaggggcctctggagtgtctcttctctagagagaattggtgggacccccctcagtgcagtggccccaactagtggagggagagaggacttaagtcagatgga

SEQ ID NO: 13051 - DNA, 1993 bp, Homo sapiens
cccaccccatggccctgctcatgttccacctgcctctaatttacctcttttccttctagaccagcattctcgaaattggaggactcctttgaggccctctccctgtacctgggggagctgggcatcccgctgcctgcagagctggaggagttggaccacactgtgagcatgcagtacggcctgacccgggactcacctccctagccctggcccagccccctgcaggggggtgttctacagccagcattgcccctctgtgccccattcctgctgtgagcagggccgtccgggcttcctgtggattggcggaatgtttagaagcagaacaagccattcctattacctccccaggaggcaagtgggcgcagcaccagggaaatgtatctccacaggttctggggcctagttactgtctgtaaatccaatacttgcctgaaagctgtgaagaagaaaaaaacccctggcctttgggccaggaggaatctgttactcgaatccacccaggaactccctggcagtggattgtgggaggctcttgcttacactaatcagcgtgacctggacctgctgggcaggatcccagggtgaacctgcctgtgaactctgaagtcactagtccagctgggtgcaggaggacttcaagtgtgtggacgaaagaaagactgatggctcaaagggtgtgaaaaagtcagtgatgctccccctttctactccagatcctgtccttcctggagcaaggttgagggagtaggttttgaagagtcccttaatatgtggtggaacaggccaggagttagagaaagggctggcttctgtttacctgctcactggctctagccagcccagggaccacatcaatgtgagaggaagcctccacctcatgttttcaaacttaatactggagactggctgagaacttacggacaacatcctttctgtctgaaacaaacagtcacaagcaaaggaagaggctgggggactagaaagaggccctgccctctagaaagctcagatcttggcttctgttactcatactcgggtgggctccttagtcagatgcctaaaacattttgcctaaagctcgatgggttctggaggacagtgtggcttgtcacaggcctagagtctgagggaggggagtgggagtctcagcaatctcttggtcttggcttcatggcaaccactgctcacccttcaacatgcctggtttaggcagcagcttgggctgggaagaggtggtggcagagtctcaaagctgagatgctgagagagatagctccctgagctgggccatctgacttctacctcccatgtttgctctcccaactcattagctcctgggcagcatcctcctgagccacatgtgcaggtactggaaaacctccatcttggctcccagagctctaggaactcttcatcacaactagatttgcctcttctaagtgtctatgagcttgcaccatatttaataaattgggaatgggtttggggtattaatgcaatgtgtggtggttgtattggagcagggggaattgataaaggagagtggttgctgttaatattatcttatctattgggtggtatgtgaaatattgtacatagacctgatgagttgtgggaccagatgtcatctctggtcagagtttacttgctatatagactgtacttatgtgtgaagtttgcaagcttgctttagggctgagccctggactcccagcagcagcacagttcagcattgtgtggctggttgtttcctggctgtccccagcaagtgtaggagtggtgggcctgaactgggccattgatcagactaaataaattaagcagttaacataactggcaatatggagagtgaaaacatgattggctcagggacataaatgtagagggtctgctagccaccttctggcctagcccacacaaactccccatagcagagagttttcatgcacccaagtctaaaaccctcaagcagacacccatctgctctaga

SEQ ID NO: 13052 - DNA, 1176 bp, Homo sapiens
gtggctcatgcctgtaatcctagcactttgggaggctgaggtgggcggattgcctgagctcaggagttcgagaccagcccaggcaacatggtgaggaaacctcgtctctactaaaatacaattagccaggcatggtggcatgtgcctgtagtcccagctactggggtggctgagggaggagaatcgcttgaacccgggaggcagaggttgcagtaagccaagattgtgccactgcactccagcctgggcaacagaaaatgtgtcaactcttgggcaaataggtgctgatttcatggcatacaaagcaaattgacttctggtataaatcttctgtagctataagaacttcacgtatgcatgtatgtattacagaaaaatcctttgacacttaaatgtagggggaaaaaacacctctacttgagtatttgggttagttaaggctttattgaactttcttgcgtatgtttttttcttactcttcagtggcccgaacctgtaacttgatcttgattgttctggatgtcctgaaacctttgggacataagaagataattgaaaatgagctggaaggctttggcattcgcttgaacagcaaaccccccaacattggctttaagaagaaggacaagggaggcattaatctcacagccactgtaagtggggaatatgacatggggcaggctgctgcaggaattggaatggggagtggattggggtgcatggaccctgacattggaaaatttcctggcttttccctgcactaattgagataacacaatgactttataatgactgacaagaaaaacttcaagattaggataggagccagtctcagacttacctttgctacttatttcctcttttggattatctattgggaatgatatgggcgtgtggaccaatattatgcttgcataaagtagatggccgccaatatcttctgttttcattcatttaacacaaatttatagagtgcctaccacgggccaagcattattttaggctctgggcaggaatggaagagggaatagtgaaaccccctgcttttatattctaattggatagaatagaaaacaatgttaatgagtaaaatataatgtattcgtcaatgataaatataagaacacaaagtagggaaaggagataagagtgttggtgtgagggttgcagttttaa

SEQ ID NO: 13053 - DNA, 1182 bp, Homo sapiens
cttaggctataaattctcaacataaaaacttagtgatataatgaccacggtgcaggcagcaatcttggcaatgttgggctatctgggattcttgtcccaggtaacaagtctcccagaagactcatatccttctgcaggatgcacagcaggagcttgtcaagttttaaagaatagcacttcatagttgtggtcccccagtttctagcatctaaacattttaggtttagtttatgccatctcttagtacacaatttgattttaagtgttattagtttatttttggtgtcagtcttttctgacagtctcatctcaattttgaaataaattattttcatcttatctgtcatactagccaaagagaattcctaccagatatctctttgcttgatttaacctggacgttctcaacttctcagcacattcaggggttgtgctttcagtggaggaggtagaagcaggtctgaagggcttgaaggttgaccagcaagtgaagaattcaactcccttcatggcagaacacctagaagagaccttgagtgccgtaaccaacaatcgacaactgaagaaagacggagacatgactgcgttcaacaagctagtgagcacaatgaaggcaagtgggactttgccttctcagcccaaagtcagcgtaagtatctgacacaaaccccccacccttttctcctttttttttcttctttttcccaccacaataaaaggatttttaaaaaggtattctgagtaagttggaaattctttagtagtcatttggtccttgatgcttttgtgtgttccttaattattgatatgctatttgttactggaaaaagcaggcttgtggttaatttatatgtattgtgggtgacagtataaagattaaaagattcagtcttaatggtaatgcctgtataactttaagtcactgctaaaatgaggtataaaactatctttttggatgaactccagagacaattttcttgttattcagctacttaagttcatattctttaccatatttgtatagtaaaatctttattcacatcttctaattattcccagataccagggattacctgcattcttgcagtcatacaaatcatttgtaaagtatctaagatggggctgagcacagtggctcacgcgtgtaatcccagcactttgggaggctgaggcaggcagatc

SEQ ID NO: 13054 - DNA, 1748 bp, Homo sapiens
tttggtcaaaataaaggcactgcaaagactaatcatggaaaattatttatcgtgacgtacttctattgctgcaaagaggaaggccaatgtctcagccttatttaaatacataatgtacatgttaccctgaatctgctgataagcccaattttagtggtgactctcttccaaccatccccttcctcccatcagtcatggacatactatctaaaaaagaagaaaacacccttgttggtttgtttaactttgtctttcccacgtccttccagatccacgagagcgtgtgaaagaagatgacttagatgttgttctcagccctcagagacggagctttggagggggctgccacgtgacagccgctgttagctcccggcgctcaggaagtccattagagaaagatagtgatgggcttcgtctgcttggtggacgtaggattggcagtgggaggataatctctgcccggacctttgagaaggatcaccgtcttagcgataaggacctgcgggacttgagagacagagaccgagagagggacttcaaggacaagcgtttcagggtttgtcttttttttttttttttttttttaaattgagacggagtttcgctcttgttgcccaggctggagtgcaatggcacgatcttgactcactgctgcctcagcccagtatctgggattataggcacgcaccaccatacccggctaactttttatatttttagtagagacggggtttctccatgttagtcaggctggtctctcaagctcccaaccttaggtgatcggcctgcctcggcctcccaaagtgctgggattacaggcgtgagccaccacacccgacctgggtttgtcttctagattctttggtagttcatgtgcttggggacttgatattcactttttttataccaggttactttgagaacaggcatgaacacagcctgctcttaaaccagtcagggaggaaggggtgggggtggtgatgggcctcaggtatacagcatcatatcttcctttcactattgaacattacaacgaagaccttgactgaagtagaaatggcttgactagaaattttttaatcttgctttatgtacttttccagagagagtttggagatagtaagcgtgtctttggtgagcgtagaagaaatgattcttacacagaagaagaaccagagtggttctctgctggacccacaagtcagtctgaaaccatcgaactgactggctttgatgataagatactagaagaagatcacaaagggagaaaaagaacaaggcgacggacagcctctgtgaaggaaggtcagttcaaactttgggagggaagttcgctgttttaaaatgagatgtaggctgggcgtggtggctcacacctgtaatcccaacactttgggaggccgaggtgggcggatcacctgaggtcaggagtttgagaccagcctggccaacatggtgaaaccccgtctccacaaaaattcaaaaattagtggggtgtggtggctggtgcctgtagtcccagctactcgggaggctgaggcacaagaattgcttgaacctgggaggcagaggttgcagtgagctatcacaccactgcactccagcctgggtgacagagcaagactgtctcaaaaataaaatagagatgtgattatcactggctaattgtacacttaggaatgggcaccagatgtataggaaatggcaagtttttcatgatgcatcctgattttgaaatcttttttttt

SEQ ID NO: 13055 - DNA, 1742 bp, Homo sapiens
gtgacgcacaccaatagagagggcgtccccatgcgtaagggcgagcacctgggcgagttcaacctgggctccaccatcgtgctcatcttcgaggcccccaaggacttcaatttccagctgaaaacaggacagaaaatccgctttggggaagccctgggctcgctctagagtctctttcctgattatggctgctaagggatcttttccaaacagagtgagggtcttttcaagagggaggcccatgaggccatccaggtaagggcctgcctcagcgtggttgggagtctgaccaggtaggacttgaatgattcggctaccacctgttccagaggtgcagacaagaggtggcgagagcccccatcatgcccctcaacctatcccgttccttctgcctacaaataaaaagtgcaggctggaatgatctcagtcacatttggatctttttaaacactgtatagacggaagagcctgcattcctgaccgaaccttcagttggtctcggttgtcgttttttcttgctgctcctccccccatcacctgagctgttttctgttggccccttttgttttttggccttaacgctcctgctgcacagggtgaggtgcctccttggcacagactgtggatgcctctcccccagcagagccacacagccttcgtgacaactgctttccgttcccacattcacctcatcctgctctttagaaaaagcagtctttgtgcttgtggctgaacgcatcaccctggactctgctagtgtcttctgaggacactgatgacactgattaatgatacagacctttgcaggacctgatgagtgacccttctggagctggccaggtcctctgcagcaggcaagaccaatcaatcactgaacctgcctcatggcaccagagtgaacagggcaggcaggtagtaggcccagctggggaaatgggagagttcctgtccccctccacatatccctacatgaaatatgggaaagttgctgctattgattcagggtctgtcttggaggcagaggacccttggtggatagttggtcagtgcctggaaaacctgtcccagtttatcaggaacgcaggcctggggagcccccagtggcggggacagggccagatttcatgttgaccctggggatgctgtgaatttctcctgcaggagagacatcattgaattttttcaactgtatcagtagcacagtatttttgtatgaaaagtgggagacttctgaacagtaattcatttaattgcaaagcattttgaaataaaaaaaatcaaacttaaaactgtgttctgttcctggaggtggcctgaggcctccccgacagcccagcacctgcgttcctggtgcgaacacgctagcacagggcctgccgcagggcctggatgcgggcaacgcaggcgccaatgggctggcgctgagcctggagctcctctgccagcagctggatctgcatttccacctggggccatggagggacaggcagggctgagagggagcacagcccggggcgtccccagggacacctggggatggcctggggcctcacctgttccagctctttctgcacctgctgctctacttcctggtcctcaggccccggctcctctctgttcagctccagccacctgcgcaggctgctcgcttgccgccgacaggacctgaggggtggagatacccactgcctgccaggctgggtccttggcagagccccatccggctcagggagaggcacctc

SEQ ID NO: 13056 - DNA, 1208 bp, Homo sapiens
tccctgagaatccatgtgcagaccacactcgggctccgtgctgggtgctcactgtgttggtggcccccacgtctgctcctactccacagccgcgtcgtgtgactccttcaagaaccagctggtcacccgggaagggaatgagctctatcactgtgtcatctacctggcccctggggactaccactgcttccactcccccaccgactggactgtgtcccaccggcgccacttcccaggtcagcccggggccagcgtggggggagctgcctctgtgggcttcatatagaggctctcagcttcttggtgttgggggaccaggctccagatcagggtcattgaggccaggagttgactgctttatgcaggctggttgtgggcaggggaccgtggggcccagtcagctcagcatttggagtgacatcggggcaacaggccatgagtccctttgggtcttggctgccatggggtggacacaccgggctctggacggggagtagcggcattccctgcctctgcaggctccctgatgtcagtgaaccctggcatggctcgctggatcaaagagctcttctgccataacgagcgggtggtcctgacgggggactggaaacatggcttcttctcactgacagctgtgggggccaccaacgtgggctccattcgcatctactttgaccgggtaagcaggatctaggccctgccaaagcccaagggccagacctcttgggtctacctgccttgtctgctgtgcggcggatgcgttgggactgaattctagggaggccacagctctggtcaggcctggctctgctgagcagctgtcctgagaatggccgctccacctgccagccagctgaggcttccctccctccttgcactgctggctggaagtggctggaagagatggagggaattaacctccttgcctggcacctggcttctgctaggaaccatggtcaaaggtgagagtgaggagggaacagaaagggagtgttgagctcggggtggctcatgttggttacagcatgaggggtcagcactcgcaggtctgctgcccaccctgcccccaggggctgcctttttgggtgtcagtttgtgaccaacggccttggctcccacgggtgctgctctcccagcaccatgcatggagaccactgggccccactgttccctgtcctccctgggcccagttcacagcaggtgtcaag

SEQ ID NO: 13057 - DNA, 2260 bp, Homo sapiens
aaaaactactatggttgggtgtggtcttaatggtttttatctgaaatggtgttaggtaacaaaattgagtacaacggcttgggcagtgatacaggctgacccacagtatttgtggctttccaggcagcccgcttcaagtgtggggagagagtcggggtcatgtttcagacccagagatgtgttcctgcagtgggatctcaaaaatccccagccagccttctttgagggccacctcattgtactctgggctcctacgtcacatctaccggaactgtcaaatgctggagttagccgagtttctgggtttgtgcctgcaggagtctgtgggcagagggatgctgtgggtcagcagcctcgaggtcttgttccttttccactgaagtcctgtgtgtccatatcctgctccccttcccctccttctctaggggtttctctttctctctcaaaacaagagtttagagaattaacattccatggctagtgagtgggatgcaaaagtcatcgtcaggacaccagcatcacctcttcatatcctcctgggagccactggcatggagcagccgccgatgggaaccgtcagagttctagggacatttccaagtcagtctattagagaagagtgagtggcacgtcctggaatgttggccaactctcctaggtttcttttgcttccccatttgctagtggatggggagatgggttgggggtggggggtctctatgtgccttgcttttgcaggttgacagtctatgccacactggagcagaaaaactgacatgagccagagggaaaagtgtgccacggctatgttctaggcccactgcctcagacatagcattgagacgagtgaaatacacacttggtcatccacggaggcttccaaggccatggccaaatacagttagaagagagccaggcttccgtaccagctctgaatgatgctaaccagattctgtcattctacatccactttgcccagactgtatagacacgacctatgtttcacctcaatacctctcccttcctgggacagggttcttagacactaaatgcttctctctgacttttttgcttaagggagtgggatgagtagtacattttgcccttgtccaggcatgtttaaggagctcctactggacaggttgcagactagcagtgagtcaacagagccctgtttgccagctctgttgccagtatagatgcagtgatgtggcggctatgtttcccagagacaacagtgggcacagctatagtgtcaccaacatggcagagatagtttcaactgtgcctgttacaggtgtggcactcgaaggaccagaagcagcggtttggaacatgggtaactgggagcagaggactggaagaaacagagctgggctccttccctgtcctgacaatgtaggagaggagttgttgtgaggccagccctgcccgtcgttgaaattctggacctaccctctagctaggtcccttcccctgctccaaagttgagaagggggccccactgcaaacttgaaattacttacctgaaggtgatgtatatacctaggctccagctgcgctcagccacacctgtcttaacattcagtttcggcactgagccagctgcagtgttgtcaggggtccccaggcccgtggtccctaaccacgatgggacatggtaatcggctgctggcacaccacctgcccagagctacaggaggtctggttctggggtggagttggtacagtttctgagtatgggaacttccctccccaagtggtgggaagttacagttaactacagcttactcaactatcacttccagaggtttagtgtttttaatatgggaaagaggagaaatctcaggtctaatcagggttctgcccatcagcttttcactgaaactttcaactgtgttttgttttttgtttttttttccatctttcagtttctagctgtgtttgccttctccctccgcgttccctcctctttttttgcttttggtctcctttccagcttcatgtctccatgagttcagctgtacctcatctcctgttaaagcagatcatgtccactttttcttactgaccttactctaagctacagtagctgagggaggtacggtgaagacatgtagcgtttgccttattcggagcctgaggagcccagaaacccatgctgtgaatcccaaaactcagcgctcctcaagagctgtgaaaatcatgatactttgtcacaattttgcctgaaagggtctttggcacgggctccagagcc

SEQ ID NO: 13058 - DNA, 2317 bp, Homo sapiens
ggagtaattctagtgacagagacagcgtatgtacctgtgtggaaaagaatgcttgcaaagcttgtcaccctcacgagaattcctctgacagacatttgcctttgacagtgaaaacagatattaaagtgaaaggagaagaaaccgaagagcatcagaggggacgactgggttacttaactgttggggagcaatctgaggagttggttaccagagaaactggcgatggcgatcccgtgagcaacatctctcagacccattttaaatgccgggggatacttaatcatgctgaaaaacagcagagccctgaggttttggactacatgttgcagaaagaagagaaatatatacgtcaacaaaaagcacatacgatatcgcaacagtgcatatcatctagtctgttgttagatgatgcacaaaatcagaaccaaccgaaggctgacaaagatgagtccaccatgatcaatgaaatcaccctagcaaagctggccaaggacagcattgtggcacagactcagaagttagaagaccagaaggaggaaaggttacatcatccattaaggaaggacactgagtcatgcacaagtccttgccttcttggtgcccctcggaaagcacaagacccctcctctgctgggtgtgatcaaatacatggtgcctttgcgaagaaaggagttcttcccttaaagaagcagccccatcgaacttgtaagaaagtttcctatcaggagcaaatcattgttgggagaaaaataggtaaaatcagaagttctgcctttttaaagagttcttccaatcccatccccacaaaagcgcacagacttctcagtttgtgtactctgtctgcacctacacgattagaacctgaaacagcacctaccaagagcttggttagtcacataccaaagcagatgtctacaccgtgccatcccttgaggagcctgaattttaggaagactaccaaagaatcagccttactaaacaagctgtccatccttgcctccaaactggccccagccatgaagactcagaagctaagataccgacggtgttcctctgaacttcttccaatggctaaaagctacaagcgcctcagatataaaagactcctggacggattttcatccagcacagagcagctgaatccatatttggcagctagtggatgggataagaggcctaacagtaagcccatggcactttattctctcgaatccatcaagatgaccttcatagatttgagcaacaagatgccgtccctgctgtttggttctgaaatcttcccagtatcctttcatgtgaaatcatccagctcagattgcacgactgagtcctcaaggacttttcctgagcactgtgctccggcaaggcttgccttaggagaggccctccagtgcccgtctcaacctcccaagtggaccttttctttcttcttgtcccacggttgccctgggatggcaacattcagggaagacactggcgtccatagtcagacccacactcaggctcctccccagcctccagctcctctccaagactatggaggcactgccatagtccagaccagagcagactgctctgtccttggccttcacacacttctagcactttgttccccaggatgttaccgaatctggacaaaaaaacggagcttctccagccacatgcctaccatgcagaggctcttcatgacccagtttacacagggcctgaaagggttacggtctccagcctccatagcagacaaggtcttctgttctctgccctactcggtgggcagagtcctatccatttggagccagcatggtccttctgtctgctccttcgaaatctcttctcttcattcccctcactgcaagcggcaaccaagtctgggcaccacaagcaggtaaaatctgtcccctgttctttacaaatgtcccatatttgcttcctgtctctggggagatgagaggggaactgcgggaaatgcaaggctatttagagtcctcttgggtctgcattttctatttaccttgcgaaatctctgctgagaaaaatccaatagtaattcttaagcataggacccccaccccctgctcagttttcctgtagaacctacttctgtatttcacaccattcttttttctgtccatttcattcttcaaaccatcaaatctgttgaatcttcttttttttttttttttttttttttgattaactcttcttgcccaggctggagtgcagtggtgcaatgtcggcttaccgcaacctccgcctcccgggttcaagcgattctcctccttcagcctcctgagtagctgggattacaggcatgcgc

SEQ ID NO: 13059 - DNA, 1572 bp, Homo sapiens
tcagaaggaaatgtacagattacagctgaaactctgctaaaatccgccgaagtacaaggtatgaaggtcaatgggactaagacggataataatgaaggacacaaaaatggcaatgtgagtaaagatctctcagctggatgcggtgaattccaagaagtagacaaaatcatgaccagtgatgaggtttcagaaaccagcacattagttaccccagaacctttaacctttgtggaccctgtattaacagaagcaactcctaaagaaaaagaatgtgaagaattaaaaagttgtccttggttgtcattaccaggaaacagtgccatttctaatgtggacaatgggaaggaagagttgtgtaaaccaaacctggtctgtgaagcagatgacaatcaccaacagcttcatggccaccataatgaacaacccagttctacacatgatagtcccacagccacaagccctttgaaagaaaattctgaagtttcatgtttcacatcagacttgtctggtccagaatccagaacaatatccttagaaaactgtggttttgaaggtggtggtttgctaaagagatctgctgaaaagacagacagttcttatttttataggggggatgatcaagggaagaacttggcttctagagaagaaaatgaggaacggcttttgattcctaggagtgaaagaggtggaccttttctttttaatgccagggaaccagaaaaggagattagtggtcgttgttctggtgaaaaagagcctgttgtttctccaaaggaaaatatccacaataactgcattcaagacagtctccatacagggaactctagttctttaatgcccaattcttttactgaagccacagaagtaatgttaaataaaaatgatttgaaaattactgtacacgttcaaggtaacttgacaaaccctgaggaccataaagaaacttttactaatatgagccatcctggtggacactctgaagaaagcagtttttcctccttgatgcagattgaagaggcaggacagacaacccctgtagagcccaatatattaagtaaatctttttacactaaagactgtaactccttagtcagcatccagagaaatctggaaggcaacacccagttaaatgaagcatcatgtaatgattttctgtttgaaagaaaatccattgtgagtttaatgccagaggatcaaataagtcctgtaagtgaggtattaaaacccaagcaaggtactgctctgttgctaccatccccagaatttgattacagacctgagtcagaaaaagttatacagacctcacatgatgatattccacttttagatgaacagagcatagcctgtgagatgaatgaactttcttgtaccaatgaactggttgtaaacaaagtagaaagtgaatgtgttttaaatcaacaagtgtcccttaattctcaagaacatgcaaatttgccaactgactctctactgcatttaaacaaagagatgcctttagcaacaggcagagatgcccatcagagccatcaccctccattagagggtagagcagatgtcattgctgatatacaa

SEQ ID NO: 13060 - DNA, 1226 bp, Homo sapiens
ccctcaccttccacacctaaactcccccaccttcctcacctaaacccttccaccttccacacctaccctccccccatcttccacacctaccctccccccaccttccacacctaaacccccccttatacacgtaaactccctcaccttccacacctaaaccccccaccttccacacctaaagccccccaccttccacaactaaacccctccaccttccacacctaagcccccccaccttccacacctaacctctcccacctttcacacttaaacctctcccctgttccacacctgtcagaatcttcctccagggattcccaaatgtttcctctctgaattcctctttccctttctttcaaaacactctgaatgtattccagtgacttgggggcccttggagggcaggggtatgctttttcctatttgtgtttccttctataatgcctagcaaggtgcctgcctagagtagtttcatatgtagcttttgcatagggtggagctttaagtgcaactgtggctctaaatgacacatcagcccacccataaggtccatctcagaaagagctaaaaaagtgtccatcttcctcagcccctaggctgtgacctacagctcctccttcatcttcctcagcccctaggctgtgacctacagctcctccttcatcttcctcagcccctaggctgtgacctaccgctcctccttcatcttcctcagcccctaggctgtgacctacagctcctccttcatcttccttggggcaggtggagatgattatatcccctcccctgcccttactgcgtttctgtcttgcattctccctgagtggacagtcaggtggccaggaaccatgtggttaaattgcctttttgttctttcctggtgacctaaggaagaaatgaggtaaaaaaaaattactctggtaaaaaaaaatcaggctgatccatgctgaggaaatcagtagccttaattagaaagtagagagaaagcaggctgggtgtggtggctcacgcctgtaatcccagcagtttgggaggccgaagcaggcggatcacctgaggtcagcagttcaagaccagcctggccaaaatggtgaaaccccgtctctactaaaaatacaaaaattaactggtcatggtggcgcgtgcctgtaatcctagctacttgggaggctggaagcacaagaattgcttgaacccgggaggtggaggttgcggtgagccaagat

SEQ ID NO: 13061 - DNA, 1187 bp, Homo sapiens
ctgtattggcagcacagctactcagatctgcactcctgtctcttgggaagcagtttcagataaatcatgggcattgctggactgatggttgctttgagcccacaggagctccctttttgaattgtgtggagaagtgtgttctgatgaggcattttactatgcctgttgatctatgggaaatctaggcgaaagtaatggggaagattagaaagaattagccaaccaggctacagttgatatttaaaagatccatttaaaacaagctgatagtgtttcgttaagcagtacatcttgtgcatgcaaaaatgaattcacccctcccacctctttcttcaattaatggaaaactgttaagggaagctgatacagagagacaacttgctcctttccatcagctttataataaactgtttaacgtgaggtttcagtagctccttggttttgcctctttaaattatgacgtgcacaaaccttcttttcaatgcaatgcatctgaaagttttgatacttgtaacttttttttttttttggttgcaattgtttaagaatcatggatttattttttgtaactctttggctattgtccttgtgtatcctgacagcgccatgtgtgtcagcccatgtcaatcaagatgggtgattatgaaatgccagacttctaaaataaatgttttggaattcaatgggtaaataaatgctgctttggggatattatctctgtttggtcttgatttttcccccctcgaggaactgtttaaccagtcacaaattgtggtttgaatctctcaaacatggaagcatttgtagtacattatccaagttttcctcccctctcattacattacatattttgcagcacacacataggattcatagattttaaatagttttctgtgaacccagctaacatagcctctctgatcaattttcctgataactggtgctttttaatgagcctcgcagaacaaaatgcagtcttccacagtatagcacctctgaaacattgtgggctctgttgaacttgagagtgtatttaacactgaaggtaaatacggagcttatacacgtcctcaagttttcttaatgtaataagatactaggggcacaacttgcacccctgaaatctttagtgattattgttaagcatttagtattctttaaaatagaaaagcaaacctcattgagtt

SEQ ID NO: 13062 - DNA, 1182 bp, Homo sapiens
acatacacaaatcattaccattgtgttacagttgcctacagtattcactacagtaacctgctgtacaggtttgtagcccaggagcaacaggctataccatacagcctaggtgtgtaggctatcccatctagtttgtgtaaagacactctgtgatgttcccacaagggtgaaacttcctatgacgcatttctcagaacatatcctgttgttaagtgacacgtgactgtatgctaatcgatagcctgcttctctgggctttccacaactgaactcccaatgagaaaaagggaaagagctcttttaccaaggacccgccaacatgtgccgcgtttgcaccaaaaccgtgaagaaggcggcccgggtcatcatagaaaagtactacacacgcctgggcaacgacttccacacgaacaagcgcgtgtgcaaggagatcgccattatccccagcaagaagctccgcaacaagatagcaggctatgtcacgcatctgatgaaatggattcagagaggcccagtaagaggtatctccatcaagctgcaggaggaggagagagaaaggagagacaattatgttcctgaggtctcagccttggatcaggagataattgaagtagatcctgacactaaggaaatgctgaagcttttggacttcggcagtctgtccaacctgcaggtcactcagcctacagttgggatgaacttcaaaatgcctcggggacctgtttgaattttttctgcagtgctgtattattttcaataaatctggcacaacagcaaaaaaaaaaaaaaaaaaaaagggaaagaagaaaaaattatagcagctctcttcatccctcatctttgctggtgtctcattgtcaatgaggccccttcacacccatcatttgagagagtcattgctgtcaatgctgtattacagatgttcaaagagagggttgcaaatgccaagtgagctgtcaatggtctactgcttgttggtagctgagctgagaatcaaactagccaagtaggttctctcttcagccccttacttcccaaaactcacagactctgcacttaggctgttgatttctttgtgtggcaagagttcaggagctggccattccactgtggggtcctttgccaagaagcacagtttagccagtgagaggtggacattgtaccattgggtctcctggggag

SEQ ID NO: 13063 - DNA, 1316 bp, Homo sapiens
agaaaattaaaattgccagtaattctaccatcaagagataattatcactaacatatgatggttgggtgccgtttcttccaatcaggttctggtgtgtgttttatttacttacatttactacatttcctagttatacaagtaatacatgttctttaaagacattttgaaaaatacagaaaaaaaaaaaggtgaaagtgttttggaaatcagcactgaccaacatcaggcttacttcttttttaaatttttgctaatttcataggcaaaaaaaaactctctgtattattttagtgtgcatttatttcatcacaagtgaagtttggtgcttgtaaagactgtgttttcagtggacttgtacaatgtttaaattcctctcctgcaggctcctgagtcctataagaatgtgacagatgtggtaaatacctgccatgatgctggaatcagcaagaaagccattaaactgagaccaattgctgtgatcaaaggatagaaccttggacagcagggctgcctgacaccaccaaccctctctgaagtggaagtggactgacatgctcttctgacatcagactcaaggcgggacaagttgcaaagtgtgcagctgtaactgctcacgccaaaatggctgatggggaggctgctgctttcaggggcccgtgcttgtaaaataaccttccaggaagaggcacattgcccacctttggaaagggaggaatatgccttctccttggttgttccacagagttttaggaaaatctgttagggatgggtagatgtcaaactgccttacgcagtcatactgatctttagccatcagattgatcttcttcacaccaagctctgtttacattccgagaggtgtcatgaagaaagttctgttcaataaggttttggaatgtttcctttcgtctgttgctttgtcagtttgtccattcatccacccatttaggcatcacccctgcactcagcaaaaccctaaatacccctcttacttggagagcacccagggagttgtaatcaggctgttagatgaatggatagtggaacacattgaagagggagtatggggaggtttaaggaatagcggcccaaaagacaaagtcttcatagctttactacctttcttattctaaatacacggcagagtttttgtatccatggggccgggtgaacaaaatggaggtaggtggtggtgctggtgatggagggcacagcagaaccagaggcctggcctccctcctacacatgccttgcagggcttttttttttttttttttttttgagactgagtctcgctctgtcacccaggctgaagt

SEQ ID NO: 13064 - DNA, 1150 bp, Homo sapiens
ctcagattttcactctcgtcctcttccttcccctccgatttatcaaagaatcaaagtactatcttaatatagtttactagccgcgcgtttagaagtctgggtttctccggccgggtgtggtggcttacgcctgtaatcccagcactttcggaggccaaggcgggcaaatcacgagttcgggagatcgagaccatcctggctaacatggtgaaactccgcctctactaaaaatacaaaaaattagctgggcatggcagcaggcgcctgtggtcccagcaactcgggaggctgaggcaagagaatggcgtgaacccaggaggcggagcttgcagtgagccgagatcccgccactgcactccagcctgggcgacagagcaagactcccatctcaaaaaaaaaaaaaagaagtctgggtttctcctacaatcctacagtgcaagagaaaatttaaattttatgcataaaaagcctatgtttttctgaattttaacatgtttgatttatgtgcatcctcagctcactggacagccagtgctcattggtggcaccatgggaacctgtagttatgttcttactggcactgaacagggcatgactgagacctttggaacaacctgtcatggagcggtaaggaaaacagaaacttccttagaaatgctctcttcagtttagctatggttttccattttgactggtaaatgtagctgattgaacattaacagagttgagacttgggcctatcatgtcttgtacttcaaattgttccccataatgtatactatttagtgaactgactggggtcacctagtatctctgcctcagtgagatctggtagggttagggaccgtttcttatctctgcaagtccagaaaatccagactgggaaattgtcacactagctgagcttactgtctggtttataagtgatagaactttaactgatgcaaatatcacagttgatctcagcgactgactggacctgctcctttgtttaatttgccccttcctattgtgtaggtccacgcaagattggaaggataggccctatttgcaaattagagcccatgtacagtctacacacacacccatttcaaaacactgcctctcatcttctaagcccaggggtcaggaaactcttcccataaagggc

SEQ ID NO: 13065 - DNA, 1100 bp, Homo sapiens
ccactcagaacttctgtgaagatgggaaaacagcttaaaatttaacctgtgttgcctgaggaattctagataccttcatttatttgaccgtaattcataaatgattaaggtgtgtacctggttgaattagtcgttagagagtgatagctgattaaggttacagagttgttgttgttgttttttgttttgttttgtttttgtctgtttaatcactacctcatggaattcaggatcagagaggcaaaactgaatataaaaaagatttgaaaattaacaaggagcagtataaatgtcaagtagaactataatgatgtctaatagggcatttatcattttatattggaattatttatatgactgcattcctcaaaaaaccagttactgagagcttaaactttgtatctgactcaaggcttggaacacaggagatagtaaatgtcgagtttttctctgccctttaaggatgtggtcatccttaggttttgatctgcctttgctgtgagatgactagcaccttttatacttatccagagacttggaggaggccttggagatgggggtggactggtccttaagagaagggtatgcctgggctgaagacaaggagcactgcgaggagtacggaaggatgctgcaggctgaccccaataaagtttctgcaagggcgaagaaaagaggccttcctcaggtaactcactttggaggggcaacatgttaatttttttttcatattttgtttttattgggggaaaaaaatctatatcttacatttagcaaacatattcccaggtttttttatggtatatcaaaaaatacaaatttgtttatgcttcatttttattctaaaaaaactatcagggctggatgcggtggctcacaccagctttgagaggccaaggaggaaggttcgcttgaggccaggagttcgagaccagcctgggcaacataagaagacttagtctctacaaaaattaaaaaaaaaaaaaattagccaggcatggtggcacatgcaagtaatcccagctactcagaaggctaagacaggaggactgcttgagcctaggagtttgaggctgcagtgagctgtgatcacgccagtg

SEQ ID NO: 13066 - DNA, 1248 bp, Homo sapiens
aaaaaaatttgtgtgacttggtttattgcattggtttgggactaaatccacaatatgtctgaggtgtgcctatagatctttactatgaaagcaaattagaactaaagggaaacatccagatcacttaccttatcttgttcttttatttttcttttttctacagctgtacaggaagaggcacatacaaagaaaagaatccccgaaagggcggtttgtgatgctcctgccatcgtcaactcacaccattccattctatcccaaccccttgcaccctaggccatttcctagctcccgccttcctccaggaattatcgggggtgaatatgaccaaagaccaacacttccctatgttggagacccaatcagttcactcattcctggtcctggggagacgcccagccagtttcctccactgagaccacgctttgatccagttggcccacttccaggacctaaccccatcttgccagggcgaggcggccccaatgacagatttccctttagacccagcaggggtcggccaactgatggccggctgtcattcatgtgattgatttgtaatttcatttctggagctccatttgtttttgtttctaaactacagatgtcaactccttggggtgctgatctcgagtgttattttctgattgtggtgttgagagttgcactcccagaaaccttttaagagatacatttatagccctaggggtggtatgacccaaaggttcctctgtgacaaggttggccttgggaatagttggctgccaatctccctgctcttggttctcctctagattgaagtttgttttctgatgctgttcttaccagattaaaaaaaagtgtaaattacatggtggtcttgacttttattacagaaagatatgtagtaaatattcagaacagatacacaatgttacttggacatttcagaattatcagagaacatagcataggcagataatttttgtaagggttttctgtttgtttgttttttttttttttagcagcgctctgtcttctaataaaggcctgatttatgaaatgaatgaaaacagagctagtttggttgaactggacttggggtgggtgctttggctacacacctactcaaatccacctcttctctcgacttctctctctctgcagctctttcttgggttctgtggtggaactttctgggctgtgaagcaatgctgttgaaaggccatttggtattagggactcctgtttgtggctcctgggatgagg

SEQ ID NO: 13067 - DNA, 1629 bp, Homo sapiens
aattcaaaattgagccatgctttttcggtttgtttttatttatctctttggcccagccaagctgccctcactacagagaccttggacaaggatccagccagtccctctctgccccacaaccctgcattcccagaggttagctatgcagcccacctagatgagtctcttcaagaatgggaaatcaaggggtgacagggagtaaaagggttatcatcttactgcaaagccacaagatcagggcagggctttaggatgttctggatgctttttaataattatgcttcccatcataactggggagaaagggaagtcagggttctaggggttattcgtcccaggaaatagaagtgaaattgtctttattaagtgaaaactttcccctttgccctgcaatgtagctgggcattcaaacggagggcaaaccgatgatctaaaccaaccacttggaaaaacccaatggggacattgtaaccagagggtcctggaggtggggttgatgggtttccttatccccaaagtcactcctgttttgttttgtttttctttgggggttttgtttatttttggggctggcaatccaaaatagaaaatctgatcctttgaggctctaaaggaaaatcagctgcctctaccaaccaccctctatcagcagtggcccaggaaggaggtcaagcatcttcggccgatatttaaacatgggcagcttccttcaggatgatcaccgaggctcccgtgactttgaactccctactctccagaatccaggggctatagcgatggggactgcggaattacgagggctggctgttttacaccggtcacattttctattggcagtgactgattcatgggaaagggctttgaaggaactacttcagtgcacacacaaggtacgaacctctcaggcctttcgaagaactttcataattcatgaaagcccagttctgaagattcacgtatccatctggagacctacaggaagaaagtgattgggttcctctggttcttgcctgcttcactgtggatgggaagaggtgacaacctcagtctccctttgggacctgtccaagggtaggcaaccaccttcaccttcacacagattgaggagacactggactttttacccattttctttaatcttcaatattaatattgtgtttacattgatgagaacaagagttaatgccctaccctctgctgggctgtttgtattgagttgcaatgtgaccagcgaaagctgcatttaataaatgaaagtacagactgtttcttccccattcccctcccactcttgcaggaagctactgagacacaccttgacatagagagctaaattgcagtggataaacagcaacttcacactttctgttcccccattctatttttctcatcatttgaactttagccttttttttccccttttgcctgaagttagatcccactctgtctctaactcaaaccatcttcaagttttccattccgcatctttctcaacactggagccagatgttgtcttctaccagatgtgggctaggagggtaaatcctggtaatcaattgtaaagggaacatcccatccttgggcctggtagtcatgtgggaccctatagcaatccggtttgtgagatca

SEQ ID NO: 13068 - DNA, 1212 bp, Homo sapiens
agcaacatttctaaacacaaaatgaaaccaaagaggcataatgattttgtggaaaatgttctaagctagtatttttcttcctttgcaaacagaaaagactgaaaataattaaatttttttgtaatatgactcagttcccctttgtgccatattataatccatggaaattactgagttgtgcagaagagtttactcctagggtatacggccccaaaggatcatgcttttttaattcttgagactgctctttgttcttcttttttaatttttttggccagccataaggatactacgcagacatgctcaccattcctaaacttcctggggaaagtttaaaggtggctacagcctttccagtgtacagcacaaagacattttaattttaatgatttatctcgctcatgagcttttctcatttacttatagaataaagttttcattcttcatttagaaggcttttctttataactagtacaagttataaaacagaccatctatcctttatattctcttaagaaatttgtgtttgtggtaggtaaaatgaaaagttactgccgttgtttttggtagaatttacctggtgttcaccttgaaaggatatgtgcttgtgggccttttaaagcaaaaacaaaataaaaaaaggattgaaacttctgaagttatctaaataaatattcttggtatgtattgctgtgaaaacaaaattcaacagagcttttagatgtacatgtcagttatatcttatattttgtagaacttgagaagttggcatgtcagattagtagatgctctggatgcggagtttttcaatctttgtgacaggtaggatacatttaaactttggtcagcttccggagaggcatagcctggtctttcatcatatatctgaaggcaaaaagatagatggaaatctctaagcagtatgaattgtaagtatttctgttgagttataaatacctcaaggaaaagaaccatcttagttttcttttattcacttaacaaatatatattggcttttgaagtggttgagtgtagagttctagagttaaaaatattttggacttaaagaaaaaaaaattggtttaaattcctgctgtatccttggatgattcagtgtaggccagtttcccttcacaatagttattgaggggctactgggtgtcagttgctatgccaggtgtattagcatgttctcacgctgctaataaagac

SEQ ID NO: 13069 - DNA, 1186 bp, Homo sapiens
aagagtttccaggattctgagtttttataattgcagagacatggaattcattttgttctgcttgagtatacaggagaggcggtgtgtatgagacattaaaaaatatcaaaatcaggccgggcttggtggctcacgcctgtaatcccagaattttgggaggccgaggtggggggatcacctgaggtcaggagttcgagaccagcctggccaacattgtgaaaccctgtctctactaaaaaatacaaaaattagccgggcgtggtggcgcacgcctgtaatcccagctactcgggaggctgaggcaggagagtcacttgaactccagagacggaggttacagtgagccgagatcacagccattgcgctccagcctggaaacagtgagacttcgtctcaaaaaaaaaaaaacatgcttgtctgctggttcttccttcactgtaacagaaatatctagggcttttttttttttcattgttgttcttcctttatctcttatgaggctttccaaaaaagattttgttctaggaatggaataaactgtagggcgtttaaggcttcagaggtaattttgggcaacctggagttgcaggtaatcacaggctggggctggaattgaaaatgcagtctcacccataatttgagcctcttttgtcgcattatggggctgtgccttggacaggcagcagacgcagatggagatggaaccctgactactgagagagctttgcttttaacatagtccttttctgaattaccaaggccaattgggaagaaaggacttgccgatctttccagctctccatggtagccatagaatttaggaagatttacagcagaacgtgggcatctagggatttctttcttccttttcttttttttaaattttaaattcagaagggaatcttgggctcttgagtgttattctgtggttagggattgctgcggcttccttggatacattaaatgcatatttgttattattgagtaaggttaaccttgctgcggctaactcgaagccatcccctccccttttgtttttagaacagttgcgtagatccttcatgtgccaacactgtttgtttaagagccttcttgactgatgtcagctctcatctggaaatggcattttgtggttgtttcagaagccaagggaggcatagaggcaagcccataggccggtggggct

SEQ ID NO: 13070 - DNA, 1143 bp, Homo sapiens
cacccaccgcgccgcgatccactcgccgcgcctccgctcccgtgaccttcccggggcgcctcccctagccccgcgcccccggccccgcgccccaggccggggcgaggccttttccggcgcttctttcccgcggagccgcgggcgggcggcgcaggccctgggggagagcgcgccgcggccggttgcagccccccccgcgccgccgcgttcggcgcccggcccggccagtctgctcctgccccgccgccgcgccggagcccgggcgcccgaagctgggggcgcggccgcgctcgtctcgccgggctgttcgcgggcaggccctgccctgaagggacgaatcggcttggagcgcgggaggtggagtcggccccggcggtcgctccctggacccaacccgaggctgacccaggcccctgcccatgcggggcgcccctggctcggaagagtcccccgggccgggagcagctccaggcagcggccccggaggaagaggaagaagggacagtgctcagcttgggggacccggaccctcgccgcggcatttggagccgggggcagtcccgaactctgtgcttggcaccgccgctccgagtagggcagcgcctgccgggaccctgacccggaccccctgcgcctcgtaggcggcggcgccgccgcgccaccctgttcttccgtgtctccctctgcctggcggcagtcacggccaaggtaagagccccggagcgcgagagtcgccgcgggggcgccgtggtgtgtagcgccggacaagttctccgaacctgtggctggtaccccctgtactcgggatgccggcggggaggccgggcacaccctctgctgccccggccgggagccctggagaggctggaggtggaagcccccagtctccgaagtccccaggaccccctcagggcctgctcggcttctgggcacacaggctgctggcagggagcgagccaggaggagtttctggttaacaccacgagggcatgtgaccgatacccgcacccccggccctcttgttagcggtgagcacctgtggttcgcggagcctgccgtgtttggagagggccctgttgggcggtacgcaactacctttcgtggtgtgatgctgtgaataacttttcttgttccttcttgcag

SEQ ID NO: 13071 - DNA, 2220 bp, Homo sapiens
acttaagaaagcagcattctagcccttgaggtactacaattcctgtgtttcctgtttgctattctgcacccaaagacagtacaggaattgtttccctcttttttacgaggattaatgggagaagtcagcagaaaagttcctagcataacaaacagcaggatgccgtcttcattctcacctgtttttctaactccatttgatttttcttatctctctccttgaacaaagaaacatctctcaggaaaccaaggtacagtactcttcagttgaacatttttctttgttttgcagtcaaacacattagacaacattgcttacatcatgccgggactgtgacagcaaagaatcctgggacagaaaccttatcctacaccattgctggtttgtgtatatatgactgttgcagattccttcagtggcctctggctgtaggttttaaatttttatatctatacatacatatatacatatatatataatgtacaatatatacatagactgtaactactttgcttttaataattttatgaaatggcaaaggtttagccaagaggaaattttggcatgaatacaggcttgggattcttttttctcctgtggtggataaatctgccttaaaaatcaatgtaacttgggggctgggggcttgttctgggtgccaagcgcatctctttatggacagctaaaatgtgattattttccaagctcagttggacctccagacccatcactgaccatttgccttacctgtcttagtctgaaatgtaataggaaagataacgggaagatgccagttgactgaaaattcaaagcctttcaatttgaagtgacctaggtgggaggtgataaaatttgttccctttatagttatggaagtggcttaggtgaattgagtagagggttcattccaattcctactgtataggtgtctgtgtctcaaaatttattgtaatcattggtaccattggtggcctcaacagaggccaaggagttctgtgagccctggcagcaaaaaacaccttggggggtgaagctgtcaatgccaccagttggacctccatacattctgagctaacccagaatctttagtcggcagaattaagtgctggtgtctttcactggcagcatgaagttagccaccaagtcctcacaagccgtgctgcttagttgctcggtggttatggataaactttgcccagcatgatttttgggttcatcttatcagttcccctggtgggcagatacacagtgttctgcattccacatgtaagtgaattgcaaaaacaaaacaaaactcactctcttgtaggtttatttatgtgtgtgtgaatgtgtattttaattatgtgtatttaactctttaaaatctcttagattttaatttatcctgtaaatttctgtatatataatttaataacagaagcctccaccagcaacagcatgtggaagatacagatttgtcatttctcccttccgccctcccttctttccttccttccttccctgtttccttccctctttccttccttcctcctggtctgttccaaaaactctgaatcatctacattttaaggtattttacctcaaaaatgaatcattgtgttaggattctaattctttataaagaacttcatgggcttcaataatgtctagaaagtaaaataaagaggaatgttaccatccccagctgcccttatttccagagaaccagacgtttgtttcccagttggaaagaagacagttgagcacttcaggatggtttttaaatttggtatgagattctctgccaacaccaagctctgagttaactgtgctttcttctcctggccctgacagagcactacagcatcaaagtaaatctttggggacagtgtagcccatctgcatcctatttaatttcttcccttctccccaccagtgttgtcacagggctatgttgcttaaaggtagtctggctgctgaatccctttctcagctcagagcagttttaagatttaattgggaatacagagaaacaggattgtttgagaaccaaaatcaagaggaacagaaatcttaacttgatttcatgtgttagaacattgtaccatgcctcttctgtatctgtggaagtttcctgtttgacacagggtatctaggaggggcggggaagacatggatagtataggaagacattaatcctagcattgtcatttatatacattaatgaaatcctgatga

SEQ ID NO: 13072 - DNA, 1237 bp, Homo sapiens
accacagaccctgaggccgctctgctttgctttcctatgacatcagacaccctgatgcacgcccacctgttaatgaccttgccccattttctctttcagattctgcccccgtggagactcccagagggaagcccccactcaacacccgctcccaggctccgcttctccgatgggtccttacactcagctttctggtggcgacagttgctgtagggctttatgccatgtgaatgcaggcatgctggctcccagggccatgaactttgtccggtggaaggccttctttctagagagggaattctcttggctggcttccttaccgtgggcactgaaggctttcagggcctccagccctctcactgtgtccctctctctggaaaggaggaaggagcctatggcatcttccccaacgaaaagcacatccaggcaatggcctaaacttcagagggggcgaagggatcagccctgcccttcagcatcctcagttcctgcagcagagcctggaagacaccctaatgtggcagctgtctcaaacctccaaaagccctgagtttcaagtatccttgttgacacggccatgaccactttccccgtgggccatggcaatttttacacaaacctgaaaagatgttgtgtcttgtgtttttgtcttatttttgttggagccactctgttcctggctcagcctcaaatgcagtatttttgttgtgttctgttgtttttatagcagggttggggtggtttttgagccatgcgtgggtggggagggaggtgtttaacggcactgtggccttggtctaacttttgtgtgaaataataaacaacattgtctgatagtagcttgaagtagttttcatgggctttgttattcttggggaactgaccttttcctccctggtttcttgcgtgctcggtaggagaagtggtgatagggggttggcaggagctggtctgtttgagaatacagaaggtgagcttttcttttctttttttttttttttgagatggagtctcactctgtcacccaggctggagtgcagtggcgtgatcttggttcactgcaagctccacctcccaggttcaatcaattctcctgcctcagcctcctgagtagctgggattacagaagttcatcaccatgcccagctaatttttgtatttttagtagagatggggtttccccatgttggccaggctggtctcgaactcccgacctcagctggtccacctgcctcag

SEQ ID NO: 13073 - DNA, 1183 bp, Homo sapiens
atcccccacatctaatcactcaggaactctggccagctccacctttaaaacgtgtccaggatctgaccacttctcatcctccccacctgctctgagcccttgtcagccctccctggatcaccgttgatcctccccagtgttcgtctccaccttgccctaccttctctgttctgcagcagccagtgagcgatgctgtcatgaccaagacactatatcactcctcggctgaaaggggagaccttccagtggtttccaaggtcctatgccatctggccctctgtttgctcagaacccttctccccacttcccctcaccctttggaccctggaacacaccaggcccattcctgagggcttgagagctgggatctctgtttactcagataggttgtgctgtcctggccctaagggccctaagggctctgccttctgggaggtccctgagctggtgccaggatgggcagtgggctggaagagctcccttgtactcactcatgcgcctgctttgcctaccaaggccgcagctttgctggggccgtgagcccccaggaggaggaggagttccgtcgcctggctgccctcccaaatgtctatgaggtcatctccaagagcatcgccccctccatctttgggggcacagacatgaagaaggccattgcctgcctgctctttgggggctcccgaaagaggtaggggcttgagttcccttgggtttggggaggcggctgatgatggggctcacagtaggataattactggataatcaggactgggcactcttttttgtatttcctgggcccctcagtctgccaggcacctttgccagcccccaagcttgccatcagctggctagtggctgatctgcgcacctgtctcagcgatgccctgaccctggcaagggggagactgggggcctggcaagtgcagtgggagagcactgagcttagggtcgtgtaggtaccaggacttaaatctcagcactgagcttggggtcagtagcagggatattattagcagctgccatttactgtgttcttcctatgcacagccattctttgttttttttttttgagacagtctcactctgttgcccaggctggagtgcagtggtgtgatctcggctcactgcaagctccgcctcttgggttcacaccattctcctgcctcagcctcccgagtagctg

SEQ ID NO: 13074 - DNA, 1725 bp, Homo sapiens
taggtgcgcagactgaggcttagagaaaggtttagagcttcggttctagagtcagatgggacttaagtcccagctctacctcttaattgctgtgaccttgagcaagtggcttagcctccgtgtgcctcagtgtctggtacacagtgggcactcaggaagtgtgggccctttaggtcaaaggagcctgagtacaaagttccccgtgagcctggggatgtctgggctctgtcggagtcccctcgggcagcacgtgccgttagccagccatgtgctcccacagaaatacccggagcacgccatccacaaggtgctgcagctcatgctgcggcgcggcgagatccagcatcgcatgcagcgcaaggttctctaccgcctcaagtgagtcgcgccgcctcactggactcatggactcgcccacgcctcgcccctcctgccgctgcctgccattgacaatgttgctgggacctctgcctccccactgcagccctcgaacttcccaggcaccctcctttctgccccagaggaaggagctgtagtgtcctgctgcctctgggcgcccgcctctagcgcggttctgggaagtgtgcttttggcatccgttaataataaagccacggtgtgttcaggtatctgtgggtttgtgcactcggtgacctgtcacctccatcgtgccctcatggcagggtaagtgtgagggaacagggtctggaggcagactggccagggtttctgacttggatctgccactcagacttctgggtaagtcacgtgacttgagtgctccggtttcttcatctgtttagcggggctcataaagccactcccttgatgctgggaatccagtgagaccagggagtggggaagcgcttctcaaagtgtgtgattttgatccgcctcacctgttccccagtaacttattggggggctgcgagccgtggtgcggcggtcagactgcctggattcatggaccctctccatgccttagtttccttatctgtaagcaggctgatactagaacctgcttcacagggttgtgcttagggtcagtgagcagctgttagtgaggggaatgtagtggccaccaggcaggaactaggactccagccagttctttcctggtgggccacgtgtaactgtgtggccttgggcgagacatttcacttttctgtgcctgagtttatcagtaaactggagatggggggattcctcaccctgagttgtgaggattgaatgacagaaggcactagtgacagtgatgctggaggaaggagtgttgccaagtgcctcggtcactttgcctaatttcagaaagtcactctgagttggtatgttttgtgtttttaaaaaagctaggattcataaaattaaatagaaatcagtgaaataaaatatttgatatttaaaatacatttagaaatacaaagtgtcaagcaaaacgtgaatttggaaatctatggaacattagataaggtatttaaaagtaattgccatgtaaaaatgacacgaacttgaagtaagattatttgatttttctaaaaatacaagaaagcttggtgcatccgcctggtcattgttgaatcacaaatgtatttttgtgcagaagattcctgcagctcaaagccctttctgattccatactgttcggggaaatggagagatgagaggagctaaatcagctttcctctgactcactcccgttcaaagctcatttcttttctgataatt

SEQ ID NO: 13075 - DNA, 3883 bp, Homo sapiens
gacaatttttgttgtatgtatataaatattttagttagaggagcggggaatgggatgcgggctttcacagttctagggaatgggggcagggaggattttgcttttgcttttgctttgagggagaactttagctgactaaaaaaacagaagtttggggtcatgatcacaaaggggccattcccaaaagatggcaagccacgtattcagtggagactaggccaaattctaaatggttttatccatagcaggggagaataggagaatgagtttaagagtttttctcttcttttttcctagaaagaggtaaggataatgggaaaggtagagaaggcggctcccacagaccttttaagagaggcagaatcttgagcttgaggcaccttgagtgcatctcagttcagctggttctggctgaggcctccaaaggcaagctctgtgctttccagtggtttctgctgcatttccagggatggtgtttaacaccgcttcctccagctcccttttctaagaaagaataaatggagttctgctttttatgaaagggtctttggttttcagtgtcaacactgagaattggggctcttgcaagcatctggatttcacagtatcaacctccccgtcaccttttgaactttgagactccgtacggtcaacttcaccagaggcaggttgctcgaagcagcactgcttgtctgttcctgactctggttctcactgtattaaaaaagagagtcagaggagtctggcatttcgtgagtttgttagaggatgctggctgataattccagaaaacttactgatgctaaatcacagtacatgcatgattctttttcagctttactatagttcatgacctggactttctgtactcttggaagctgggctccttaaaggaggcctctagtgaacacctttatctccatgtccctcttagagcccagagagctgcccataggcattttccagaattcctcatgtcacctagttcaatttccattaactcagatcagccattgtgattcaccatttgtcaggctctcaggtttaacaaaacctactatcaccatcatccttcaacagccacagtctgaattgagccaacatttttttttctttgagaaagaagtggactggggcacaacttttagtctgaggggagctagtggaaatctagacaatagaagtcatcgatagcagcttttcctcaaatgtgtgactcctcaggggctaaactgctcttagcttagaattatgctttactagagatctagcagataagtgggttaatcactaccatcctgtaactagttatatagcttccagacatgagggagacatcaaacagggatggaagcaaccccaaggatatgcaagaagggcatgatgaacccccttccctctggcaggagaacaaggccaaccaagggacagactggaaagcacttagatgtttaaggaggagaaaggggaagctttgaccagtccttgccttttgccaagttcagccagttctccgctgcttgcaacctctagcgcagtaacatttgcagaattgcagattttcccccagatactaggaggaaagggactttggggggtggggaaggggtcgtggtgttttaaaagcataagttacctgtttgcactgttttaagataggaaaaaaaaatagtgggcaaggtgaacatcagacgtaaatttgtgtgtttttattttgtcatgctcttgaaaatgtttgaccatttgtagtatacacagtgaaacttgattctctgttgcataaaacactatatttttttggaaatgttactgtccaaaagcctcttccctccctttccttttcctatgtacttccttcatacttgctttactgatcagccaggcaatagccatccaagagctagagcatgaaacagggccctttccaagtaggctctgggtgtcctaagccagcgtgtgccctctggtttagtgagtgtaatagagtccctggcacctttctttgcaaatgaggctaacagaccagactgcagcaagttatcagattcctcaatcagatgcactaggagtgaggagcccagggatggagggggttcctgaagtattgcagttggctgtagtagctgagttcttttccatgttaccgaaactgtagccagttacagtttactcaggaaaacggtagatcaattcagccatggtagtgctggttggcagggattggtaacggagagaactgctcatcagccaaaactcaagccttgccttttaggaggccaccagcagagggacttggtcctccttgtctggtacttgtgtacatgccggtgacctgaggactccactcacactggcgagcaaaaagggagcagtgattctcttttctctccccaccccctgccctttgttaccaacaccagtttcccagggggtacatgagtttctgaatttttaaaaaatgtttttggtttggtttttctggggactgataagtgctttaagcaatgtccataccccgtcaagactcccagcttagtcattttcttgtatttttctgttcacagtatttgtgtgtgtgcttgttttggcagctcattttggctgtattatatattgagtgatgaattgatcctcttttttccctaagggatatgaattgtttttcttgtgttatattctgcttgtgaatagctggagcaaacctggggctgacacgcgtaagctagggctgcaaagcgagaagagagccggtggagtgtacttgtccctgacaggctgacctacctgagtctctgagcttttcagtccaaatctttgcaaggctcaaaatgccacagaacctctcctcttctccccactccccatggcagggaccggaccatccctacatgcaacatgctgttcctccagcccctcccattgccatggcaaaacaggtacctttggggcatgggggcattacatgggatgcttgtgtaatcgaccacctagccttctctctcccctcccgtcctcccccagaatcacttcctaggacacccgagctgcttgcccagggtcctgtttccctgctaactccagagaagcatcccagggctttgtgacagtctctaattcccttcccttctcgttaagaatcatattgtatagtagctttcagaccatacagtattcattgggttactcctattattatcaagtagctggaattgtgaaggtcggagtagttagatctttagcttttattccttatttttttgtattactctccatgtgtataaattattgatcatgttgctggcttttataaactctaagcgaaggaggagcactgcctcagcctttgcacatggtaatgaagcactgtttttaaataaaagagagaaacaccattctttgggctgtgtgtattaatcctcgttccctgttgcctctgcctgaggctccaaagataccacttggatttgactttttaagcggggggcgggggggacaagaaggaaaagtgccaggcgttctaaggtgagacgttctaaatggtgatgagaagccagaaggtaagcgtgtgtcagctgctctcagcttccccagctgtgaactccagtctgtccaaaagctgcttctgaaatctttcagcttcacttcttcaccgtccaccctcccctagattcaactgctgcctttactgtaccacagacactgtccttgccaggggctgtggccccacttgaccttatcaaagtgttatttccctgccttgcctcctctgtccctgctgcccctggctctccggctgccacccaggctccttcactttttgttcagccatagaaaatatgtcctgcctagccctttcctccctgtttcttttctttttttcccc

SEQ ID NO: 13076 - DNA, 1097 bp, Homo sapiens
aatgcatttccatgtctgtatgtccgtgcttagcttattctatcaatcacggaagaggcagtcaaggaggaaggagagacattaggagccgataaatgcatctgatcagaaatcagcagacagaattaccaaagtgtatctggtgctgaatgactgggggacaagcagaagtggaagagatctttctgcaacaggatattcttctagtcttctgagtttctggtctttgacaggcaattctggttggctgtggctggaatccacatgctgatagataggaatttgtgcttacaaagcaggagaattaaaaagacgctttcctctcctcttccctcctgtcttctccgttctttttacaatcatcttacacgcacagcctgagacagctggcatagtttttggaattatagtattgatatttccaaacgtgctctcagacagtggataataaacacctcattaggaaaccgatctcagaatgaactctggagtatgaaaaagatcatttctttttgttcctgtaacctagcattccttctaggcttcttctcctttaattgaaccacagcttagctcatgtattcttttattaacaccctgctctcatgtccataagattcaggaatttaggacccagggacagaaaagtgaataagccagtgaccagatttcccccagatgtcttgaggattagaagtacaaattgttgacagccattaaagagggtgaggaagggaaaaggaatattagaagatctggtatttcttacttttttcttgcctcagaaagtacaaagtttaaaaaatagaataaagaatctgctggggaaagatagagtaccaggtcctaggtcagtagtccctggaagttttggtgatgaggacatggaagggcaggcagaggcactttgtacttgctccaaagccataggaattttcatcttccagagcctttatgagtcacttctctatccacagtcttgagcctgtggctatcccgctgagcttctcactgtcctccaaaaacaccccgctgagcacccggaccactttgtacacattaacactacaggacataaaatgcagaggccctgagat

SEQ ID NO: 13077 - DNA, 1220 bp, Homo sapiens
attactctatagtagttttttcttagttgttgactagttttttccttttttccttcttttgccttcatattctagatttggcttacttagattatagaatgaatatatatcatatttgtgcacacacgtgcatacatatatatttaaattatttcatgtgaattttagtctttttactccctaatcctttataaaaacatagaatcacctgtatctaagtttctttgattaactgaaacagagatagactaggcttttaaaaatgtactattaagatatatgatggaaagtggtattcctgccaaaaaattaactaatttattcatatagaacctagaaaattattatatgagtttatgtagctttgttaattctccagatttcaccagtaatgacagattattaacacaaataataagataatgcctagagtgaccatatttcctggcttatccaggctagcctcaatttacacctgttatcttagcataattattaataaatgacccctttctctctcagaatgtcccagtttgaatgataaactatttactctccttatatatgctttgggtaacatcttaaaaaagcagtctttgaaaaggaaaacatgatgcttaatgaaaagtataaagaaaaaaatacatagtttattaaagagaaatgtgcactagtgatattctcatgtatccttctagtcttattttctcatatagaaccttaaaacataacccaaaatggtcacctagttcagccccctgtattcttgaccttgcattctctgctagaaacttttagtgattaagaacttgttttattcaaaagttattccattgtgggtcagactttctaccatcttactcaccatcatccaaccacataacaatttttggtgataattatcaagcttattaaataaagaaatacacagattgtaacatttacattttctataagtttttgccaaaatactttggtatatcctctattgaatggatatgtattaaaatattgaatatgctgaagttgttcagctcttcagatagtgctcattattaagtctactaaaggactacaaatattatacagcccagcaataattatttagatttctagcaattttttttcttttttaaaaattgatagatattagatgtacatattttcagggtatatgtgataatctgatacattcatataatcaaatcagagtaattggg

SEQ ID NO: 13078 - DNA, 1879 bp, Homo sapiens
tggcaacatagtagtagtaactctagagctaatagagggaatgaaatataaaaatatttccttatttcatttccttgagagagcctgagatcatagaccaaaaaatgaagtgacctccataactaagtacaacagactctattttcaaaatagaaatatcttaaaaatagaaagttctaagagtctaagaatgaaggaactatttttgtatcttcagatcctaatgtatctccatgtgatcttgggcaagtcacttagtacttccgtgttcgttagctcccattttgttagcatactataaatactcaaaacaccaacattttgtttgtagacggtagcatttagaacattaatagcatctttgtgttttgttgttgctgctgttgttgttgcttttgtctttgaagggactactgtgatttttgcttaaacataccctgtttggggatgattgctgtggggggataactttaattattttaaagtaattgtgtatatttttcattctttatttctttgcttagcagacagaaggtggagcacagacagacggccagcagtcacagacacaaagtagtgaaaattcagagagtaaatctaccccgaaacggctgcatgtctctaatattcctttccgcttccgggaccctgacctccggcagatgtttggggtaagtctctgaagtctttttatggattttacaattaaagtagattttaatcccccagatgtgttattagtcattattactttaggattaaactacaaatagattgaaagaacctgaggtaaatcagtcttttcatcagtctttagaagcctttttctgtcatccagtctgctctagacatagtcttgcaggtggctgcacacataaggtggcgatatgacccagcttgctgtgactgaggggtttcttgtgatgtgagactttcagtgctgaaaccaggatggtcaccctactcacctaccaaactcagtaaacataccaataatatgcttagtttcatctgcaagaacaaacatgcacattcttttagagcaatgattcctaaacttgtttgcacactggaaattacctgggaagcttaaaaaatattgatgcctatgcctgacattctagggttgtgatttaattggcctggagtgtggcttgggctttggtatgtttacaaaatccccagctgatactaatgtgcacataagtttgggaaccattgcttattcatcctgtcgccttctttgttttttctttaccttccatataagtccagctcaatactgccttcctctcctcttatctccctcaactccaagaccaaagaaactaggttcagggatgcgttattgccactctctacttagctttgtaatgtctaaaaagattcacaatgtagagaatacaggtttagaggtggcttattgaagtggaaagagtatagattttggagtcaaagagcctgggttcaaattctattcgcatgtgaactttggaattcatgtaacctttttgaatttaaatatcatatttataaacatagagacagtaatgtctacctttcagagtgttataaattaaatgaaataacatttgtgaaaacagtacctcagtgttttgtttttataatacgttgttgctcatactgcacagtgtcaagaccaatatctaaaatcattgtagaggattggtttgctacctctgatgtattctttcaactgtttatttcctcctgaatcaccatcatgaaaaaaagttaaattgcaaagatttgagttgttgggaagttagtgaatggctgctaaggatcttaattttttctgagcctgcttgttattgctttttgaatttgaccaaactcttaacccagagataatcaa

SEQ ID NO: 13079 - DNA, 1217 bp, Homo sapiens
aaactggtgctggtggtttattactgaccccacccatccctgtcttttgcaataatctttgtgagtggtgattgtgtttctagaagtagaattgcagagagagattccctgaaggcaaatacagagagagtgtgctgtacactctagttcagatactcagagctgggaactcccagagagagagagagaaagagagagagagagagggagggacggagggagggtgagagggaggagagagaacaacagaacagtcagctggagcggaggggggaggagaccagtcttttcttttttttttttttaggattttttaactcaagtgattttggggggtttctccccacctcaaactcttgccccccagttttggcatcttctttcctgtggttcactgaagtgcctttttgcagtccaggatccactgaccgctgagtttgagcagcccgatctgacatgatgtacctctgggtgagtacagagtgctgtgggtgagggtttgcacttgcacatataaggagtggaaagctgcgaggttctgctgttgcacaaatggcctccccacagagcacagactgccacatccccttctgttccaaggtgttaggtttttaaaacctagcggtgattgtgacattgttttttttcctccccctatgttgtttatcttgtcagacttaggcgcaagggctgaactccctgcgcagtaccatcccctgggcttggtaggtttggagaaggcaagtggggcaggtgaagttgtgagctggttgcttcaggaactgcagtcttcctggtggctcaggatcgacttgtgttttgttttgggggtactgaccttgttaagccatgtctttagatattgagagccaataggcggcatgattattaattaggaataagctttcataagcttttatctaataatttttactatccttcacaatagtcttgtgaaataggtcactcactactgttattaaaattgtgtgaggaaagtaattaagccacaaagagtgacttgcccgtagttagaaatcaagtctatagcagttagaatagtaattaataatgagacattataaagcattttatatttgccaggaatgtagtaccttctattactgtaatttaccgtcaatagtagcattgtagtttgggatggagagaaactttctgggactggagaagtttgtaaattatgaaatgtgataact

SEQ ID NO: 13080 - DNA, 1459 bp, Homo sapiens
gtcttccagggtggtttacatcccctaactggaaagtggcagccatatctacgccttctcccatgagtcgctactgctgcatgtggccagtgcctctgtctagaccagcttctcagatttcggtgtgcctgagagttacctggggcttttgttatcatatgattttgattttgtaagtctagggtggggcctgagattcttcaaatctaaggagtttccagttgatgctcattctgctgttgctggtccatgtgtcacatttgagtagcagaattctgttagagattgccctgtgggaatccctgctattttaagctgagaggaagtgagggaaaaagagcctcattctttcgacttttttttttttttttaagtcagcttcatagacaatactcatacatctcatttctctacctcagtgttgttttggtgagtctgtattgtctctaccagtccaggaagtgataggaatataaactatgtatagagggttgcctcagatttcttctgaagaatttttagtgcctgatttctcaggtacatttttgagaaattgtgctggctcccccggtatacctacttccccccgctatcctcttacaaccacagagaaactcgtataaaacaagtagcctgccagcctggccaacatggtgaaaccttgtctctactaaaaatacaaaaatagctgggtgtggtggcaggcgcctgtaatcccagccacttgggaggttgagacaggagaatcacttgaacccgggaggcggaggttgcagtgagccgagatcatgccactgcactccaacctgggccacagagtgagactccatctcaaaaacaaacaaaacaagtagcctcttgaattattggagtcagaggcagagcatctaaaatgtggctccagaccctttctgcccaccagactcacattgcaaaatccagcatttttgagatgtaggaattcaggaagcaaggttagaattattggcaatacccatattgctgtcccagattatctgatttttctttctcagaagcaagcatgccagaaacttcttctgtgggccctcctcagaagactttctttagtgctcaaatggacacattctctcctctgaactaacagatagggtgataagctatcagtcacaaagtctgataacatgctctcctgatagaatgaagtatgtgtgcatcttaatctctgtgtataagactgtgattctttttagagtctctttatagtgtggagtttttacacctttttgtctcttaatgtgaattgtatatagctataaagcatagctttccttatttgactttgataattggaaataaatttttttcttctcctaccactttgttcccccttttttctttctttctttttttttttttgttttgttttaaaggtagaaaaatgtgaacatgcaggagcatgaataaaaaagataactta

SEQ ID NO: 13081 - DNA, 1132 bp, Homo sapiens
ctggttgtgtctgaggggctgacaacagacagttctaatctaatctcaaaccttttacttgctggactggttcttaatcccagaaaccagcctgaggtcaagaattggttcctaattgccataggtataaaggtggcgctcctattgagggagttttcagtgttcctgctctggttgtcaccagtgtggcttgggagatggtttatgttggtctgtcccccctctatggatataaactaattgttaaacagttactgactcctgtaagtttagacagtttatagcgccagcctttaaatttcattgtgaaatataatcttcagatttattagaacagtttaacggaagaaaataagagaaagagctctaaaaaggtgtagactgtcaaagaaggctcatggaggaagcatcagttagaggactctcacagtactttataattacctcatcattatcaagtattggactaacattgtctttgaacatctctctctgttgcctgtagattataaacttcttgaggatagggcagtttctgttctttttttgtatttgactctggccttcttgatcgatttggtaaatatttattgagatcaattaaaataagatgctttaaaactgagcacaaaggacaagttacatttcagtagcttagtagtgaatttaattctgcaggtcttggtgctgtacttctttggtgagtttgctgggcccagatggctaggcttgtactttccttagacattttaatggcctgtcttggttgtgatgtctctaagcactaggaggacagggaatatggctcatagaagagggtgccaactgagagcctctgtccattctctccacccccacacaactcctttctgtacagtctttggtaggtaataacatttctttaaagtgatgattcctaggtgaaaccggaggccagttttgtgtgtactcttatgttttattaggtgtgtgggatttgaggaagttgtggtgctggaaagaatctgccttgccccatattactggtgaaaaaatagagacctaggaaggataaataatttattccaagccatatggctacttagtggccatcaagactattgtccaggtctccttagtgctagacatttac

SEQ ID NO: 13082 - DNA, 1852 bp, Homo sapiens
ttgcttctttctggtgggagcagccaggcacctggtttccctctcgaattcactttgagatgtgtgggctgtgctgtggccgcccctggcctggccgggcccgctgaccctctgcttctacctctgcccccaggcgcggggacctgccgtttgtcgtgccccgccgaatggcccggaaaggcgccggggatggctccgacgaagaggtagatggcaaagcggatggggctgaggccaaacctgccgaataagcctcttctcctgcagcctgagatggatggacagacagacaccacagcctccccttcccagaccccgcagcacgcctctccccaccttcttgggactgctgtgaacatgcctcctcctgccctccgccccgtccccccatcccgtttccctccaggtgttgttgagggcatttggcttcctctgctgcatccccttccagctccctcccctgctcagaatctgataccaaagagacagggcccgggcccaggcagagagcgaccagcaggctcctcagccctctcttgccaaaaagcacaagatgttgaggcgagcagggcaggcccccggggaggggccagagttttctatgaatctatttttcttcagactgaggccttttggtagtcggagcccccgcagtcgtcagcctccctgacgtctgccaccagcgcccccactcctcctcctttctttgctgtttgcaatcacacgtggtgacctcacacacctctgccccttgggcctcccactcccatggctctgggcggtccagaaggagcaggccctgggcctccacctctgtgcagggcacagaaggctggggtggggggaggagtggattcctccccaccctgtcccaggcagcgccactgtccgctgtctccctcctgattctaaaatgtctcaagtgcaatgccccctcccctcctttaccgaggacagcctgcctctgccacagcaaggctgtcggggtcaagctggaaaggccagcagccttccagtggcttctcccaacactcttggggaccaaatatatttaatggttaagggacttgtcccaagtctgacagccagagcgttagaggggccagcggccctcccaggcgatcttgtgtctactctaggactgggcccgagggtggtttacctgcaccgttgactcagtatagtttaaaaatctgccacctgcacaggtatttttgaaagcaaaataaggttttcttttttcccctttcttgtaataaatgataaaattccgagtctttctcactgcctttgtttagaagagagtagctcgtcctcactggtctacactggttgccgaatttacttgtattcctaactgttttgtatatgctgcattgagacttacggcaagaaggcattttttttttttaaaggaaacaaactctcaaatcatgaagtgatataaaagctgcatatgcctacaaagctctgaattcaggtcccagttgctgtcacaaaggagtgagtgaaactcccaccctacccccttttttatataataaaagtgccttagcatgtgttgcagctgtcaccactacagtaagctggtttacagatgttttccactgagcatcacaataaagagaaccatgtgctacgagccgtgtctgtagcatttgtctgcggccagggggccctggacaggactaggcctggcttctgcagccaatgccggctctgcatcgtcgggaaccagattggctgaggcgtaggctgagctagctgtgggcggttgtgcagaaaagctaagatggaaaggtgggctaggccagatccaaggaggctaagagcatcttagaaaccttggttc

SEQ ID NO: 13083 - DNA, 1015 bp, Homo sapiens
tgtgtccccagggtaggcccctcacttctcccgcccaccccgcagagccctggcgttagaggagaagcggcgtctggaggcccgcatcgcccagctggaggaggagctggaggaggagcagggcaacacggagctgatcaacgaccggctgaagaaggccaacctgcaggtgggtgccaggacttctcccactctgggctctggctggagccaccacggcagagctggccttggacccagccggcagaagcacaggccaagtgccagctgctccccaggcgcttaggggaaaatgtccaggcacctggacctgaaaggtccccctctggcttctgtgttgggtgttcagaagtttctaatcttcccttttctgggagacccaagactctggaccccaagggtttggtgggatcctgctgccaccttcctctggccctgctcatgccctccagccagggccccagccctccccaaggtcactggcccttcttctgcagatcgaccagatcaacaccgacctgaacctggagcgcagccacgcccagaagaacgagaatgctcggcagcagctggaacgccagaacaaggagcttaaggtcaagctgcaggagatggagggcactgtcaagtccaagtacaaggcctccatcaccgccctcgaggccaagattgcacagctggaggagcagctggacaacgagaccaagtacgtgcccctggccccgcccaaccccagctgtcctggaaaaaactctggcccccctgcagtcctgcccaaatctgggccacaaccagctctctgtctcctgagcctggggctgtttccctccctcctgatggggccctcatcccttccacaggttgggtggttgggggagcttgtggggtttgaacaggattctctgttccacctctaaagccaggagttttggtggctgtgtctgagagtgaatcagagcaggaggtacaggggggtcctgcccactaggacagttgtcctatgggctcagcagga

SEQ ID NO: 13084 - DNA, 1158 bp, Homo sapiens
gagaagcagctggctgcggagaacaggctcacggagatggagacgctgcagtctcaggtgggtgtcagtgcaggctcagtccaggtcgcacgacctgcctggtgctgccacctgctggccatcggtaggcacggcatgctggaagtttctattactataggagttttctacaactgagtttcctattactgtaaacagtgaccagtctctctgcagaccccattgggtgttaagtgatgtagggaggccacttaatagagtggaacgttcacaagtgttgggttcaaacctcagctctaccacatgacttgagcccatttcctgggaccttgctctggagctcatggggtagtgaaaaatcaaggacacgatgtctggaaggtacctggaagcttcagagctctccagatgaaagctacttttgtctgcatgttcctttccctctgggatcccgagccatggcgtccgtccttgaggatggagtggcttgagggtgttgcgaggagcttgtgttttccacttgttgtttgcagctcatggcagagaaattgcagctgcaggagcagctccaggcagaaaccgagctgtgtgccgaggctgaggagctccgggcccgcctgaccgccaagaagcaggaattagaagagatctgccatgacctagaggccagggtggaggaggaggaggagcgctgccagcacctgcaggcggagaagaagaagatgcagcagaacatccaggttcctgcccgctgcacccggggaggggtggcgccggaggggcagggcggggcggaggagcaggaaccaggagctgggagaacatggaattagggtccaaggaggctgctcctcacgcaatctgcttggggctctcagtgagaggtgttccctttgggctggtagtttgtgacatgtgcatctgagatctccatgagcactgcctgggccagcatcaaggccaatttgatttccctgccattagccctggccctggctagccgaaggggcacagggccagcacctctgcgtcctgcctgtttcatgggtgggagcttgctgcaggaaacccttcagaacattgcaccgatgttctggccctgtgtcccagtttgaaatctggaatcctacaaatggggcttgggccctgcctcggctg

SEQ ID NO: 13085 - DNA, 1164 bp, Homo sapiens
accctctagtttaggaggctgcccaattaaaaaaatatatttaaaaacagaatatatttccaaaaagatgaaactgacacatactcagagaaaatgtgaacattctaaaaagacaaagaaaaaacaaaaattacttgtcttatgactaaaaagaaatagtaacattttgttgtccttccaggattgtttttctttgttcatattacctaaaaattttaaaaaagctgaaacccagcacggtactgtgtggccaccatgccatgtctagagccaggctcccgttgttggccatgccttgctttgaggctttggctctgcacgagacgccgcagagaacgtcttgatgcctcgctccccttatcctcaccacttccttcttaggggtggaaatgctggatcaaagggtcttcacgttttctgacttttccatgcatggggttagcctgtgctccggagaccctgtgagcacacatgtccccagcgcagcttgtgactcctgcctctctgaccccgccaggtggattacaaagctgacgagtggctgatgaagaacatggatcccctgaatgacaacatcgccacactgctccaccagtcctctgacaagtttgtctcggagctgtggaaggatggtacgccctttgcccttcgccccctgcctcctcttggctgcggctggtcatcttcccacctccacagtgggccgagctgccaaacaaggggtacacatgtgccccctgacataggccaggtggtctctgccctctgtagctcccatgagagagggctcctcggaccgaaacaggaggccactgccttgcgcacacaccgtggccgggtcctcctgggcggagcgctttccgtgtgtgggaaagtcaagggcagccccgagcctcgaagcccagggtcccagccccgcgccatgttgcattcccgcctctactccttggtaggctggttgctttgagtggttctttttaattctttctgttggtttctccttttcctttgcctgggttttgctttaacctctctgttgcagagatgcagagcactcagagagcctatttctatcatcgctttcctattctccacctagaaccaggtgactggccgcccgagtggtgtctcttgtgtgtgtggtgcgtccaaagctgtgcaaga

SEQ ID NO: 13086 - DNA, 1201 bp, Homo sapiens
gtaggcggcttcagcagttactaactcacggcgagtcttggctcatcgtttgtcttatctccccctgcccctctgcccactgccttattttgatgagatcgggcgcgtttagggtggtatggccgtagactgctgccttattttgatgagattgggcgcgtttagggtggtatggccgtagactgctgccttattttgatgagatcgggtgcatttagggtggtacggccgtagaccactgccttattttgaagcatcactttttctgtaaatcctttagtgtgtcctcattttatttcaaaagatctaagtttattgtccccatattgttagatattaggttgtttctacttttcatcattttaaataacaccacagtgaacatatttgtgtacgaagatttttttttttcccccacatacttagggctgttcctctagggggaggactctaaaagtgaaattactggggcatagggtatgagggttttcagatcctttgtatctgacaccacgctccccgggtgtgccccgcaggctgactttgccatcgaggccttggccaaggcgacctatgagcggatgttccgctggctggtgctgcgcatcaacaaggctctggacaagaccaagaggcagggcgcctccttcatcgggatcctggacattgccggcttcgagatctttgatgtgagccttgcccttcattacccaccctgctgcctccttggcctgttggttgccttatccttggttaagaaccctgcttctcatggtcctgcatcgatctgagttggccatctcctttgcatgaagactttggttgggtgtggggttgtttttttttttttcttttttaaaagatagggtctcggctgggcacggtagctcatgcctgtaatcccagcactttgggaggccaaggccggcagattgcttgaggtcaggagtttgagaccagcctgaccaacatggagaaaccccgtctctactaaaaatacattagccgggcgtggtggcgcatgcctgtaatcccagctactcaggaggctgaggcaggagaattgcttgaacccgggaggcagaggttgcagtgagccgagatcacgccattgcactccagcctgggcaacaagtgtgaaactctgtctcaaaaaaaaaaaaaaaaaaagtcagggtctcgctttgtcactcaggctgga

SEQ ID NO: 13087 - DNA, 1223 bp, Homo sapiens
ttgggaggcccaggctggcagatcacgaggtcaggagatcaagaccatcctggctaacacgatgaaaccctgtctcaactaaaaatacaaaaaattagccgggcgtagtggcgggcgcctgtagccccagctactcagggggctgaggcaggagaatggtgtgaacccgggaggcggagcttgcagtgagccaagatggcgccactgcactccagcctgggcaacagagccagactccgtctcaaaaaaaaaaaaaagaaaaaatagcagtggaccaggtatcaccatttaattgacatttgatcccaagtgttgctgtctctgtgctgccctgctctgaccactgatatcccttcccctgttagttatgtgtctcggtaccacgtgaaagactcctcacgccacgtcatcctaggcacccagcagttcaagcctaatgagtttgccagccagatcaacctgagcgtggagaatgcctggggcattttacgctgcgtcattgacatctgcatgaagctggaggagggcaaatacctcatcctcaaggaccccaacaagcaggtcatccgtgtctacagcctccctgatggcaccttcagctctgatgaagatgaggaggaagaggaggaggaagaagaggaagaagaaggtgtgtagcagcccactttctgaggtctagagtgatctgtgggctagcacgggagcaagctctgtagccattgtgatctttaaccttgataaaacttcgagaattccctgagacttaagtatgaagaagcattcactttggctccaagagcttcttctagagcctttagatcacatcaagtggttggggaggatagcggtgttttagagaagcggctggactgtggcagaggtagaggaagatgagggaagtcccagattgaagccggtggtctagagggaaaagctccgctccgggttaaatagcctgaaagttgtctctcctgctccaccagctggtgactgaaggaaatacctgcccagccctgtgagcatctgaaaggcttaacttcggaatggaagtgttgaaaactcacgcacagtccagcagaggttcagaaaggaaagtgaacatcatatcacacaacctggctcatttctcttacattttttgtgtctttcagaggaagaaacttaaaccagtgatgtggagctggagtttgtccttccaccgagactacgagggcctttgatgc

SEQ ID NO: 13088 - DNA, 1109 bp, Homo sapiens
taaaaatacaaaaattagccaggtgtggtggtggacacatgtaatcccagctacttaggaggctgaggcaggagaatcgcttgaacccaggaggcagaggttgcagtgagccgtggacacaccactgcactccaacctgggtgacagagcaagactccatctcaaaaaaaaaagtgtttatattctgagcctgaagcctgaggtctttattaaaaagcttgcaaaatcattctcttgaggaatccaaaacgactgaaaagggacagcttcgttactgtgtgattgaattgaatgttggacagtatcttgagttatcctggagcagctgccccactcccccgcttatgtgttccacaccagggagacccactttaggagagggcagttctttgaaggaaggacttgtgttgtttgcctctccacatctccccacagcgctgcgcacattgtcagtgactctttgttgcatggtgagtgaccatgccacgcttttgcagacctcctgacagtgagtgagactgccaatgagccccctcaagatgaaggtaattccttcaattcaccccgcaacctggccatggaggcaacctacatcaaccacaatttctcccagcagtgcttgagaatggtgaggaaacgagtctctgggcattgattcattcttatttaatcagctgctgtttgtggagcatctgctttgtgctaggctcttggttgtgggactgagcaggtcagacgcagtccccacctttagcaggggagttacatgcctgggcttggatgttaggctctctgactttgaacaaagttcctgcccttacagaatttaatgatagtggaggaggaaacacagtgaacaataaataataaattgatttacatcaaatggtgaatatatgccatggcaaaaaaatgaagtagagatgagcatggttactaagtcattgttctaattcatcaggtgctaacagttgggaggggtcaagtaggcacaaaacaggcagcgagctcagagccccatcaagggccccaggaacctggccagggctgcaactaagcagaggtgctgggtctgactgattggccttggccttgtcaacaaagttagc

SEQ ID NO: 13089 - DNA, 1428 bp, Homo sapiens
aaaagactactaagtcttagggaagttgagtttgtatgaattggtgaaggtatatctcagaaccaaaacaaggttactatatttgaaaaaacattaggacattttatcaaatctgacaccattaaatttttttaaacacttatgtaacacagaaaaagaaaaactaccaatcaatacaacaccctgtcaaacacaaggtgcagcctcattttaaagatgttacagtaaaaagagagtgtcgtggaattaatgaaatatgaaaaatcagttttgtttgcattcttctcagttttaagtacatattcacagtataattaacaaaaacagtagtagtcgctcaacagttgagggttccattttgcgtgttgctttttgagttctatcatttatgtctttgcttacttcatatggagggtgttttgtactctgaggccttcgttcatgccgctactcacatgatttatatttttcagattttggaagatggcaaagttcatgacacccgtgatccaggacaacccctcaggctggggtccctgtgcggttcccgagcagtttcgggatatgccctaccagccgttcagcaaaggagatcggctaggaaaggtacatgcctgtcagcaggagtctgaatctttgcagctgtggctgctactctcgagtccctgtttagattttattgtctcaaaatcttaactcctgaatttcttatagggatgccagctgagaaaggttatctctgggtgtagtcatagaagagctgggcacttacagaggtgttgtgaacaaattctgagactcttccacgctgtcctctcgcgctcagggatttctggttctgcagaaacttgcctggttgacctgtgcattctctgtcttttcttgttcttcgtaggttgcagactggacaggagccacataccaagataagaggtacacaagtaagtgtttctgcaactgaatgccccaatcagggccttgggaaagttgttctttattctaatgaccttcttctgaaagctttttagaatgggaagaaactgccaacaataattcataacttttagggatgtattctgggctttaacaataaccacatttttggaaatagccctcaaaacttagaccattcattaaagaggtctagcctattaaaatggggttttgggcccttttaaaaacctgttgaaaacattagctgggcgtggtggcgtgcacctgtaatcccagctactcgggtggctgaggcaggacaatcacttgaacccagaagttagaggttgcagtgagcagagatcatgctattgtactccagcctggtgacagagccagatcctgtctccaaaaaaaaaaaaaaaaaaaaaagtaaaacccctggttttaagatcctggtaccataaaaaggctttttctctctgccacttcaga

SEQ ID NO: 13090 - DNA, 1176 bp, Homo sapiens
cccagactgcgggcctgcggggaagggcgaagcggggcgggaccgggggcgggagcagcgcggggcgggaccctacccgcggcccacgcggagccaggaggcgcggactacagctcccggcctgccccgcgtgcggtccccgcccgcccccagcgcccgggaggaggatgcagacgccgcggccggcgatgaggatggaggccggggaggcagcgccgccggcgggggcgggcggccgcgccgcaggcggctggggcaagtgggtgcggctcaacgtggggggcacggtgttcctgaccacccggcagacgctgtgccgcgagcagaagtccttcctcagccgcctgtgccagggggaagagctgcagtcggaccgggtgaggcccccggggtgggcggcgagcgggcggtgggtcctccgctcgcccgacgcggggctgtcgggcctggctcgcccgccaggctggggacccggccgggttcatttccgaggaactggaggcgggaagaagcggcaggaggaggggagggggaggtgggtctggtagtgagggatgtacccattgccgtggcaacgggacgacgcaggccgcggccattagaagctctccagccgccccggatcggggcctctccttctcctttggggctgtggacagggagagacctgggacctttcctccctcccaaaggggactcctgctctggggaaggagtcgacgaggctacttctcccgctctttgggatgtgggtggcggatgggtgcagggagctagctggatggaggagccctggggcgccttctgagcgggctgaatctagaaggagcgttggcccagcgggcactatttctgagcacccaccctgactctgctgcacactgcctgccgcgaccttgagtcggacccttccctgcactgcgctcagcctccttcctcatctgtaacacgaagggctggtctgaagatgacctctaaggtctcctgtcccccatccgtgaccctccgatgctgtggcctttggcaagtcgcctcacctctcaatgtctccgatctctctgtagagtcgcatggaagcccaccctgcctccctgcccgcccgagtgtccagtgagatagtgactcctttggaaacttgtaaacatcccctgaaagcctagggacctgggggcgaca

SEQ ID NO: 13091 - DNA, 1469 bp, Homo sapiens
ccagccctgagcaacccccatcccacccccttcagagtcttggcagaatctggcctctgtaggtggccgccaccgagcccaagacggggcatggggctcctggatgggttagttggggagcccttgctgctccccccaactcagttctgaatccaccttctttgggcctcagccccaccccctcctccagaaggaagcctgtgactcaactgcctctctctctctccctctcccccacccgtcaatctcctctccgcccccttgccctgcatcaccccctccttaccggccccacctccgcccctcccatcctcctgcccttcccctcttttttttctagctgttacaagccagaggcacccggatgtgaggccccagatcacctccagggacttggggttcccatctgaaatcctttatttttgtaccatggggtgggccccgggcctgagaaggaagaagcaccctctccccggcctcctctgtctgcacccgtggggctgtgacttactcctgcctccaggggcggggcggggcccccctgggacctcttaaggcccaaggtgggccccaggacctctgggcagagtggactgctcatggcagatgtgtggcaatgtctggctgtgtctctccggcacctgcgtcccctctcccgggctcccctgctgcatggtggatgtgctccttcctggcccggtcacattgcctccttgagccttagtccagggggtcactcctcccaccccacctacctcacagggttgttgtgagggtgcacagaggagcaaagtccctgaaggccctcaggcagtatataggggccgcccaccttcagctgccctgggatgggaaggacccagcccgacccctgggcataacactgtgtttgcaaatggagattcaggtattggggatgcaggttgtggggagctggcctggcagagtaggggtagttggcttggccttctctttggtgatcccacccccagccatttgcattgctggcccagcgcctggcctggggggcggggagaggcagcagaaggggctgggcaggggcggtggaggactcaggaactgcccggggagagtgggtatggcggctgagccaggggccctcctgtgtttgacttcccgggatgggtccttgcttctcagctgtgtccgaccccaccatgtaataaaacccaaaggaacagcccagcctggctgttgccctctttctctgggccacttttggggacggggctaaactaaaggtgtggtagtctggtccaaaggaacgcggctttgtcccaaaagcccagggacgctgccctgttgtcattttcctgtgtgtgttgcagggagggcttggggaactggctatatcctttgccctggggccggataccagagcacctgccctacctggccgggagccagaaaacagaactctagggagagccctgggctgcctctgccac

SEQ ID NO: 13092 - DNA, 1185 bp, Homo sapiens
ccacctgaaacctggggtagcctctagaacagaggggctggggagaggaaggggcagagggaccggtcactgtccagcctggagggaggcattggtggccaaggacaccctttgttgcccatggccattcacccccaggcctggtgcttctccccacacccctgtaggcctcaagtgactcttccccctcctgctccggccccgcccctgctgagccaaacccagtaggaggctgggcctgggtttgtgccgctggggtctccatcaccgggacctggagagggaggggctgtgtagccttggaagaacttgggtcatggggaggaagcacagctgttggggaagggccaggacctcaggcccagccccaaccccagctggggtggggtcttccccacctgtctcttatgccttatgggaaggcccagccataactcgggggccatgctggagctggggaccagcttaggcctcctccataggaacccagtgactggggggtgacgcctacacccccagctatttgcactctggtgtgtggtttgactctgcttttcttccggattggccctgtggtcacagcctcagggggccaggctgggggaacctcacctggcccgtactcctgggggtttccctttgccattgggccccctgagggactgtgggggctcaagggtaatgccagaggcccatggccccagcgaggggctgtggggcacctagagttctcggtgtgtctccttcattcattggcctctgctggggcctcctatgggtgtcttacgtctgtccatccatctgtccgtggtcagaagtggggtcagtgtgtgagtgagagcaggagtatttatgaaaataaaacgtcgtttttcctggaccagctgctctcgtggccctttggaggttgagggagatgggaggggttgagtccatgttccctagggctgccctgtagacctctccacttccgtctttggaggtcaggccgtgggccccctccccaccaccccccgggccctgcaccggaaaaggccctgcaaaggggcctgtggccagtgctgagtcaccagagagggcgctgggctgtggcggaccaggaccgtcccagctggaagtgggcgaccgccagggcctggcaggagccccagctgctacagacaccgagggggaggcccctggctg

SEQ ID NO: 13093 - DNA, 1239 bp, Homo sapiens
aagtctcaaatattacagagactccactgctgaggaggtgaggccatgggtgtactgatgaacccccggaagggcctggggtggcctggctgggttcactggggtgggtcacaccagggcccacacggaccatagtgggccctcttgctccaggcagatgagctggatggtgagatcgacctgcgttcctgcacggatgtcactgagtacgcggtgcagcgcaactatggcttccagatccacgtgaggctgtgtgcagcttgggggctggtggtgggcagcatggctggaggtccctgggggaggttttggtgttgaacatggctcaccatggagactggatcccttcactcatttacccagaggccctatcttcagagccagagctgtgatgccaacacttagcatatctgggggagacgctggagccagcagggctcttcccaggccaatggaagggaggttttgtaccccctgcccaccccagactcaagaccttagatgcatcctgggaaggaagggccaccctccctggggtccatagtggggagggagtcatgcggctggccatgtggcaacctacccatgcggtggccttgcagaccaaggatgctgtctataccttgtcggccatgacctcaggcatccggcggaactggatcgaggctctgagaaagaccgtacgtccaacttcagccccagatgtcaccaagtacgtactaagctggactggggccttgagggaggcacttacccttgcgtccccgagtgggtttctaggtactcacctgagggctgcacctttctgggccctcgtttctctgtcaacaacatgggaagagagtagtgagcattctcggtatcatccagaagtacactgagggtttgaggtttgatctgtcttctcaaatgtgatggggcctcttctctttggaggagatgcctgtgagtcaaaagcccctgccaggtggctgttctgtctctgtgtctgtgccgtgggggccgtgtctaagcctgtgttaggaaggggtggttaggtagttcagccttggcgcccacacctcccgggatggggagctcactccttctggaggctgccacgggcactggggcaggagggctgagttaccgagtggcagagccccccacagtttatacccagatgcccatggcgggctgggacttggagctgctgggcagcgggaacagagtgtggtattaaagggggctgggctgggt

SEQ ID NO: 13094 - DNA, 1215 bp, Homo sapiens
ctgcctcttagagcttgtaactgtctttgttgatccttcttgcagacttgggcatagacctcgggcctggtccctgcaaggagcgggtgtgaatgctccacggccccttagctacctgtgacaccttgtgcccacaggttccgtagtaagatggaagctgctggcttcactatctcgggagccagtcaccccatctgccctgtgatgctgggtgatgcccggctggcctctcgcatggcggatgacatgctgaagagaggtaagggtgctgagacaagggaactggtggtgggtcctgagagaagagaaagggaaacccctagactgtgacccagccccgtacccagccacgctgcggcctcttaggccagctgtctgtctaagcttgaacaccccaagccatgaggcagtcccgaatctgagacctggggcagttcccttgccctctgtgttctgcccccaagcctgttggttctggcacgcccttgctttctaccctcccaggcatctttgtcatcgggttcagctaccccgtggtccccaagggcaaggcccggatccgggtacagatctcagcagtgcatagcgaggaagacattgaccgctgcgtggaggccttcgtggaagtggggcgactgcacggggcactgccctgagctctgggtaaggacgagaagagccaaggtccgcctactgccacagggtcaaaggaggttttcgatcagcccagaccagaggctctgagccctgaaccaaagtcccagagctgggctgggacgtgacctgtgctgagggctgtgagaatgtgaaacaacagtgtgaaaattggctgtgacactctggtctgctttattgtctctgggcaggcccagtcctgtggccggttgaagaatcaggcaggagccagggctctgaggggaggcgcctgaggactgcagatctccactgacctctttccctagattaagatgggacccagtggccgggcacggtggctcaggcctgtaatcccagcactttgggaggccaaggtaggcggatcacctgaggtcgggagtttgagaccagcctgaccaacatggagaaaccccgtctctactaaaaatacgaaattagccaggcgtggtggcgtatgcctgtaatcccagctgctcaggaggctgaggcaggagaatcgcttgaacccgggaggtggaggttgcggtgagccgagat

SEQ ID NO: 13095 - DNA, 1216 bp, Homo sapiens
tcccaaactggtggggttacaggtgtgagccacggaacgcggctcctcttccttctggatatggctgtctcagatggccagaggcctcggaaaggcttccggtttcccggcaggcccgagtggggctgaacttccggcctcaggacgcaggcgcgggccgctcatttcgctctttccggcggtgctcgcaagcgaggcagccatgtcttatcccgctgatgattatgagtctgaggtaaggtggccgtaagggcgcggtgggctccacgacggggtgatctctgggaccactggatgtgggtcccggcgcgaggcagcttccgggtcgcggccagctccggccgacctcccgcccggccctcaggctgctcccacagttcccggtccctagacaaccctggctctgcccgcccacttcgcgtgttcgattggcttgtccttcccctttctaagaccggagactaaggcctgttagacgtttctgtgtttctgcacctgagtttttttggtctaggctccgtctggtcaaatctcgctgattcccacagcctcttgtcctttgctccacctcattgcacccgtaatgttgtattgtcattgtctgtttactgtcccttttctctaaggcgtgtgagttcctcaaaggcaggcacagtgtcttattcgcctctgtatccttagctctctgcttggcatctagactctaggatgagcgttttgaattcacgacttggcggctgtccttgactgtgtctctttccttctaggcggcttatgacccctacgcttatcccagcgactatgatatgcacacaggtgagaccacgggttaggctggctgagtactcgtagggatcagttcctttggaatgtcttagaaccagctctgacaggcatcaaaaattgctctttgatggtccaggtttggagtcagtcattagctgccagtgcgaggggttttataaagcctaataaaccaggctttttatcatagtccacctcagtcttggaagagaaggattacttacctggctatggttttcttgtgtaaactattagccaaataagaaaagcttttttgtttttgtttttgtttttgtttttgagatggagtttccctctgtcccccaggctggagtgcagtggtgcgatctcggctcactgcaacctccgcgtccctcgttcaagcagtagttctcttgtctcagcctcctga

SEQ ID NO: 13096 - DNA, 1243 bp, Homo sapiens
gcctggcctgttcagtgttttttaggggaacttgagcatgtttatatgttggactaaaagagccagagaagcaggaggggtggggcttgaggagattggaggaaagtattaatagctgctgagggcatcaggagaagaaaattaaacaacctgttgcaggtttgtcaagtagcagtgtttggattggataggcagcagtgtttaaattggatgctgtaggtctgttgtggccttggactgcagcagactgatttgcttctgtgtttagagacgtttggatgtgctccaggagatggaaacgctgtgttaaagaatggtggccaaaaaagtagttcttatagcagaaaacagcaagcagttaaatatggctatagttaatgatacagaggcaggagattatcctgaaaagcttgatgggtccctaactgatacaaaaacaatattttcttgtgttgagaaagattgaagtgtggagttgggttgaggacagttgtgggcttgaagggctttggcctcagctctgtttatttgacatcttcccctttctaagcctgggtcctcatctgtaaaatgttaggattggcattctccagtccttttggaattttagagatttttttcttgatttttagctggaccaagctgactgaaagattcttcaagaatacaccttggcccgaggctgaagccattgctccacaggttggcaatggtaggtgtgagctctttatatcttgtgcactgagtggaatccagtggctgagtcattagacaggaagctcaagagggtctgtgtctgttttgctcaccattttgtttccttggtgcttggtatgtagtaggtccttggcaaaataacttgtcgaaggctggatgatttaagagaggacagagatctctcatatatggtgaaatttagatctttgtactgacttgtttctatttccttctataatttgggggtcattacagtcactctggaataagctctctagcttcccacctttgactttcttagatgatgtcctttatatatgggtgaggtaggcaaatccaacttcattattttgcttgtggatattcagctaccctggcaccaatttatttatttatttattttattttattattattattttttttgagatggagtctcgttctgtctcccaggctgaagtacagtggcacaatcttggctcactgcaacctccgcctcccaggttcaagcgattctcctaggttc

SEQ ID NO: 13097 - DNA, 1099 bp, Homo sapiens
gtgtcgttgcctgatttatgcttaagttgacagtaattttacccaacatagtgtttgcatcatgcaaaattcaactcagtgggaagggcaagtaacatcttagtgttgttattaggaaaatagctttgacctcatgtgctttctgaaaggaggagtcttcgtggttgtattttactgatgagaggggcctttgcatgtgttgggaccaaaaaaaaaataagcaaaatgaactgccatcctgtaagcaaatattggtaaatcgaagattagcataagattggttttgctgtttcttggtattcctttgaagttattccccagttgttgagggaagctttcaaggctggcagtaggtgagatgcctactgagtaacattcagaggtcaggtgtgcctgcctttacctgcctcctatcagtattcacggtgtctgtctctttcaggtgaccctgagagtgtggctggggagtatgggcggcactccctctacaaaatgcttggttacttcagcctggtcgggcttctccgcctgcactccctgttaggagattactaccaggccatcaaggtgctggagaacatcgaactgaacaagaaggtgatgcctattgcctctggcccctcttgccagagccagaatatctatttctagagaaccactctgatctcttaggacaaatttccaggagaggaaagaggactgttccctcaggccattgaaagttgagactaaaactgggcaaacagctgtggtaaaaagctagacctggacgattttggtagttaacaacagttttttattttgttttcaaaatggaatgatgatggcagcttgctctgtcaccaggctggagtgcagtggtgtgatctcagctcattgcaacctccgtctcctgggttcaagcgattcccctgcctcagcctcctgagtagctgggactacaggcatgcgccaccatgcccagctaattttttttttttttttttttttgtattttagtagagttggggtttcaccgtgttggccaagatggtctcgatctcctgacctcgtgatccgcctacctcggcctcccaaaatgctgggattacaggcgtga

SEQ ID NO: 13098 - DNA, 1149 bp, Homo sapiens
ttactgtactgaataccataggcagttgtaacacaaaggtatttgtgtatctaagatacagtaaaaatacaggattataatcttgcaggatcaccatcctatatgtggcccatggcccgttgttgactgaaacgctgttgcacggcacattactatttagtctatatttctgtcgtcatcaaggttgcatcaaaggttttgggtaactcgatcctaactgtgtaaaaggattgacctgctagtgatgtgtgggacaaactggagagactaagacagaggtgccagtaaggaatccagaagatggctaaggaggatctggagctaggatggaagttaggtagatctagagggaggattggaagagatgttggggaagttcaatggctggtatgaaacaactgggtaagtcaaagatctgtgcagagaatggtgaggccagttggcagtggggacctcaggaagtccgtctcatttgacccagtaccactctccaccccatccccagattaacaagcagaatgagcagatgcatgcgctgctggccattgccctcacgatgtaccccatgcgtattgatgagagcattcacctccagctgcgggagaaatatggggacaagatgttgcgcatgcagaaaggtgacccacaagtctatgaagaacttttcagttactcctgccccaagttcctgtcgcctgtagtgcccaactatgataatgtgcaccccaactaccacaaagagcccttcctgcagcagctgaaggtgttttctgatgaagtacagcagcaggcccagctttcaaccatccgcagcttcctgaagctctacaccaccatgcctgtggccaagctggctggcttcctggacctcacagagcaggagttccggatccagcttcttgtcttcaaacacaagatgaagaacctcgtgtggaccagcggtatctcagccctggatggtgaatttcagtcagcctcagaggttgacttctacattgataaggtatgcctgtcccctgggcttggggtcttgtattaagtgttcagtatctttcattcactattgtgggcacatgaagtatatcggggaacaaaaagattcctggccttgtggtgctgccacaaggtgccaggtgtggtggctcatgc

SEQ ID NO: 13099 - DNA, 1140 bp, Homo sapiens
cggcattcggcttctgaaaaccatcaagccggtaggtcctattgagcatgtgtgtgtctggcgtgtgagggtggggaggggagagtgtggcatgcagagaaggtcgtatgctggagtcctgtgcctgggtacagcctctggctcagtcacccacacagtggactgtgggtgagtcactgtgcccccttgggccttgccattgacctctgggctggcttctgaccctggctcgccactgagtcacagcttgccctaggcctggcactagtcttctcatccttgagagggacaaggcatcagggagcaccatctggctctgatagtcgagtccaccaacaagggtgacgcatcagtgccattcattgtcaccctggcacacccctgccgtgacagcctcagcatccacccaccctcttccagatgctgacggatctgaacacgtacctcaacaaagccatcccggacactcgcctcaccatcaagaagtacctggacgtgaagtttgagtacctggtgagtagtccaggtgcccaggctgctagggcaagcgcccaccctggagatctgccccacttcagtcagccatgctgcggccagcgaggccagccagagctgacagcatgtctgctccaggtgtgggcccagaggcccagggaggtgcagccaaagccctgctgcgcctgcacaaagaagcatctgagagcctggggcgggcatggctctcgctgtgtgcactctgaccccttgggatttgttgcctttaaacaatgggttagactaggtgagtgagcataaaatgggtgtcagtgaacgttcgtgagttttacatttaattattctacagtcaaaggaattgagagaaaatgctctattaagcaagccaaggttcctttgctgcaggacttatcagagcctttgctaggctgatgtgcagtgtgaattttcaagggtcttcctaagctcctttaacgacagacccctttttccccagagcatctcttgggccttgagtttggtcaactcggccgcctaagcctcaggccctgtcatccctcagcacctgccgctgcccgctctgggactccctgaacacctgcgccagcctctcctgctgcgtgtgggtgatgggggtggagctgg

SEQ ID NO: 13100 - DNA, 1247 bp, Homo sapiens
cagtgaagccctccctccctgcccatgcagagcctcctcatcccaacttccccttctttcctggaatcccctgggtggctcagcaggcaccaggccttcatgatgccaaagggaagggccacagccatgggctgggaccaggaggcctgggctctggtcacaggctgcatgtccctggggtaggtcacttccctctccaggcctccttccccatcgggtcaatgtcccctggggcattcaaaggtgctttccgacctgggtttctctggctgagtccagggcttggcgctaggttagaattcaggctgagccccggggtggcctccttttgtgtcccgatcctagtctggcccggtttccccttcccggattcctgctccccttcggggttttggatcaagtccacccaccacctcggcggctaaggcggtgaaagaggaacaccgcgggtggagcgggggggcccgtccccagtcccctggacctcagtttcctcatgcccgcagatcaagcgagagctgagcgagaacacgccgcacctgtcggacgaggcgctgatggggctgtcggtgcgcgagctgaaccggcatctgcgcgggctctccgccgaggaggtgacacggctcaagcagcggcgccgcacactcaaaaaccgtggctacgccgccagctgccgcgtgaagcgcgtgtgccagaaggaggagctgcagaagcagaagtcggagctggagcgcgaggtggacaagctggcgcgcgagaacgccgccatgcgcctggagctcgacgcgctgcgcggcaagtgcgaggcgctgcagggcttcgcgcgctccgtggccgccgcccgcgggcccgccacgctcgtggcgccggccagcgtcatcaccatcgtcaagtccaccccgggctcggggtctggccccgcccacggcccggaccccgcccacggcccggcctcctgctcctagtgcccgcccccgccatgcctcagccacgcccctccggcctcagctccctccccaaagtgcctgagcgccgcctctgtgcccaggtcccatttctctgcagcactggccccttggtgcacacacattcccttcgtgggccctgtcttcctcttgcagccccccaaactgggaccgaatgaccctgggaaggggaacttgggtaggttggggatggggcagaggtctggatctgggatcgcccttggctgaaagtttagcctttttagattgagagatacagag

SEQ ID NO: 13101 - DNA, 1219 bp, Homo sapiens
ttttggtccttcctggaatgaacaggttccctccctgccacctgtgaggagagttggggcccagccgtcttcctggcctccttcctttcctcgtggcagaggcctgcatgtgggtgccagaggccagctctccccctccatcttgggggggcggagcagttgggcccaagctgcccgggagggtgggtgcagacacaggctgaggaccagccctggccctgccccgccatctgctttcaccaagctgtctctccaccgtggcttcccttctccctccaggccaaagtgctgctgattcccactcccttggttttcgcctgcccagcgttgctgtttgcgtggagggtggggggagctcagtggcagggaatcagcggtccgtggggtcgtggggacgggaacatgtgcccgaccgctccatcccctcctcctccttaggatgcataacctaccttgtcttttttttttttaattttctttccaggtagagtagctctttgtacataaagaatacttgaaaaattaattgtatgatgtatgagaagacagagtctcctagttttgtatcttgttgtatgactgccatgagttccaccagaaagccactctattttggtctctgtgacattttaaatgcgtgacagaagtgagcaaataaagtgaggaagaaatctatatatgagataatatagattgtattgaaatctctgcctgtgggtgaggtttttccttcctcctccctgccccctgctctggctttggggtgggtggagtggctgtgggtacaggcggcttaggaaaccctctccttcctgtgtgtaacctttcagtgatgggggttcggattgatagggaccaaggtcaaggcccaggccccccttggacaaagggtctccccaacctccagccagttcccaacccaggacggccgggccgcaggcggtcgatgctccttccctgtttggtcaaccaggtccatggggcccacatgctggcagccccgctcctgcaggcatctcccaggatttcctgggatccccctttcagacgagcttcctgcgtctctgggactgtcctccaccctgggaccctcagggccagggaccctggggcagggggccgctggctgtgggcacagtgcctggcctctctggtaccgcatgccttcttggggcctggcttgctgctgacgggagcactcaggaatgcggtgtgggtg

SEQ ID NO: 13102 - DNA, 2127 bp, Homo sapiens
agccaggctctggggcccagagggagatagaccaagggacgagaagacaggagtttggggggccaagtgcagtggctcgcacctgtaatcccagcacttcgggaggcccagacaggtgggtcacttgaggtcaggagttcgagaccagcctggccaacatggtgaaaacccatctctactaaaaacacaaaaattagccgggtgtggtggcacacacctgtaatctcagctactcgggacgctgagacaggagaattgcttgaatctgggaggtggaggttgcagtgagccgagatcgtgccactgcactccagcctgggggacagagcgagactccatctcaaaaaaaaaaaaaagtagccagagacagctgtgtacctcacctgtcttttcccttctcccttctagtgtcttcactgtattttctttaaaaaaaaaaaaaaaaaaaaaaaggcaaaaataaaccactcaaaagaacaacaaaaaaacccagcacaaaaccgacgatggagtttgtttctttgatttctttgccaatggcaagaagatgagatgccctcagcactgaggattcttgcccccttgtggtgcccgctgcccccaaccttcaggctgccagatgctcccctgacaacaccaggctacaggagccagacgccagggcctgcccggcctcctgttcctgcccccacccaccacctgcctggagaggaacgggtcgggtccgtgtcggagaagtgacaggtcccagagccaaagccggccctcaagcatcatcagggagtggtgtagtcagttgaaggcagttcccaccgagttttccgagcctcagaatccaggagatacgcacagccccacccactctgagatgacagtggctgacttcccgtgctgggcttttccattgtccccctggcctccaggctcctcctctgcctctccatggagtgggtggggaggtggtgggggccggcgtcccctgcgtgtgtgtgtgtgtgtgtgtgtgtggatgtattgacctgtgtttcccaagacagcaggtgccacggcccgccccgcctgccagcccgaattcccgttctcctgtgtctactaacaaggacatgggggtgggcggtgacctccgcatccctcagagctcagagggtcctcgctgccaccggtccccccctagcccgtcatcagccggtggcagctccatcttccattcctggttttagggcagaatccatggagactgcttccagaaggcatctggctctgagttataaattacttccctggtcctgacagtcacctggggtcccccctctccctggttccacctttctgaggaggagcctggagtcagggctgggttttggattaacccatccttcctagttaacacctttttgtttttattttattttatttttgtttgttttctccgtgtgtgtgttttcctaatttatttacctctgtttcccctttttcctttttttttttaattaaagagcaaagctttttattactttgtaatttaaaaaactgaaaaaaaaaaaactgaagaactttggggggaattttgtacttttttcctgtgtaaatattggacttttttgagctttatcgtggttgttaatttgaagtaataaagtagaaaagataaagtgatgcaggcagccctttgtccacctctgtgcccttagggcctctccctgcagacccggaagtgggtcttgctgggagcagcaggagtcagtgaggaacaagccctcgccctgaaggcaggtgtggctggggccactttcagaacacttgggctgtggttgggatgtccgggggctttgaaaacacgagtgcacacaggtgccacgccacaggtgccacgcgggggtcttgtaaagagggctggggtggggctgagagcttccccctgcacactccaggtgtgctgatggcctggggcccctctttgagaagcaaggccctaaaagctcttcacacatgattttatccacacaagtatcctgagttaggtcctgttaatagccctgccttcggacaagaaactggtcctgctgtaaaatatcttgcccacagtcacagctctggtggcagaggcaagacgagccgaggtcatct

SEQ ID NO: 13103 - DNA, 1321 bp, Homo sapiens
gctttaacaatcgaacatatactgtgagccggccattaagagatgataccaagattatgcatcaagttataaagcagtcctttcatcagatggtaaattcttatttcatctccattttcttccagtccttaagggaaagaagttaagtcttccaatgccaatctgaggaccttcagagacagtctacgccttaacaagcacatgaaggaaactattttgaatgttctctttggcaacttatccataatttgggatcaaatgttaaaaccagaaaagtgtttagtgtggatttcagcaaaacctgatcatcccacccagaagaccttctcatcaatagatcgcccttaaagacccattgtaaggtcataaaaaacctcggccacctgcacaaagatggtgcctcactgcaacaagaaaccttaaggtgtcttaccgacgaaataaaaaacataaatgattgttctccaaggcctgagggcaagactcatgatgagcaagtcaaccccaatctggaacaatgtccctcctcttagaatgtcccaactaaagaccagttaaaatattagggtacgttcttgtgaatttccactttccaggtagatgaccaaatttaggtggtcaagatataaaggtgtcagctagttttaagtgtgaaacttatttcactttcacactgccttcaggccagaagcaaaccaaatttaccaggtttggctggaggagttttgtgactcatcttttactggtttgaattttttcaaaccagtggctgatacctgccttgtacttagtaccttaataccaataacctaatggtacttaggcgagtaccatttgcacaatcactgttttacttatgagcagatacagatatatccaaacccttacctactaggtatcctgctagggttttcaattccaattcttgtattaagttttttcctttcagttttaggtgcgaaagtaatcagtcaatccaatatcccccatctttgtcttgaaacaaaaactgttttaagacgtctacgttgaattattcagagaattaagcaataaaagctcacaccttattgtcaacagtgtttttatttatacctacaaaaagaaaacaagatgatggtatcaaaaggacaatttacaaactaagaatagtaacatagctttcagcatcctgtgcctgaacatcacacatctacaagtctttcaagtcttaatgcaacaggaatgtgtctggagaccagcaagaacatcaatagagagcactgatcccaagcaaaagccactaaccttttagatgagaagtccacacaacgaattgtta

SEQ ID NO: 13104 - DNA, 3394 bp, Homo sapiens
ttaaaaatcttcttgtatcttcccattaggtggtcgttctcgttaccggaccacttcttcagccaacaatcccaatctgatgtatcaggatgagtgtgaccgaaggcttcgaggagtcaaggatggtggccggagagactctgcaagctatcgggatcgtagtgaaaccgatagagctggttatgctaatggcagtggctatggaagtccaaattctgcctttggagcacaagcaggccaatacacctatggtcaaggcacctatggggcagctgcttatggcaccagtagctatacagctcaagaatatggtgctggcacttatggagctagtagcaccacctcaactgggagaagttcacagagctctagccagcagtttagtgggataggccggtctgggcagcagccacagccactgatgtcacaacagtttgcacagcctccgggagctaccaatatgataggttacatggggcagactgcctaccaataccctcctcctcctccccctcctcctccttcacgtaaatgaaaccactcaagtggtagtgactccagcagacttaattacattttaaggaacactgtctttcctttttttttcctcttcgccttttctttttttttccttttttctttttttttttttaatttttccccccaaccatcgtgatttgtcttttcatgcagattagttagaattcactgccaggtttcttctgcccaccaaaatgatccagtctggaataacattttgtaaaaaaaaaaaaaatatatatatatatatatagctgactggaagagattaatttcttcccccaacttcttgcatgttgaagatatttgagctatttttcatctaaaagagtaaggtattaggcccttttgtgggagccccatgttttgtttttctgagttggtggggagggagggagggggagggctgaattgttttgcagaggaagatggcatctgtgctttaaatttctcattactgggttagaaaacaaagagggattgccctgcacattttcttttgtgcttttaaatgtttcttaagttggaacaggtttcctcgggcctgttttgactgattgctggagtgcatttgatagttaaaaattactaattggttttatttcccttcacactctgcctccccacttctccccccgttactgaaaaataaccattttagtgtcaggctagaaattgaattgctgagttttgtgtatcctttaaattaaaaaccacaagtgtttattgtagtggttaaactgtagcatctcagcatctgggtggaagctgcctatatttcttcccagtttaactggggaccatctgtgaaattaattttccatccagacagctgctgtgagcaaatgaacataaatgctcgctggaaatttactaaccagtttttatattgacctgcagtgtaaaaagcacatttaattataaacaatatattcaaaatgggcaaattttattttcaaatgcagtgtagagctagattaaaagcaactctttgccacctactctgcccttttggcaaagttaccttgaacaaagaatcttaagggtttattaagaactctttattttcttcataccctgttctctgcagtgctttctaacagcttctgggtgcagattttcttcggcatccttttgcactcagcttattacaggtaggtagtgcttaagaaaagtcatggaggactaaagcctaagtccttttcacttttcctccatctgaaggtaggtgagttcatcctcttcatggtaatgctgttttaccaagactttatagcagatggacccagaaagaattttctgctattgtgttcactacaacaggatagggacatcagacagccccagaaaccccttccagatctgatatgggactattaatttttatgctgttaattggtattcattcacaatgcagttgaagggggaaggctccactgcattctttggctaaggcctgaatgcttgctcatctgtaagatctatactcgaggttttgttttccttttaaaattctttagggagagagggatggtttctgaggggttctgaaagtatgattcaatgtgcaacatacaggtaggtcttcagcataagctgaaatatatgcatgtaaaaactttgacatctttttttttaattttccactttcttcttaactttacttctctttttgtcccccccccatcttacagaagttgaggccaagggagaatggtaggcacagaagaaacatggcaaactgctctgtgctttcaaaccaaagtgttccccccaaccccaaatttgtctaagcactggccagtctgttgtgggcattgttttctacaaccaaattctgggtttttttcttctttctttaaacatagaggtaccaccacaagggatgccctactctctcgcagctcttgaaagcatctgtttgagggaaaggtctctgggcaagcaagtggttatttggattgcttgcttccctttttccacctgggacattgtaatcataaaataacagtaaattccaaacctcaaaaactattatggcctgagcacagctgaaatctagcagagtttaactcttctgcctccatgtctgtcacttataattcaggttctgctgttggcttcagaacatgagcagaagaatcgttttatgctagttattgcattcatggttgaaactcaacttagggaaagggttccaatgtattaagcaatgggctgcttctccccaatcctccctaacaattcgttgtgtggacttctcatctaaaaggttagtggcttttgcttgggatcagtgctctctattgatgttcttgctggtctccagacacattcctgttgcattaagacttgaaagacttgtagatgtgtgatgttcaggcacaggatgctgaaagctatgttactattcttagtttgtaaattgtccttttgataccatcatcttgttttctttttgtaggtataaataaaaacactgttgacaataaggtgtgagcttttattgcttaattctctgaataattcaacgtagacgtcttaaaacagtttttgtttcaagacaaagatgggggatattggattgactgattactttcgcacctaaaactgaaaggaaaaaacttaatacaagaattggaattgaaaaccctagcaggatacctagtaggtaagggtttggatatatctgtatctgctcataagtaaaacagtgattgtgcaaatggtactcgcctaagtaccattaggttattggtattaaggtactaagtacaaggcaggtatcagccactggtttgaaaaaattcaaaccagtaaaagatgagtcacaaaactcctccagccaaacctg

SEQ ID NO: 13105 - DNA, 1190 bp, Homo sapiens
ttgttggtagattttgccaggcttctcccaacagagtagaagtgatttggcctcataacttcacagtggtttaccactttgttctatgttctggttttgtaaaggatagtactggaatttgcgtctgaagaccaatattggtgtaactcctgtcagtatattggtaaaatgtagcagaggcaggagtttggatgtttggatgggattcccttaggattctacagccaataaagatcctatttcctatgcatgtcccaggaatcagtaatcctcttttactctgttgggatgagtctttttttgtttctgttcagagtggttactaacttcaccttctttcctcttgctgtcatctgcattcgtgcttcccacctgttgttggcatgtcctttaccttctctttccctgccacatcaacctacacactgactcatcattgacgtggaagatgtggaagatgtcaagtttgtgatcaactatgactatccaaacagctcagaggattatgtgcaccgtattggccgaacagcccgtagcaccaacaagggtaccgcctataccttcttcaccccagggaacctaaaacaggccagagagcttatcaaagtgctggaagaggccaatcaggctatcaatccaaaactgatgcagcttgtggaccacagaggaggcggcggaggcgggggtaagggtaagtcctggagttttccaggtactgccaaggtatctctttacgccttctgtgacttgcttttagttgctgtttttaagaaggctgtaagtatgttgcttaatagcaaaggacactgcctaatgctttttataacctttttcaactaagaaaacgtgaagtttgttgtgatagtcctattagttaagctaaattgtgaatttttttttcttagagactggtctgaggtttggttttgtttgtttgtttgttttgagacggagtcttgctctgtcgcccaggctgaagtgcaatggcgcgatctcagctcattgcaacctctgcctcccaggttcaagtgattctcctgcctcagcctcccaagtagctgggattacaggcacccgccagcacaccctgctaatttttgtatttttagtagaggtggagtttcaccatgttggcctggctggtctcgaactcctgacctctggtgatccacctgtcttggcctcccaaa

SEQ ID NO: 13106 - DNA, 1182 bp, Homo sapiens
gtacctaataactatttgttgaatgaaatgatgctaacttgtactgagtgctggctatgccagatacttttatagtacattacacattattaggtcattttctcagcagcctctgaaataagtggtattatttctactttgcataggaaactaaggtgtgtggaagttaaataattctcttcaaattatacagtaagtggcagaataaaaactcaaaccatgtctggatccagaatctgtgattgtaatccctaggatgtatttctctcaataaagggatttttaattttttgcctattgtagctatattcataaacagtatttattgttgggtagtaagggaggttttacacatttctccatacctttaaatcacagcaaataaaatggtctttttggaggtaggctggtagtatccctagaactccatcctttttgaatattcttatggcatgtacgatacgttgctttaaaaatactgatgaactaactaaaaattctgttcctagatttggagcaagaggtggtggtggccttcccccgaagaaatttggtaatcctggggagcgtttgcgtaaaaaaaagtgggatttgagtgagctccccaagtttgagaaaaatttttatgtggaacatccggaagtagcaaggctgacaccagtaagtttacatgtgtgttttaatgtacagattattgaaccaagtagatatattggttagagtttattcatacgctactgttgccgttttacattttattctagtgtggtgatatttttcttaaaaaattttttggttaatttttttttttttttcctttttgtagagaccgggtttcgccatattccccaggctggtcttgaactccctagctcaagcaaactacctgcctcagcttttcaaagtgctaggattacaggcgtgagccactgcacccagctgatttttttttttttttttttttttttttttgagacggagttttgctcttgttgcccaggctagagtgcaatggtgtgatcttggctcactgcaacctccgcctcctgggttcaagcgattctactgcctcagcctcccaggtagctgggatcacaggcacccgccaccatgcccggctaattttttgtatttttagcagagatggagtttcactatgttgggcaggctggtctcaaactc

SEQ ID NO: 13107 - DNA, 1521 bp, Homo sapiens
agaatctaacactgctgctgatctgacaggaggtggagctcaggcagtaatgtgagcgatggtgaacagcagtaaacacagatgaagcttctctcacttgcctgctgctgatctactgctgtgtggctcagctcctaacaggccatgggccagtgccagtccacagcccaggggttgagggctcctgttgtagcacctgagttgaccaacagttaatgtgtgggtggggattgggatcgggcccatgctcttttagttgtctgactgtgctttcagtattatttttgtagacgttggccccatcaggtatggtgagaataagctctctaggcctgtatgatgccttacacccctccttttcttttccagatacttctaggacctaacacagggctctcaggaggaatgccaggggctctaccctcacttcctggaaagatctagattgttattgctgtttgagctgtctcagtgggataagtttgaaattcaagtgtttgaactgctgataatttggatttttttttttttttaactttggcacattgatctatctaaacctggtggggagaattatccccacattgtctcatggaaagactcaacttgcaactgtgccctccacactatccttacttctgtctccactctgataccagagtgcagccatgcagatggttattccagctctggtcacccgactcctttcaccaaattgctcctaactggaagatctcactttccccttgtggggtaggaaccgatgccagtgggagggatgtgcccctgaccattaacgactgttttttttttttttttttaaagaatggagttgttggggcaggacatgcacacaatgtgaaacagacaaaatgcattacacctgtagtgtaaagtggccactatgaatccctatgtatgagaggagggaggcaggctgcagcttcagccacagaatggggactatggaagacagcaggagctcatttcctctgcacattttggctgttagacctgtgtgtgtgtttaaaaaaagagaagtcagtgctcactttttgtatttaaatattaaaaatgattccaactgaaagtgtcatcctaagtaccttgaaatgagaccacgtcagagacatgtactgcccctcacattttctcacctaaaccagcagcacctccatcttaacagccataggcccaaattgtttccaagtgaaaattcatttttagccaagtacttcatagcaatctttgccctgaatttaggcagtcactttgagatccatcagcctaaaacaaaggattgggtctatgtacttctttagtctataatgacactgtgtaattataaagtatttgtagggaataacatagtactgatttctggggaataggggagggggacagaatttttttttttttttttttgcctgagatcaggtctcactggagtacagtggtgtcgtttgggttcactgcaacctcttacctcccctccaacttggcctcctgggtagctaagac

SEQ ID NO: 13108 - DNA, 1842 bp, Homo sapiens
ggtttatggccatacgtggaggttttttgttgttgtttttgagactgagtttcactcttgttgcccaggctggagtgcaatggcaccatctcggctcactgcaacctccacctcctggttcaagcgattctcaggcctcagcttcccaagtagttgggattacaggcgcctgccaccacacctggctaattttgtatttttagtagagatggggtttctccatgttggtcaggctggtctcaaactcccgacctcaagtgatctgcccgccttggcctcccaaagtgctgggattacaggcgtgagccaccgcacccggcagagttttataatgaaaaattaactaatattctagtatgaagtgaggaggatactgaacaggatgtggctaaagccaacctgggacagccatggggtggcttggtttcttcactccagtgttgtccctaccatttcgcagcattgatttaggaggctctgggacaaaagagaagccaaagagcagttttcccagttcactcactctggcaaaatcaggaaaaaaaagtctgcttttgacatcaaattccactaatttggggcagcgttgggtgaggaaagtattgtgaagacaggcttcttggagtaggggcagccacaattcagtagacactctaggctcggaggctgccactgtagttgccaagctcaggttgggtggttctgtgctgtatggatggaataggacctgggctggtcatcttcatgtcgtttcctctctgtatcaatggaagttcaacccgcccctacctcttcagatagttgtaggccacttttctcttgtaactttggaaaacaaaagaggagaaataagtatcataccatatgcgtgtctccaaagtggatgtggttgcctcaaggcaggtggcaggcaggggtgacctgctggccctcagatcaatggtcgtggcaggtctgagagctgtcccactggccagacttctctccagcagcaaagccagcctggggcttgcatgttgatcctgagcaagcttaacggggtgaagctgggctttctcccccctgtgactggagtgcatgttgacaccagcactttttctgcacatgtatcttcaatccaacaaggccgtttttttaatgctgagtaacaggccaccaagcggctactgcgttatatcttctcagcaactggccgcagtctcttctgcaccattttctacaccagacctgcttggcaccacagggagctcttttcctgccctgcacaatgacattccaaccaccaccagccagacattacagccaaccttgctgattgtcacaagcaggaccttggggccactggcactgtcagatagtaagccatttcttgggtagaggaggaaactcctctccacaaatccacttgggcctgtgcaaatggcacttgaaagagtccccatgcacttggagtccatgagccaatgggatatgcaaagacgcttaaacatttcagggctggtttctctgttcatatccaattctggtgcttaggaacagggacccatgctgatgcccaagggcaaaaagccccacttcctttaaggaagtgaacaggcctgaccctgatgcccaataacgggcaaccctaggctttttgtttttcttgcttttattcctttttgttgttggccttgtgctgcgtttgtttacaaaagatgtattttgtttaaccaaatattaaaaatggaaaactccatatatgtctccttgtctgcctgaattctataattgtgtaaagaaaaataaactttagtatgacgctgttttaaaaggagttcattgccagcgtaagtcatcttt

SEQ ID NO: 13109 - DNA, 1103 bp, Homo sapiens
ccgttccttctgttctacccatgagccgcagtgttgattccttcccacaaacactgagggctgggctcttgagacccagacctgtcctcagggacctcacatgcaatccttcagcaaggtctgctgaacgctgctatgtgcccagcggtgttgctaaggtgctgggaacaaagatgaagtagatgggcaaggatccttccccgcagaagcccacagtccagcgaggaggtgcatgtgcagtgtgctgtaatcccaggaactgggacccttgtctgcccagggcctgggggtgggggatgacgggtgggcattagctggaggaaaaggtgggagatggtaaggcaggatcagagccaagaacaggcttcacgggggtctgtagccccagagataagcccccacccttccacagcttaagcgtatttcatgctttcactcactgcctcccgttgtcctgaagccaccaggtggctccagcctatcctgacctctggcttccttgacagtgcactgtgggagcatcaggcagacagccaccattctgagcatggacaaggactgtctgcgcactggggacaaggccactgtacacttccgcttcatcaagacccctgagtacctgcacatagaccagcggctggtgttccgggaaggccgcaccaaggctgtcggcaccatcaccaaggtatggccaggacagaccttgcctgcctccaggaagcaccaggggccactcctgttctgtgaccctgagtgcagggcagaggtttagtcactgccatgggagagctggacccactgaggtgtggcctcggtgccatctctctactcccttagaggtatcctgtggcctcctgtcctgggcagtggtggtgaccatggagaggagaaggtagggttagggtatgatcttcctccatagaaaactggtgacagaatgtctgggcccagccaggctcagcctccagggtgctgtcacaggttcctatggcctcactgggaccatgtctaaggtctcctctcagagcagaggtctggttggagtaagtgcagggggttatgggcgtgagttctcttggggcttaagctgttggtgtatcctg

SEQ ID NO: 13110 - DNA, 1467 bp, Homo sapiens
agtggaggccggcgacgagggggccagcgccacaaggtgaagtcccagggggcctgtgtgactcctgccagcggctgctgaaccttcccctggcccaccctcaccacccaaggggtcatcatctctggccaccactccaccagatgggcagagcagctatgaccgccacccagccctcccgctcaggccacagccggagcctccgcattgcccccacccccattttccaggggggttgtaatttataagctgacgaaggtagccagacttccggaggactgaccatctctcactgtcctccccaccttcttcctcactcacacattttttgtacatctgggcccttagtttttattctgtttattatatgtctctgtctctctctattgtgtgtgtgtgtgtgtgtgtgtgtgtgtgtgtgtgtgtggtgcaggagtgccacccccagggccctgtcaacctctcttttctcctccatggctgtctgcctgcgtatctgtctctgagaatcctcggggcggtcaggggatgtcaggaggggaaggagccgccctccctatcttgctgctcctcttggcactcaggggcaccttccatggagccagaccgggtggaggggcttctgggatttggtgtctgctgctgccagagcaggaacccccagtctaggacttgggcattttaacagggagaaagtagtggcttcccttttctctctctcctcctttttccctttaagcccacagattcaggtcatgccaaaagctctctggttgtaacctggagacatgtggaggggaatggcgatgggattataggactctccccatctcgggccctgaccctgacccttgccaccaacccaaagacagctggtgggtttccccttggagacaatcctgcgtttgcctgggccggccctggctgccctcagctttcgctgatctgcccggcctggagcctcccatcaccccgcttcttgttgggcctcaggcactggttaccagaagggggtctgggtctgctcaggatcatgttttgtagcacctcctgttggaggggtggagggatgttcccctgagccaggctgagactagaaccccatcttccctgagccaggctgagactagaaccccatcttccccaccacgccacccctgtggctgctacaggagcacagtagtgaaggcctgagctccaggtttgaaagacccaactggagcgtggggcgggcaggcaggggttagtgaaaggacacttccagggttaggacagagcatttagccttctggaagaacccctgcctggggtgggactgtgcaggccagagaaggtggcatgggcctgaacccacctggactgacttctgcactgaagccacagatggagggtaggctggtgggtgggggtggttcgttctctagccggggcagacacccagctggctgggtccttcctcagccttgc

SEQ ID NO: 13111 - DNA, 1184 bp, Homo sapiens
atattcaccagatttctccaaaggccccgcagagagcttcaaagctggctgtccccgcggcagcacgctcccttccacaggcgacacaaggcctcgtgaccaagccctcaccctccaccttctcacactgactgcctcggcacctcttgctccccactcttgggaggcctgtggttctggagtcccagcaaggggacctatggttcactctctctgatctggcggggcactcactgctctcccaggcagagggacaggccctggggttggggcctgtgactccctttagacatgtccagacaaggtttccgatttttgccccacactgactctggctgggcccagcagagcggactggggtgttagtggggggaggccctcctccccatactgcagatggcagcgaagaggcggggttggtggcaggcctgtggtcactgcctccactataaatgctgcaactgccgtggagggtgcaggggaggcctggcgatggtgagggaagcagctaggagatggacggcccaaggcgtggccaggccgcggggagcccagctgtctgtgggggacggggcaggagggaagtggacggaaggtctgagaatgcagcgtgtgtggaagagcagggactatccaggcaggcagcccaggttcaagtcccggctacagctgctccctagctggaccctgggtcagacactccatcctccaaacctgagtttctccatttgtaaatagcaacagcaacccctaatttggaggtctgctgagagttacacatcagggtaagcccagtgcctgccaagtgggggaagcctccttcctcctgagccccagcaaaccctttcaccttcagcccgtcctctctccccacccccatatcctctcccatccacggccactgcccggcttccctgaacccattgtgagcttcctggagcccccactctgcacgggcggctggtccctcaaacaatggtgacttccccctccccacccccatctcaccccttcctgggaaaatgccaaggcccagttcaatgccacctcctctgtgaagtcctccccagccccctagtgagagtcactctcttctctgaactccagattccctgaaccccgtcttctctcttctggcaaatgaacctgtcttgcttttctgttcctgggtctggccctcagta

SEQ ID NO: 13112 - DNA, 2038 bp, Homo sapiens
ctaaaaatacaaaacttagctggttaggtggtgcatgcctgtagtcccagctactcgggaggccgaggcagaagaatctcttgaactgaggaggtggaggttgcagtgagccgagatcacgccattgcactccagcctgggcaacagagcaagactccatctcaaaaaaataataataatcttaaagatgagaaaagccaccccatctggcaccacagctgcatcttgcttgtgagaaatggggaagagttcagggaggacacgtgacctgcacaggatcacagagcatggggcagagccaggactagagctcagggcatctgactccctcttcagtgttcttccccctccatgttgcctgcccctgaagacctttgagttcagtctacacctaagcaggtagacatccgcgaggtcagatgctttccaacatgacacctgaacatcttcctttatgcaacacccaaacatcttggcatccccaccccaggaagtgcggggaggaggttatgatccctgggcgcttcggcagaatggagagctgaggtgtccctcccctgctagtcacctaccaggtgtctgagcagctgcatgctccctggctcaagtgggcactgtaccttttgcctgcctttttgttccctatctccactccctgaggccacttagcctgagacatgatgcaagagctgcaggccggggggctcagtgccatggaagctactccaagttgcattgcctcccgcgcccagatcctgctttccatttcgagaacataaatagattgcccagcccctccagtacaatcccactggaagaaaaggcaatggcgggcttcagccagacctgctgagacctaggttgccacggtaacagccaaagacatcaacccaagtgctgggtcaagtgtctcatcatactggcactgttgctggggtgacggcagaattcagaacttcaatttcagtgacgccaagcttgatgtgtttctgttattgttttgaagaaggtagctcttgtggaggacttgggagaaggatggggtcttaggaaggaggtgacagcacttgcatggtcacttgagcccacacacacgctcaaccccaagtcctttatgctttgtcacagtgaagatgagacctctgacgtccaagccttgttcctgtgctgcatcacccactcagccttccaaagggaacaggaacaaatttccccagcaccactgtttgggtcccgcttttcctatcttctgctgcccctgagcacatccaagcagacagggaaagaggagtcagacatggcccagtcacatcctgagctgctcctggctgataaccacgatggagcccgtgtttgtcctgccatctggcactgcactgagtgtggcacaggcaccgtcctgttgatctcacaacacagttctaagttaggacgttcttggctccgttagacaggtgaggaaactggggcacagagaggtgatgtcatctgcctggtgtcaatcagctagcaagtgatggagcccagatttcaaaccaaagggggttacgtccaggggctgagttcccactcacctgtgtagagtgccatctgggcaccattgctccagacgtgttccgacccctttcccagcccacagggcttgaagtgaaggaacagaggcagggggtgggccagccccagggccagggtccccttggtgaagccgtgccagggggctcagctgcttcagggaatgtgtccctcccaccatgggccagagcttcagcccttctttagctcagctagagttcacaggagagccaaaaaagaaaaggaagctgagcatctcccgagtcctgggcagggaaggggagggaaattgctgcttctccaactcttgcttggggccaagccctgcaccagttgcttcccagctgttatctgccagatcttcccatcttgtggcatgtggtgcccccaccaacatcccaaggggaccaatccccttgccaccactttgcatcacctgggaccacagatttggacaggaagggct

SEQ ID NO: 13113 - DNA, 1194 bp, Homo sapiens
ctatggtctgcctaccaggacggggagctgcagggctccggtgagaacctggctgcctggcaccccatcaagcctcatgggatccttatcttgggccaggagcaggtaaggctcaggctgatattggggctggacctcctaattgtgcagatgggcagactgagggccagagagatcagagacctgcccaaggaactagaatcttgaaggtggggctagagcgttggcggtggggcttcagtggggttgaaggtggggctgcctcggggacaagagcctgactgagccagcctgcctgtcttttctgctccctcactccatgcctctcctttctctgctgctgtcttggcccaggataccctgggtggccggtttgatgccacccaggcctttgtcggtgacattgcccagtttaacctgtgggaccacgccctgacaccagcccaggtcctgggcattgccaactgcactgcgccactgctgggcaacgtccttccctgggaagacaagttggtggaggcctttgggggtgcaacaaaggctgccttcgatgtctgcaaggggagggccaaggcatgaggggccacctcatccagggcccctcccttgcctgccactttggggacttgaggggggtcatattccctcctcagcctgcccacgcactggccttccctcctgccccactcctggctgtgcctcccatttcccctcacctgtacccacacctccagaatgccctgccctgcgagtgtgtcccctgtccccacctgagtggggaggagcgtctcaagtgaacagtgggagcctgcccacctggcactgcactggagttgtctcttaccccaccctccctgcccatcaactgtatctgatttcactaattttgacagcacccccagtagggtaggattgtgtatgagggggaccccactatctcagtggtgggggtggccgcccgcccccttgtcccccatgcaacaggcccagtggcttccccttcagggccacaacaggctgtagaaggggatgacgaggacatcagaggttagacttaccctcctccctctttccaccagctgccagtcaagggcagtgggatctcgatggagcctccccccccccccacccatgcctccctcttcctcctctttcctcctctctttgtgtgtagcggtttgaatgttggttcca

SEQ ID NO: 13114 - DNA, 2401 bp, Homo sapiens
gtgaaataacccccaaagcccaatctcctcctacgttcaatattggttggggcatccgtcatctccccttaagtgcgccccctccccacccaagtatcataggaaaccggtgaggtctggtgtctctggtttgagacggtaagttgggacccatccctgtctgggtgcccactctgacctttagtttgcccttctgtgaaatgggtgtattgggtagcaagccctcttcagaaagcgctgctggtgtcagagcagctgcccagtaccaggtggggggtcaaggttgctggtactggggcccccagctgcccacaacccctctttgttctcaccctgcaaaggggtcaaggtcaaaatgagcctcatccttcctatgatctgggaagaggtgatgatcaagtccccaacttcagtgtgaggtggacagagttggggggatggcccctttttgaagaggtgaaaatggttttggagaagcgcagctgcttcactgggggaatgcggcagggactggggcccaggatgctttggcctatggggaaaagccctttaaaaggcagggcccaggccctggagccagcacaagactggcctcgagcccctgagccaggaggtcctggaggagagccaggccggtgggcccgcccaaggctggagggtcagccccaacagggagctgggttggccagggggctggactgctaccagcctctctggcctatggggacccaagaggacacatcccccttttgcccactcttctgtgtcattttgttgttttggtttgtggtggtttttcttttttcttttgtttttcttttttctttctttctttttttttttttttttttttttttttgcacttcgcccacacaggacagtggagccccacctggtcagttccacttccgggctcccatgcacttgcccaaggcggcctctttgggacggggatggtttgaggaaacacttttaaagaaaaaaggaagacattgaaaggttttagtttcttccctatctgcatgtcctctcatatagaaagcccagaattaggggctagaactccaggagagggtctccccgactcatctcttgctgacggtcaccaggatgcagaaatagggagatggttagtgggggccaaagatgccccctcccaggccttcgtggttccctcctccgccccctgcaatctttggaggagtcagtgcctcactccagcagtgagtgcctactgtatgcaggtagtcagccaggcaaagagagactaacggtctcatgggggaaccctcttgcgggaggccgggtagctggagcgaagcgttccggctgcccttgctgctgggtggagtggagagggagacttctttttgttggttttaatttaaaaacacaaaggcctaaagaaatacgtatcttataatttttttaatttttgagacgttcatttaatgaattgtgcacgaatgaattctatatatataaaatatacatatatagctctatatttggggaggggcactgtctcttttttctctcatttttaaaatgaagtgttgttgcctttgtatgtggttcaaccatccagctcccagctggctaaactttgcctccagtggtcaaagatgggaaaagagtggggttggcaggagatggaaaacggaggtgccgccccagcatggggggcaggtcccccagtccaccctgcccctccccctgtggagaagacgcttagttgggggtgtgggtttgggctccattctggattcggcggttccgggggaggggtgggtctgtgccgattactctgtcttgtacgtttgttctgctgctcttcaatattgtatcaacgccaggaaaggggggtgaaaagcctcttttaccccccaaataaattgtcacattccgaagctgaggcctagcccctaggttggggtgtgtctgtgtcttcttccagctgtgactggcttttcaaaagtagcaggcccatgtccctccagtgacaggtgaagagggggaagccctgtcccaccgctggcactcacttgcttcccggttcctatctcccacactcccccagctcacatgtgcctcagtgggaaaaagagatgcctgctgcttcttggacccttgagaataacgggtaggtgagagtgggaggatggaggtctcatcactgcctgtccctcagtgggaatcacagcacccgcagagaggaaggggcctctggggttgtggccccaaagcccagaagggagcaggccggaatggggcaccagctgctcttgccattgggtcctacagtttggcacccaaccgtgccataaagtccgatatcacattcggataatgagaatggtggtcttcgagtttgttttctgggtgccatgtgccttctctc

SEQ ID NO: 13115 - DNA, 1455 bp, Homo sapiens
atggctcggtgttgacccagggatggggctgggtagttggggtcccagaaagccgggggtaggggccaccctggaatggggcaggggaagggcacaccccctgcccatgcatggtagcccactgggtggtttctggaaagccctagaaactagggttcctctgccccttccacatcccacctgtctctctagcttgcttcctgctctcctgtgcggcgtctgatttctcggtgctaacctggcagctgtggggcccttaggagccccccaccgagggtggacacagtccctttccttcctgcagatgcctaggcaggaggagggcttcctgcctgtttggcaaagtcccaggcagaggccaaggatgaggcctgactcggctcctccctccacatcagccagggcatcagaagttgggccagggcggggtcttccctgctcgattttggacgaggcctaagtagaccccctatgccctgccccagccctggctctttcctaaccccctcaacggtgggaggaactggcagagggtgcgcctggccacagcctccccgcatctaaaggccccttcagttcttgaccaaaggtgctacgagaacctgccgtggaaacttccagttgtgcgtctgccccactcgctgtgtttgtccgtgggttcatacatgcattgggtgctaggccccaggctgccgggtggcaccctttacagttcctttgaacaggggcattgaaggcctggactgcctctcgcctcagtaggcctggggaccaggcttgggtctggaggtttgctgtggaagtcaccaggcctcccctcctggcccaggtgtgctgggggcaccgtgccccccacccccctgccctcctcagggtggtcagcccaacctgtcggaccttcacttcacatcatggtggggaccgagatagagagggagaccccattccaagctccctcttcctccgggtgtttggggaggatgctgaagaatccattcccgagggcctcccggcttgtcccagcccctcttttgcttctgaccacggaggctttctcacagcccagcctgcctgaagcaaaggaggctcccgtgtcctgggcagcttctgtttccctctgctgcctgggagctgaggcacccgtgccagtggcagaggccacagccccagccttaggccaggccctgggagggcaggcaggcaaaggggagaccagagggtctgtgttctccaggagaatgagggtgttggtcccagaattgggaccggggccccgctggccagccctgggccacttcccgggtctccattgtgcgtgggtggcgtgttccaggcgtggctggagctggcttcctggctgtgctgccatgggcccctccctcagaagcacgttggcaggaggccgatcagaaccctagcgcctttggtcctaagaatgggaggctgccttccttc

SEQ ID NO: 13116 - DNA, 3462 bp, Homo sapiens
gggacgtttaccacgaggcctcaggctggggatggagagagttgctctgggagttggggtaccacccccagggcaggatggggacaggatcacctgcccgggacaccaccattatcattctcctctagtgacgcagcagctggttctgggagttaaaggagcattggaaggcccaaaccctctcccttgagtggccaccccagcctggttggctggttttccccttttctcttgtttcaattgggtctttaccttgaactctcctctctggctttgcggtgggctgtggaggctggttttgaccaaaagtgagtggggcgggaggaaggggcaggaggaagggttgaggttacttggggcgagtcccttccccttcagagaggcttctatccttcccagggaggaggcgccgctgagacccttctgctgagagctctgccctcccctcatcacctggcctgtgcagaaacgctcatgcacacctggctgcacaggtgtgcacgcattacccttcgcgtgtacgttcccatgtgccccgtgaaagcatgtgtggctgcagacgtgtccacatgggccttgcgaacctgggttagaaaccctggccaggcgaacgtggggtgattcacagcacaaaagacctcaccaccacacctgcactcaccccaccttgcatgcaccttgctacctgcttgcggctttcagtggagggcaggggtctggcacaggtgcgatggcaccccatgctccaggcatacagatgtggtttctcggctgcaccgggccaggctgcgggtgtgcaggcgtctgctaagttgtgtgatgtatcagcacaggctttgagacgtctggaccctgtccttcctcccgtgaggggttcttgttctttctgactcaggtgacttttcagcccttccaattcccctctttttctgccctcccctccaactcagccaacccaggtgtgggcagtcagggagggagggagtgtcccaccacgttctcagggcagcccttgactcctaagccccttcctccttccattctgcatcccctccccatccaacctaaatgccacagctggggctgagctgtattcctgtggagggacctctgccgtgcctctctgaggtcaggctgtgctgtgtgatgggcaggctttgccccagcccacccctggcaaggtgcacttgttttctggtttgtacaaggtgtcctgggggcccgtggcttccctgccagtgaggagtgacttctccctctcttccagtcctgtaggggagacaaaaccagattggggggcccaaggggagcatggaaaaggccggctcccctgtctttccttggctgtcagagtcagggtaacacacaccaagagtggagtgcggccagcaagtttgagacctgcccgccctcctcgcagctctgctctgtgtcctcaggaagtcacagagtctactgaggcaaggagagggtgattctttccccaaatcccttcttccctggttcccaaaccaaagacagcctgcagccctttctgcatggggtgctctgttgacaggcttcccagatccctgagtctctctttccttcctcctcgatctttagttgtccacggtcaattcagtgcttccattgggggacagtcccctccgggatgacctgattcacctccagcccagggaatggaatctagaggaatacgtggggtgggtctggacaaggagcggcaggaatcaccacccatctccagctgtggagccctgtggaggggaaggggaagcttggggttcagaggggactcttccaggagaggggtgcccagcggaggtaaagatgatagagggttgtggggggtctctagttgaatgttttggcccatgactttggaacatggctggcagcttccagcagaagtcacgctccccatcccccaggggacataggacctttttcctgcttcctggtcactttcaaagaactatttgcgcaatctgtgggtctgtggattcacggggctttctgtgtgggtgctgcagttgcttttgtctgcagcagcaggacacatctttcctcttactcagccctttatggcccatggggaactccgtggctcagggagagctgaactccaggggtgtgacctgggacgggtgggcctgaggtgcccagctcagggcagccaggtggctcatgggctgtagtgagccagctccctgggggaaaaggctgtgggccgttaggaccatcctccaggacaggtgacctctatgaggtcacctacggctgtggccgtgcaggcctccttccagcccagagtggcccagtagagcaaggcagacagtgacctccacccccgcagccctcttaaaaggccagtactcttgggggtggggggagggtttagaaagcatttgcccatctgcctttctttcccccagcccccacccgctttgaatgtagagacccgtgggcacttttccttttgtggtggggggtgcggaggaggtacccccacccctggcacagccgcctggaatgcaggactgtcactgctgttcgggtgatgacctcgttgccaagctcctcctgtccccttgttctgggggcaggcgctgtgcttctgtgaggtggtttagcttttgctttcgaagtggccagctgcggccaccaggtctcagcacaagagcgcttcctttgcacagaatgagcttcgagctttgttcagactaaatgaatgtatctgggaggggtcgggggcacgagttgattccaagcacatgcctttgctgagtgtgtgtgtgctgggagagtcagagtggatgtagagcgcggttttatttttgtactgacattggtaagagactgtatagcatctatttatttagatgatttatctggtaaatgaggcaaaaaaattattaaaaatacattaaagatgatttaaaaaaaagaaaattcctgggcatttgattattccttctggtggttgtcaagtgcatccgtccaccaacagactttgtgcgagcaacaaggctgtttatttcacttgggtgcaagtgggctgagtccaaaaagagtcagccaagggagataggggtggggcagttttataggactggggtaagcagtggaaagttacagtgaaaggtggttagctattgtcagcaggggagggggtcacaaggtgcctgttggggagatcataatactcattgtccggaagaaggtcaccaggtcgatcagttggggcagggcaggaacaagccataatggacctgcaggccatctggatgtatatgtgcaggtcacaggggttacaatggctgagctgcagctcagaggccagacagtggtgtccccactgtgctgaagaaagagcttcagcccctggcaatgcctggggtttaggtcccaggtctgctggtcaccggccataatctcggacaagtctttcccttcgct

SEQ ID NO: 13117 - DNA, 1134 bp, Homo sapiens
tcacctcacttgaggggagcgcaggtgtccagggagggggcccctcggccaggtcggcatctgctgcagcgtcagacacacagatgggggcagcgttgacaaggtgggaagccatgcagaccacccaacccgaccccaactccagctcctcctctctgtgtcttcagtcagctcagggcctcacacagggctggacacttgggaggagggcactgggtgcatcctccccacctagacaagagctcagccagagcgggacgacaggaggagccctgggctagtgttgggccctgagcccagacccgactggccccacaaagcactacaggccctctttggacattgaaccagctggaccttatgacccatagggccctttccagctctgagggtctctgggctggggccgccttaccctcctcttcagggggctgcgcagcaggctcccactcgccagccgcctgcaggacgtctggggccggtggctcctgcaggaagagctcccgtcgatggctgtggctctccaggttgggcccgcggggcgggaacttcttgcgcgagagccgcaggtacttgtgggcctttcggggcttgcggagcgggaagggcagggtgggcaccaaggggcccttgtccaccagctcaggtgcccccgccttgaccaccccctcagggctcccgctgccgagtgggcacgtcagggagaagcagagcttctccttgcccttggccttgtgggagctccgcaggtccatgctgtacagccgctgcgggggcaagccagggcagcgcgggtcagccccaccctcccacccgccacacctttgctcatgctgttcctcccacccggaatgcccttcccatgccatgtctacccactcaactccttcccatgccacggctggccatcaccccaccccaccccagcccagagagtgcgccccgggcaaccccagggtcggccagctcagccctgcctctgggccccacagagcactcgcgtcccagcgtttactcctttgatacccagcagagaagcatacaagaaggacaaactgaaaactggccaagagaaacaaatctggatgcattaaggagttagccttcgttttaggaaaggcatctttgcttgcc

SEQ ID NO: 13118 - DNA, 1179 bp, Homo sapiens
gtgcaaacctgggggagaagtggtttcaggcccagctgttcgttgatgaggctcagagtgagcgctgggtacagcgcccgaatcggacagtgtagaaccattctctactgccttccttctgagaacagccttgtggtcagaagtggctgggatagcggagggccaggggacaacttcttaacacgttcctggaccctttgctctttgtagcctactgataactgcaaaggggagcttggaattatgttagtcagtccctgtgaatgggggagcttaaactaatggatgccttaaaaagcacccattcagaattgagttcagggtgacacccccagagcctatccagcttgacaggggagacctgtgggtaatgcacatgaaataatcttatcactccctcagatgacccagccatggttggtaattgctgagtagcaggaaggggtcagtgggaggtgctgggcgctgaggtgaagtaatgtgtatccattccaggggtcaccagtcgttggcacaccaagaagctgccccgcaagacccaccgaggcctgcgcaaggtggcctgtattggggcatggcatcctgctcgtgtagccttctctgtggcacgcgctgggcagaaaggctaccatcaccgcactgagatcaacaagaaggtgaggttctgagagtggctccctgggggtgggaagaggcccccgtgatggggagtggggtttctgtgcctgtcagtgctgcttcactgactgtagcttatgcatcacgtggacatcagtggcttgcttctcatggtcagttctggcccatcttgatgatttgtaaggtgccatcctgtagagtggctgtggtggggctgactggtgtggctggggatactagtcttattggtccctgatgccaccaccaggggggtgacaggcctgtgttgtacagcaggatctttagttttagcccagccgccttacagaaaggaacctggagggccagccagctttttgctctgaccttgggatacgctgtgactgggactgaggcctcagctgccttctagcgtgctttgcaggtcagcacactggcatgtctgggttatttgtccctaatgccccagccttacacccttcttgttcattcagatttataagattggccagggctaccttatcaaggacggcaagctga

SEQ ID NO: 13119 - DNA, 1179 bp, Homo sapiens; identical to SEQ ID NO: 13118

SEQ ID NO: 13120 - DNA, 1215 bp, Homo sapiens
acgtctttttctttttgagggcccctggatatccatttttgaggggtacacccatctccccaacaatattagaagatagcatttggagggggagacccgtggttcaggccctagtgggccagccttggctgctccacccctcagtgtcctcaagactgggtaggaagaaccaggtgaccccaggggatctcagtccagagaaggtgccccagaagtggggaccacccagcctacagggaggagtttaggggcggggctcacagaggagtagtggatgatttctagccatgggtctgaagtacctgaccaacaggtgcctgcccggccccctgaagccagcctccctcctggcacctctgcagctcttccccactggcctcacccctactctctcctggcagagcctgaccgcagccctggccgtgcggagattcaaggacctaagcttccaggaggagtacagcacactgttccctgcctcggcacagccgtaggcctccccggcttgcagaggccggcagccctgtatcacccctggcagtgaggtggcaggagcagcctagtgccagaaatgtccaagatgccagggcatgcagggcagtggaaggctggcttgaggaaccaattcaggttctccactgactcattcattccttcaccgcctccttcattgattcttcatgcgttcattcattcagtaaacatttattgagcagctgttttgtgcctagtgatgaattaggtggggtccttggctccaggagcccacaggctggggaggagaaaacaaacacatcaatatctcttccaaatggacagccgtggacagttaccaggtaggtagcggccccatacatgggctgcctagaggcgttcatggtccccattgctgagctgtgggtgcagagcaatagcctctcccttcacagcggtgtgaagagtgacctcactgtccttagggttagcatcctggccgaggatgtcacagggctcctggtctggctctgtcctcatgtgctatgtgaccctgacaaacccgtgcacctctctcagcctcagtccacttacctgaactgaggggtgataatggaccaacctctcaaggctgttgtgccaatgaaacaaaggccagcccagggcttagcacaagcatgctcaataaatgtaagctcttttgttcattcattcattcattcattcattcttctctccaga

SEQ ID NO: 13121 - DNA, 1203 bp, Homo sapiens
tcagggagcagagcagagcaggtggtggacgggcccagtgctgggtgttttcaccaccatccccccatcccccatctaagaatcctaagaggcaggcgatccctcacctgcttactcactcagcagttacccggcccctgtgctggagataccaagggcatgggtggtccctgcttcgatggccccaaagctgggccagagttaagggaaagaggaggaagtcctaagcagagaagtagcaccattatccccatttaacagaagggaaactgaggctcggcaagcataggcgagttggcagtggaacacggatctaaactcaggtgtgtccaagtcctcccaaaggacagcagtgatggagaggaccccagccagctgtgtgacagctggttgttgctgacttcattttccaatccggagaaggggctctgtccacagtcccccgccgccaggtggcccacatgggaccagcatgggggcaggttatctgttggcctgaagagtgaaacctgtaccaggccaaaggtgagggcgtgagtgagggcaggagtgtttatggcagagtgaagttctgtgcccaccacaagaggctgtgagatgttctgaccctcacccactgtccaccaaaagcctctcctgctgatgggcactaggagacctcagggtactgcccatctgtttctcctcgggtgccagccagctgctggtgatcctcagccggagggcagggtaccaggtaagcttaactccatcttgggtgtttgtgacaggccctgcctgccaccctaggcagggaaagctgtcaagactcctgccaggaatggggggtgctgagtcatctcacgaagaatccctcactcttcccgggttcagcccagaagcccttccaggcatgatcttccccatcaggctgggctctggcagggacctgcccaggatggagatgagagagggtgagagatggagggcgagatttggatgggacccagggctcctgactctgccctggaaggttcatggggaaactcgctccttctgttggcagaggacagcccctggggaaccccaggcccaactctgtccggtatcccttttcctcccagctgccctcccctacttctcccttgctcccaaagctttccttggagaagggccctcctgcagctggaccctgcagggtggctccctcctccccatcaagca

SEQ ID NO: 13122 - DNA, 2097 bp, Homo sapiens
attgctgtcttgtggactgtgcactcagtccttgcaaggccaagagtccagttgtaggtgtggccttgagggggaagtggggaggagaagactgacatgagtcctctgcacggatccgtctctccctccccatcaccccttccttctgacacccagtcccagctgtccactgtcccaggtgcagtcactgttgtgcccttccttggggcaggctggctgggggccagaaaggggccatgaggctgtcttgggcccaaaaagggacaataaggccagttgtatgcttcctgttcctcatagcttgccttggtggggatgtctttgttggagttgattctgagctgctgtgattaggagaccctgaaatacagtggtttaagcaagatggaagcttgtttctaattagtctagattgagatggcccagagctggtagggcagctctgcgtttcttcatacgcaccttccaattctgggtacacagcggctgctccagcgcccaccctcctgtgtgcatccaagcctgggggaagcagaaatagacaagagggcacacccactttttgctaaaggcatgagccagaattggcaggctcacctctgctggcctctcattggctgggactcagtcacatggccacaagcagctgctagggaacctgggaagtgtagtcttcagcggggccgccatgtgcctggcctcaccttgggagttatcttattgatggaggagaagagaatggatatgggggaccagtagcatctctgggagagggggagggagcagcaataactcagtcgtcggatccagctctcattgtcagagtttccggaacagcttgctcctgtttccctcactgtgcagcccagggctgggggcagtgaggagcttgcagctctgtgggaaggggaaacaccccctcccctcggcccctcagacgctacccaatgatgccggtttgcagagttggcctgtggaatggctcatgtttgtgcgtgtgtgtgtgtatatttatgggcatgggtgcatgcttggtgtgtatttgtacatgtctgtattgctgtgtccctgtaaatacatgcttgtgtatggatggaagaggccaggcccaggcctggcctcttcctcgggcctgtggccacacctcctgcagctccccaaaatgactgaggcagaaagcccttggggagcctagaaagcaaagctaaaggggatgcagggtctgtctgtctgtctgtctttcagtctgaggaatgagaatcctgacctgagggctgtgcagctgagagcccactacctccccagcccctctcggccccagccgcatcatcccacctgtcccctcccccccacctccagtggggctttctccagatgtcttatggttgggggtttcctgatgggccaggagaggagggcatcttcttgcgacagcactgtctgggttaagtgcccagtgagggcatggtgtggggagctggcctcagaggagccgctggtgggcaagcgtgaagtgggctgaggggctctgagccactttgctcccatctaggggactgccccccatggaactcctttgaagtcacagcagccttcctttctgtttgctcttggggctgagaggtggctcaaacactcggggtccctatggctctgggtcaatctaggccaggctgcaccccatggacagggagtctcagggctcctgatcatgcccaggccctggcctggggcctccctccttggcagctttcccacccccacgcccctggcatcctcagttgctatgggatgcccctccagggcaccagctcagggctaagcgaaggaagataggagcagctcagagctgccaggctctgccttcctcacagacctggtggggcaggtcctgttcacagcagcaggagtgaaggcctggccatcggtggagagggcagctgtcagagggctgggggccagggcacaggattgaagagtttcacatatcatcacagcatacactgggaatttggtgggggcagaagaacccagggccactccctcaatatgaagggaaaccaagctgaatgtgaccaccggcacactgctgccatg

SEQ ID NO: 13123 - DNA, 2426 bp, Homo sapiens
ggacaaggccttgaaggaacgcagccttagacatcaggtgaggatgatggaggtagacagtcgactgaatgtcagctggaaaatccagtcactagttggggtttggtggccatgttttctacccagacaggccctgcttttctaggatgtggccttagagcaagaacagacccaacagccagcccttcatcctccagcgtctgccataggaatgtgagaggggtgtttgctgagcgctccgggcacggccagagggcaagtgagcatgcacggacctcttccccctgtcctgtttctcacccagcacctggggagatcggtgctaccaaggaagagagcacacagataagacagaggggaggaggtgggcatttcctacattcctccttgtttgccgctgctgagattgcagtatttattgcaatgtaaatgtatcctgaaggtggggaggaatgtttaatctaccatgtccgtgtgtcatcttggtttgtgtttttccctgtttgtagcaagactctgatgataattctgtttctcatctgcccattcagtattttgttttccttccgtcaagttgtcttattttttcaatgactacctctccatcattgaggttctggtgaagctctctgcagctgtctcattccttcccaacgatagtaacaggaaatgactctttagcatcgatacctcaacatcaatttagggtagagattcctgcccctcttttgtcacagattaggaaattgagaactagggttaaccttgactatatttagaggtctttttgcctcttttccccttaacaaggatttcttatggtggtttcagtttcatttgcataaaggtattgagagggaacaaaaaacataaagctgagaatcttgagagagctcatctaccctgtctgttggtcagactcaaatgagagttaaaaaaaaaaaaaaaaatctgtatgcctgagtaccatcctggatgaatctagaaggtatggggtagagcttgacagggttcctgtgtacccactgggtatccgttagaggtaagggagaggagaggattgatagagtgttgcaaaagtatagattattcattgagataaaggatttggtttccctgccatgagtattaaaaaaatttaagttttcccaagcttgcatctctgaccaaatttcacataaaacattggaaggaggctgggtgcggtggctcatgcttgtaatcccagcactgggaagctaaggcgggtggatcacttgaggtcaggagttcgagaccagcctggccaacatggtgaaaccccgtctccacgaaaaagataaaaataagctgggcgtggtggcaggcgcctataatcccagctactcgggaggctgaggcaggagaataacttaaacccgggaggcggaggttacagtgagctgagatcgtgccactgcactccagcctgggtgacagagtgagaccctatttcaaaaaaataaaaattggaagaagagcttaaaaaagataagattttaaagagtcccaagttatttaagttgagtgtaattgtcatttaaggaaggcaaatgagtttatcatccttcttaaagagcatctcttttaactgttggacaaaaccataactttgtcattttacaaggaagaacctcttaagaagtcctcagaaccagaagcaatgtgaactctcagcgctggtcctggtgggtttgctgaccatgactgggcaagccgttctttttgctgccatcttcctcatcataaagtgtggaacataggcaattgctttgagattcttggatagaagaggacaacattctgcacctgcccccttttttaaatctttggggaaagatgagtaactttccccactactctgccttcctgttcagtaactcttacttttgcctgaagtaacagcatcttctacttctccatctagagatttttgtgtgtgtgccatcaaggttagcaaactttatacgtagcctaacacttaaaaaatgcactcattatcttaaacctaataaattccagagtttattttggttctcctctgttgcccttcctaaaaaatgagctgaagatgacagtatttttctttacatgcttggttatgacttttaaagttttatttaaataaatgttgaagctcaagtttaaagaagcgttgcagaggcccacggtctcctgggtcccggccacctgtccatattccacatttgctgactgtgctccctgcactccactcaagttgagagttcaaatagtcttgaaggggaatcagcttcaggatggaaggacccaggagaggccccgaggtgggagggttctgtaaatacagactactgcgagtgtccagagctctctgccatgatacttccttgggactgacttggctgagaacgtgttctgtcagagga

SEQ ID NO: 13124 - DNA, 1266 bp, Homo sapiens
ggttcgggagtctggaactccatggctgaggatactaacaaggatgggaaactggcgagggtctcactgtgcacctgcctagtgctcagtggtgctaccctagcttgtcggcacagcagccctgccatggtgcggtcgtctcctcattttatagacagggtagctgtgggcacctgccaggctgagttgtgtgccaaggtggattggtgtcgggacctgaatacaggtctcagcttccactgcccgtgatttgaaacccacactatggattcagggtgactgtagttaatattttgggcctctaaagttctgggtgattctaagatagtctgaaattcctggattctagtatttcctgaacgaatttgttgcttgttcttctagcagtgtgtggttattgacaaaaggataaacaaagttgcctccctgtatgaaaacacacatgtgcacacacacacatacacatgcacacacacacatgaggcgaccagggcaggcctcaggtcttcctccaccagggctctgagctctgaagatacaggacatcctgacactgcactcccagggctctagagtgctggctggaagattctgggaggcagatttccccactgccttgggaagacttgggcaacttgcttgggcatcttggctggaccagcagctgtattgccactgtctgatgcctcagcttggggaggcctggttccagggcaccattcccatcccaggttggtgcctggaatggttcagtgcttgggctcgggagtaagcagaccagaactgggacactaactgcccggtaccagctggctgactatggtcatggctgttcccctgtctccctctccatgaagtaagaatgagaatggtctgtatgccatggagttgtggtaaaaatggacacagatgatgcatagggaacctgttggccattgcttgatggggtcatggtggtgatagtggtgatgatggtgatggtgctggtgatgatggaagtgatggtgttagtgatggcgatggtggtgatgatgatggtgttggtggtggtggtgatgatgttggtgttagtgatggcgatggtggtgatgatgatggtgttggtggtggtggtgatgatgttggtgttggtgatggtgatggtgatgatgatgctgttggtggtggtggtgatgatgttggcgttagtgatggtggtggtgatggtgttgatggtcattgtggtggtaagggtaatggtgatagtgatgatggtggtgatggtga

SEQ ID NO: 13125 - DNA, 1069 bp, Homo sapiens
cataagcttaaagggaaaaaaactaaaaactttaaaaaaaaaagaccaaaaagtgcgtatatatatacatataaatatatattttagatgaagactaactctgggagcatttaacagtgttttttgtttctgtttttaacatttgttttcctgctttaaaatttgcaagcattctcaggaattctagggtaggaagccagttttttgaagatggtttatttaaccatatcttatcctagagagatggctgtttctttcctgttaataaacttttacaagttcctgaaacttcagaaagtttaaacaatttttacttaaaaaaatgtaaaaagaaaagtctccaaacattattgtcatactggggatcacacattttaaaacacatagaaatattttttaaaaattatcaatttagcagcaacaggtaaattcattatcttaaaaatatgggagaaggattaagctttgtaagagctcgatcatggattcttttgaaattgtgtgtagtttaatgggagagtgtttggtgtatatagatgagaatgccatcactttgttcctttccatttgagactgaactgaaatctcccctagtaatttttatttttttaaaggaacccttctccttgtccccacaaccccagcaacaaaagaaaggaaggaaggaagaaacaacagcttaaaaaaaaaagtaatctgtaaaatagtacagttggattgctgagaatctatgtaaagagttaggaaatataggttaataatttttggaacaaattttaaatataggcattactagaggaaaattatctatggactgtcctattaatgaagaatgtctgtcttacctccgtttgttttgggaggaggagaaaatatagaagaatctaataaggaacaagtgattttacttttttagctcccagctactgttgtgctcgttttaattgctgttttgaagatctgctgcttaattatccccatcccttagccggagatgtggagtgtttcctttcagtttttggtgatgttgaattcttttgtattccctcctggggccaggggtcagaat

SEQ ID NO: 13126 - DNA, 1358 bp, Homo sapiens
ccaatatcaacaagttgggatggtttttgtttttttcttttttttcaaaaagggaaattcctctttactgctcacagtaagctgcaaaagaaagttgtcaaggtggcttatgatgctgttgtagcagagctgtgaaaggaagtgctttgctttctctcccgccttccggaatctggcgttccttccccttcggctactgaaaggtgtgtacaactcccagaggggtggctgtaaaagttgactggaggcaaagtggagtggccttattgccaggactagccctacagaagagctttacagagaggaggacagtacatcctatgtgtgttcgccaaaaatgggaaaggtgggtatttaggcaaaacaaaataaaaacctttggaaccctttaagaagttacataccttttaaaggtagtatagtttctcaccaagtgatgcattttagcatgacacttcttgccagaaattttgggataagttggaataaatgtgtttaaaacatcatccaccgccctttttaaattttgtctaaggaattacttaagtatagtatttctgaatgtgcctttgtgagtacagagaccgtccgttctaggaagaagctatccgttggatacaaacaaacagacggtcagctttagtcattagggaagtcaaagttcctcctggaagtcccaggagcagctgttgagatttcattagcatcaatattgcacagtgtagagttgagtggaagagattctgggacttgggagaggagacaggggaaggtacccaggcgacgcagacccacgttagtccaagagcgcaggtttacacatctgcattccctagttttctccgtctgtatgtttgtgctcatgtggctttggctgttttgttttttgtttttctgtaagcactggagaattggaatatggtgatacttgtgacacattcatgcatgtaaacaaggcattttccagcttctgccgtgtgcagagcgggcagcacgcttttaccctttgagtctgtgtcctgaggcggccattacattcccacatgggcgtcacatcacgttgctgttgatgcaaacagggtattacacacaaggaaaaggggttttgaagagttaagattgaagtgtttgagaaagaaaagagaaaaatctgaaatcatattttatttcttcagagctattatagttgaacacagaaatctgcagtgtctttatttgtttttatgttttaaacaatttcacctcttctccccactcctatcttctaaagaaatatcaagcaaatgctaagggccatttccatgattcctcagagctcccccaaagaggagaacagtccctcccactcgattccttca

SEQ ID NO: 13127 - DNA, 2213 bp, Homo sapiens
atacctggagctctcaacctttcttggttcagacacacacatacacaccccttgagtaactcagtatcattttgtagttcacagaaggatgtagtccctggcattttggtttgcactgtagaatccatagccttgtcactttgttatgctctggaaatgtactgatttcttacttgggaggaaacttgtgtaaggagatgtgcaaaccaccctgaaagccatgtgcatcctcacctcttccattaccccctccatgagctcgaagcgacattaagtagagggaaatgcttttaacaaatgctgctcatgtggatctgtcagctattgcttgcctagatttgggcacccatgaagcagggttggaatggatcattttgaattgcttctttgcagacacccccttcgcccccatctttaagataaaccctttactagtcaagaagcccttttcagttggatctcactgatcttgtatagtgacgacttcctttgaaggaagaagcttgattataagtgcatgcatattatccacccaccttctgatttgggcactgttcaccttggaattttatttattttgtttatctggaggccctttttctatcagtctctgatccctcatgggttctgcctgcccttgtatctcttgtacaatgctcccaaagggctttgctgatctctgcacttctttcctgggacactccccccaccaccaccctttgcacacaccagtgaccaaagtgtatgcagtgatctcacagaagacatcaaaaatggtgcatgcaccgtgaatgtgctcacagagacacgtgcacaagattctgcacccttggccttaatctcagtatgacttaaggtgcaggaacatttttaacaggttttaaaaaaacaaaaaacccttctgggaggaaaaaaataaaaagcagatacaacagctcaactgttcccactcctaactctccactatgtgcttataacttcacattctatgccctccccgccacccacctcatccctgttctgcgtaaccaaaaaacagacaacaaaagcaacctgaggagaggtttctggactattttatctgtctccatttagatggagatataaatgctgctttgggttccataatcctagggggctatgtttacatagtaaaatacatcctaccaaatcaggaaacagtgaataatgggagtcacttcacagagacgcaggaggacctggggggcgtagcagaggaggataggtagagaagtaccattttaattatttgtgacttgtggcttccttcctcctctcctcctccctccacgtctctctttgccccctttagacagaaggtgcagaaaagggcatcaaaaagaggctggattttttaaaaggcagctttccaactttgcacacaaacaggtaacaggaaggtacagcaaaaatcctctcatctgaaacactgtcagcagaaacaaaacctgtaaaaatgactaatcagctgcacatattgatgctctctgcaagttacctttaagtgttttttttttcttatacttgaagttgcttttacgatattattttggtggctttcttttctctctttgatgggcaatagaggaagtagataatgggatttaaggacgcctgggggagaaaagggaggatgtggcattgtctttttttttttttttttttttttttttagcatagaggtttaatcaaactcccatatgttgaaattgctcctcatattactggttttacatggacacagaaactaggcactttagaggtgcacttgcatggcaggctgggcccccttttctatattttattttcctttttagtatagtggtacttaaaatcactggttcacttaaaaaaacaaacaataaaatgttaaactctactaatgtacaaataagctgaaaagttgcattttatgtgtattttttgccatagcaggtactgtatttctcatgctggatttcaaaaaaaaaaaaaaaagtatcaaaaacaaaaaaaactaaagggtggtgttttattggattgtgacaggttgagtaataaggaattaagtcgtcgtcatttcattaaaactgagagatgatgtaatgcatatataagagttttctgaagggttttttttgggcttttaaacagcttatttttgtttttgtttagtttttttattttattttattttggaaagatatgattgt

SEQ ID NO: 13128 - DNA, 1237 bp, Homo sapiens
gaataatgggactctacaaaggccttgaagccaaactgctgcagacagtcctcactgctgctctcatgttccttgtttatgagaaactgacagctgccaccttcacagttatggggctgaagcgtgcacaccaacactgagacgccttcccatgaaaaattccgaagatgctcaagagggaggtttcctcctgagtgaagagaagtgattctcccttgactctggctcctgccaccacaaatgttaccctcattggcttgaaaagcatccaagggtgcacagggagtatggccaactggacctgttgtcaccttaattgtcatgctggctggttggattttggggtggcagttggactaatgtgaaaaaaacattgctgaaaacctaaaaatgaaagtttgtgagtgtttattggttttcttaagagaaatggactattttgctctcatgtgtaatgttttctatttaaatctttcttaaatataccagctgttctctttccctgaactctcccccaggttctaggacaaatttaataacatgtaattctcctcaaatacttttgtatgtctcagtgttggtgttttcctccctaaaactaacattagggctgtgccacgggcatgactttatttttgttgggcttttttttccctgcttaaggagaggtgtcttttttggatatgagctatttattttgtgaaatgaaaattgttcacccaaatgattctcttataaactatttgtaaatgtcacttattcattagtgtttgacataatttttagaatatttattttgaatcaatcctttcattacgaaagacttgaagttttgtgtccattcttacaagccctggtcagtcaagtcccaataaatggtcagcacaaaaaagatattcttgaaaattgctctttattaaggtattacgttgagtttgcaaccagatgggaaaaatcacaaaaatgagaaggggagcagatatcttgttgaggtctggatattatctccctttataaacttggtgtaggccgtatattttgaaaataaacatctggttgaggttatttcatttggaaaccttccttagagtcctgttgctcagtgtggtccatcagacggtagtactgccacaagctgagagcttgctgggcacgcaacccagagtttctgaatcctgttccgtattttaacattcccaggtgattcacagccacattaaagttcaggagaccatag

SEQ ID NO: 13129 - DNA, 2198 bp, Homo sapiens
actaggaattacaaactttaaacactttttaaatcttcaaaatatttaaaacaaatttaaagggcctgttaattcttatatttttctttactaatcattttggatttttttctttgaattattggcagggaatatacttatgtatggaagattactgctctgagtgaaataaaagttattagtgcgaggcaaacataactcatttgaggataaagtttgtgttggatatgtggttcctgatgcattttgacttgtctttttaaatgctttatctttttctttaaagatttatttcaataaaactaattgggaccacccgtatttcagtaggacctgggtagggattggaagtacttggcagggcagcagcaatcttgctgtgtttgatataacatgcatccttgggcaggttgcccttaaatcttacactgtggtgaagggatgttttttttgtaatgctgcagtagagttggagtacttagttctcttgttgtccagtatatctaataagtgtttttcatattatttccacgtaagggaaataaggtagtacttttctttttatatttctatgcttaaaattctctttcctagtcaaaaattgcccaaatctgtgtttgctttctgcttgctacatttgtctcccttacttttcttgagctaaagacaggctttttccaccggcatcatcactgctatcatcattaacagcgtaattatacaagcatatttaatgctgagtttaatttaatatgtaatacatatggtaattgtagggtaatacccacaacaactgtagtttcttacttggccaagagaatgcttatttaagtgttagacttccattctggcaaaatcttgccttatcagaagacattggaaagagggattccctttggtgtttggtcttctacttagaaaaacctattgcagttagtttatcttgtagtattcatctttgtattctgaagataaggtttgaattaaattgatacacacagaggggaaccgattttttttatccaatgtgaattataaatgagataatccacagttattcattgtggagttgttgagactatgaaagactcattgtctttgtattcagctcttaaatagtgtaactatatccccacctctgcttgctttctttccctcccctccaatgataaagaaaatgataaattttctgttgtgcattcaattcttattttaaataagactaagtataggcattgtacctgacattgctacgtttctaccagtgtttcaatttaaagtgctagtgtttaaaaacattttcaagggataaggccttctgtactttgcttatttgaagaatcagtggtaggagcagtgaagtaaattctatggagtacatttctaaaataccacatttctgaaatcataaataagtttattcaggttctaaccctttgctgtacacaagcagacagaaatgcatctgttacataaatgagaaaaagctattatgctgatggagcatgctttttaaatcctttaaaaacactcaccatataaacttgcatttgagcttgtgtgttcttttgttaatgtgtagagttctcctttctcgaaattgccagtgtgtacttggcttaactcaagaacagtttcttctggattccttatttgatttatttaacctaattatattctaatattgcaaatattaccataagtgggtaaaagtaaaattcctcttctgaaaatgtgtcctgtgcttttagatttttaaattccataatatacattcttaattttcaactcaatattctaaaccagaaatgttttcttgtactgatgctatcagaaggaagttttttctgcttaaaaatatagttatatttctagctgtctttaaaatacggtttcaaactagatattgggcaggtgcggtggctcacgcctgtaataccaacacttttgggaggccgaggcgggcagatcgtctgaggtgaggagttcaagaccagcctggccaacatggcgaaatcccgtctctactaaaaatacaaaaactagccaggcatggtgttgggcacctgtaattccagctactcgggaggctgagtcaggagaatcacttgaacctgggaggcagaggttgcagtgagctgagatcacgaaacacagtctcaaaaaacaaaaactagtttttaatttccccccccacc

SEQ ID NO: 13130 - DNA, 1197 bp, Homo sapiens
aatgtattttattctctgaggaaataacatccagagcatttatttgatactagtgtctggtatacatatttacatttttccctcttaatccctatagcaatttgataatattaaatatttcttcctctcccattttatggatacagaaacttaaatatactgtggcatatacttggggtatgagttcccagtctctgccttcccacggcagacatccgtaataatactcttcctactgaattcagctgtccgtctgaaacctaaacactgtgtatctgatagaaactagcaggcaagaattgtcatgcacttagaaacctgtttgttaatctttgagcttaattgtttgagattataacatttctaacttcaaatcccaggcccctttactctgttttacagtgcctcatgcagttgaggttggttttcttaaaggcttagcttgtgttaggtctttttgtacaagacaaatctgtcatttttctgaactgcatgttgaattaaacatctctctacaaagaatatttgtgttgatgttattcagcttttggagcaagcttattttgctatggctcttttttctaggcacagaaaattgcagaacatcggagaaagtatgagcgaaaacgtgaagagcgagagatcaaagaaagaatagaacgagttaagaaggctcgagaagagcatgagagagcccagagggtaaatttcctatagctaagccatgaaaggaaaatacggcaaattatgtagaggcattaggacactaaaattttaattcctggctcttttatttaatgctggctacagttctatagagtaatgatattacttatggggagtctcctttcactgtatctaatttgggggacatttttagtcttaaattattcagtgagcttttatttcaccattttatattcttgtttgtgtttttataaaatcagttgtttttccaggtcaagtaattgaaatgtgacagtattattgtttgatcttttgaggatgcttcgccagattaattaaatttatgattcctcctctcttccaacagtggatgtgttgctatttaaaaatgattctagcagggcaaggtggcaagtgcctatagtcccagctcttgggaggctgtggtgggaggttcacttgagcccaggagttcgagactagcctgggcaacatagtgtgatgctacaa

SEQ ID NO: 13131 - DNA, 1288 bp, Homo sapiens
caccacctgggttcaggcaattctcctgcctcagcctcccaagtaactgggactacaggtgcacgctgccatgcccagctaattttttgtattttagtagagacagggtttcaccctgttgcccaggccggtctcaaactcctgagctccggcaatccgcccacctcagcctcccaaagtgctaggattacaggcatgagccactgcgcccggtgtaagagtcatatttttttaaacacaaacattggatacaattatacagcaactcagtttgcaagatgaacagggctagattaccacagatagcttatttaggagcgtctgtgatagagggaagctttaagaaccagtgtgttcacctcctttaaacctggatatgaggtcaagatgtataaaacatgccaattgttagaacacaaatttgagggtttcttaaaaaaacaatttgtattagggaagcacaagctaggggattaacaatctctgtaatgctggaagtttgcctatcttatcagggaaacccagggtacagagtgaaaagcagacaggcagtgacttcctcaagagacagataatgtgaaaacaaaagtgatacaaatcatatcctgacagtgctagcctaggaatgcctggctttgcgcaccttatctaagcagctctcagaatggaggctgcacagctggagtctccatcccccatacccaccttcccacctccctccaatttctcaatccagagctttttaaaaaaaggggagggaaataactccacagctctggctgctcacttcccaggctctgtgcccccaacagccctttccttggattgtgtttcctttgttcatttgtaatccaggaataaggaatttccttttcttcttgtatcattttcttttcttttctttttttttttttttttgagacggagtctcacactgtcaccggggctggtgtgcaatagcgagacctcagctccctgcaacctccatctcccaggttcaagcgattctcctgcctcagcctcccgaatagctaggaatacaggcgcctgccaccacacccggctatttttttgtattttaaatagagacgaggtttcactgtgttggccaggctggtctcgaactcctgacctcatgatctgcccgcctcggcctccctaagtgctgcgattacagacgtgagccaccgcacctcctgtatcattttctatggtctaaacttttctagctaaaagcctaggtagcttgtatgtatagcagcatacttggacatgaaacacacttctg

SEQ ID NO: 13132 - DNA, 1262 bp, Homo sapiens
aggctaatctccgtttgcaaccaatttatcatgtttcatatcagtatttctacctgcttagtgaataatagggttagaaagattttggttaaaggatataaaatttcagttagacagcagcacacagtacaagagatctattgtaaaacatgtaactatagttaataacaatatgttgtatacttgaaaattgtgaagagtagattttaaatgttcttttcacaaaaaagatgtgtgtgagttaatggatatgttaattagcttaacgagcttgatttagccattccacaatgtatgcatatatcaaaacatgggcccggctcagtggctcatgcttgtaatcccagcactttgcggggccgaggcagaaggatcacttgagcccaggagtttgaaatcagcctgggcaaccaagtaagaccctgtaactataaaaaatttaaaaattgctctttctcagtgaccgggttctaggcttaggcgcagacgggttaggggagccaacatgccagtggcccggagctgggtttgtcgcaaaacttacgtgaccccgcggagatcctttgagaaatctcgtctcgaccaagagctgaagctgatcgaagagtatgggctccggaataaacgtgaggtctggagggtcaaatttaccctggccaagatccgcaaggccgcccgggaactgctgacgcttgatcagaaggacccacggcgtctgttcgaaggcaatgccctgctgtggcggctggtctgcattggggtgctggatgagggcaagatgaagctggattacatcctgggcctgaagatagaggatttcttagagagacgcctacagacccaggtcttcaagctgggcttggccaagtccatccaccacgctcgcgtgctgatccgccagcgccatttcagggtccgcaagcaggtggtgaacatcccgtccttcattgtccgcctggattcccagaagcacatcgacttctctctgtgctctccctatgggggtggccgcccgggccgcgtgaagaggaagaatgccaagaagggccagggtggggctggggctggagaccacaaggaggaggattaagcccacctgtccctcctgggctgctgcattgtctagttttcctgccaaataaacaggatcagcgctttaaaaaaaaaaaaatttttttttttttttttttttttgagacggagtcttgctctgtcgcccaggctggagtgcagtggcgcgatctcggctcactgcaagctcc

SEQ ID NO: 13133 - DNA, 1287 bp, Homo sapiens
tgcaacaaggaaatatgggacagataggccagcttccccaggccttgggagcagaggcaggtgccagtctacaggcctatcagcagcgactccttcagcaacagatggggtcccctgttcagcccaaccccatgagcccccagcagcatatgctcccaaatcaggcccagtccccacacctacaaggccagcagatccctaattctctctccaatcaagtgcgctctccccagcctgtcccttctccacggccacagtcccagcccccccactccagtccttccccaaggatgcagcctcagccttctccacaccacgtttccccacagacaagttccccacatcctggactggtagctgcccaggccaaccccatggaacaagggcattttgccagcccggaccagaattcaatgctttctcagcttgctagcaatccaggcatggcaaacctccatggtgcaagcgccacggacctgggactcagcaccgataactcagacttgaattcaaacctctcacagagtacactagacatacactagagacaccttgtagtattttgggagcaaaaaaattattttctcttaacaagactttttgtactgaaaacaatttttttgaatctttcgtagcctaaaagacaattttccttggaacacataagaactgtgcagtagccgtttgtggtttaaagcaaacatgcaagatgaacctgagggatgatagaatacaaagaatatatttttgttatggctggttaccaccagcctttcttcccctttgtgtgtgtggttcaagtgtgcactgggaggaggctgaggcctgtgaagccaaacaatatgctcctgccttgcacctccaataggttttattattttttttaaattaatgaacatatgtaatattaatagttattatttactggtgcagatggttgacatttttccctattttcctcactttatggaagagttaaaacatttctaaaccagaggacaaaaggggttaatgttactttaaaattacattctatatatatataaatatatataaatatatattaaaataccagttttttttctctgggtgcaaagatgttcattcttttaaaaaatgtttaaaaaaaaaaaaaaactgcctttcttcccctcaagtcaacttttgtgctccagaaaattttctattctgtaagtctgagcgtaaaacttcaagtattaaaataatttgtacatgtagagagaaaaatgactttttcaaaaatatacaggggcagctgccaaattg

SEQ ID NO: 13134 - DNA, 1528 bp, Homo sapiens
aaaaaaaagaaaaagaaaaagaaaaaaagcaaccaaaaaaacaatggctagccatttacttatgatccagattggactctagtgggccagtcctatgtggccactggcagccagtaaggattccctggcctatgtctgctggaagggcccttggagagcctggctgagggggccttcattctggccagctctgggctgtgtggcgttgggtgcctggctctctgagcctctcgcacctcccatccccacccacggtgtgcagaaggcagagggctaatgtctctcttgctgagtcgttgtgcaaattaacaaaaatgagtctggcaccaaaatggcccccacacttggaaaacaggccaagaggcatccaccgacctgctgacccctctttccccgcaggcccaacagcgccctggaatcctgctccttcgcccgccacagtctgctgcagacgctgtacaaggtctagactcaaagcctctcccatcccttggcctggaccagtgagctggggagggactcggatgaactgaggcgcagcctacgccattgccttggacaggactctggccacaggcagggcgggtctgtgtcccatgtgtcctgtcagtcccctgagtatgtgtgtgggtgtggcgcatgtgcaggtctgtgcctcctgtcgggatttgggttttaacgtcttctgctggcccagccctgctctgttgtggggagttggcccccaggggaaagggctgtgagctgctccgccattaaactcacctccacctgagggcgctctgctgatctccgcctgggccctgatggccgtccccacccacctgccttccggcccggctccctggcggagccagaacccagggagttgcccgcgtgctgtccttcccctctgtgttgtgattgggttgtttcctgccctgcctggggctgcttctcgtcaccaagccctggtcctgcggcagctgtcacccctaccatccataccactgtgctgaccgctcagcctgaagagcagagaatgccatgggtgggactgtgggggtcggatcgtggggttgttggcagagggcaaccctgggccccacaccgtgtggacaggcagacaccagattgtccaggagcaggagctgctgggactgcgctggccccggacctagtgggccttctcctggctgctgagatgtcgtctgtgactggcctggctggagggggagtgttgacaacccaaagctgttctccagtctggggagggagaggcagggtccccaatgtccgagctgcatctggacgctgctcttaaaggacctcctggggcaggggagcggtagggtctggactgggcagatgctgtatgacctccctgagcacccgtgactgccccatgctttcccctttgtgctctgtgtgtgtctgggctgtgcccgggggcttcacaaataaagtcgtgtggcagcttcagagactcagaaactctcactgaaagcgggatagtctcgggggccgttgtacgtggagtcccacctcg

SEQ ID NO: 13135 - DNA, 1173 bp, Homo sapiens
gaccttgcggcaggtggaggtgattaattttggggactgcctggtgcgctccaagggtgcagttgccattgcagatgccatccgcggcggcctgcccaagctaaaggtgccagcctggacgcctgacgtcctccctctggggtctgtgggtggtggggcggctgggggcacaggggtctggtctgaaggcaggtgggcctgtgtccatatcccagctcctccacttcgggccctgtgatgctgtgtgagcctccacacccctctgagccatggtttcttcatttctaaagcgggaggcagggagtggtgtacatcactgtcttgtgatttaagtaaacacagtacgtgactcatcgttggctgcagggcattatttttgttgttggtgttattcttcctgcccactttgccccacctggaggacagagcctgccatatcctcacttggggaaactgaggcttagagtagaacctggtgtcctggcccgggtttctgcctgcctccaacccttcctcttattttcaggagctgaacttgtcattctgtgaaatcaagagggatgctgccctggctgttgctgaggccatggcagacaaagctgagctggagaagctggacctgaatggtagtcggatgggggaggcctctgcacaggtctgctaggctggccctggcaccccggctgactgctcttccctccccttgagcaggcaacaccctgggagaagaaggctgtgaacagcttcaggaggtgctggagggcttcaacatggccaaggtgctggcgtccctcaggtagggaactcggggtggccccagaggtcggggtcaggccattcctttctttctttcttttgttcttgagatggagtcttgctctgttccccaggctaaagtacagtggcgtgatctcggctcactgcagcttccacctcctgggttcaagtgattcccctgcctcagcctcccaagtagctgggattacaggcacccaccaccacacctggcccctttatttgtttctacttgtatttattcagaaacgttgggtgcactcctgttacgtactaggtcatacactaggcatcagggctataaggatgggacagtcagggcttctgtctcgtggggtggagacagaatgagttgtccgttcaacagaggagctcgta

SEQ ID NO: 13136 - DNA, 1264 bp, Homo sapiens
tccgccgcggtgcggagagcaggtggtgctggaagcgcgtgaggccgggagctcgagagagctaacagactagccggctggacatctggaccgctggatccggaggtggcgaccccggcctgacccggaccctaaatccgtccccgccccagagggcggaggcgcgcgctcgattccccccacgcggcggcgccgcctgtttacggtagagtcagggtccctttcctttccccgtcacctgcctggaacaggggtgcggggcgaggagggcgtggcgcccgtgtgcgccttctgcctgccccctcggccttcttcacttagccttcgacggccgagcgccccaggggtggcggtgggagtggggttgttgagcggcgctggctcctttcacaaatggggaaactgaggcttaaagggcgtctgactcgccagagcagctcagcctgcagctgctagcagtggcgtctcatattagcattgttgtcaaccggaggcggtgcgagtccgccggggattccagatggggctcctgcgccgcccgcctatcatttgcggcctgtattcgcgcgtcgctcccgcagagccacctcccagcaggcccacgcccgcgggggccccgggctggcgccgctgtccctggaatcgatgtgagtcactgctgacgctttgcaggagcatgcatctcacctcagaaagtctctgacgttgctgcggagcggggagaggatgtttctctattagccctttgcttttgctctggcgctgatcctttgctgaccttggacaaatcaatttacgtttctgtgctccagtttcttggtttataaagtgagtgtggaggggtgcatctctgtctcgctctctcttggactgaggaatgggcccccgttcagctgagaagttctgtccctattctatctggaggcttcaccaccaccttttaccctcaaattgtcccatctcagaactgcaagagatgctggggtttcaggttaatttttttgttggtttttctttaaatttttttatctttttagagacggtctccttctgtcacccaggctggagtgtagtggaacgatcaccgctgaactgcagcgtcggcttcctgggctcaagcgatcctcccacctcaacctcccaagtcatggggactacagatgccatcacacctggctaatttttaaatttttctgtggagacagggtctcattctgttgcccaggcttgtctcgaaccctggtctaaagtgatcttcccgcct

SEQ ID NO: 13137 - DNA, 1257 bp, Homo sapiens
gttgccaaacagatgtcaccagaaggagtgccatgcagaagggcaggaacagtgagcctggcaggctggggtgatggcatgggcaggagggctgagaaggtgactttgtcctgcgtggcctgggagccatgggcaggatctagcagggagaatcaccgctttccctagagatgttcatctggtacctctctttccctcaaagactttatgtacttaccatgaggatagcagctctgtgatccagcgtggcggccttggtttggcagccaatctatggtgggcagacactccggagactgaagtgcacacatttgccatgtgctctatggcaggctcaggtgtgggaaggaggtgcagggtgttggtgcaggtatggatgggggagtgtacagttccaggggacagagtcaggacaggctcttgggtcagacagccctgctctgatctgtgcatagcagctttctgggctgacatttccatgccgtgggatgatacctcgcagggcgcctggaccgagggctaaaccccacagtgggtgtgagatgctggcctgggctggcgtgaggcaggatgctggatgagtctagctgctggtcctgtggctgctggtcctgggaaaggaaggctagtggtggagtctggtcctccatccggctctccgtggggacacagaaagggtggggccacccagggcctcaccagggaagcaggacttgagctggactgtgaaggactcagagaaaaaggggagggtgttcaggacagggaaggatgcaccacagcctggaggttggagtgtgggaactgttgaacgaaacagcagctctcccagcccaacttccagaaactgtgcatctaatcaacacaggccgggcacggtggctcacgccagtaatcccagcacattgggaggccaaggcgggtggatcatttgaagtcaggagtttgagatcaacctggctaacatggtgaaaccccatctctactaaaaaattcaaaaattagctgggcgcggtggctcacacctataatcccagcactctgggaggccgaggcgggtggatcacgaggtcaggatatcgagaccatcctggctaacacggtgaaaccccatctctactaaaaatacaaaaaattagccaggcgtggtggcgggtgcctgtagtcccagctagtctggaggctgaggcaggagaatggcatgaacccaggaggcggagcttacagtgagctgagatcgtgccactgcactccagc

SEQ ID NO: 13138 - DNA, 1099 bp, Homo sapiens
gcagcccccagccccctgaggccctgtccatcttctccccaccaccgccccggtgtgcgtacccaggcgcacgtgctgcagcccccggaggccccgctgaaacctgggctgcccttcccccacccccacggctctcctggttgaggagggaggggcctggctgacccctccagcttcagcctccagctttaacttctgtctgctcctaatgggggcccaaagctcagggctggggagcctggggtccccacttgaatctccagcaggagggtccttctctccctggcccgtcctcctcccaccccctccccctgggggcaaatcaggacacaacagagggcagaggccccattagctttaaaatgtagccccaggttggagctgggaacactgtactggccacttaccctctggggcctcagctttccctccggaaggctgggaggaggtgggctagatgatctttggagcttaaggagtcccagccctttctctgatgccaccacctgaaccctgctccctcgtgggccagtgaaaatagactgtaggtcctcagagccttcagagatgatccagcccaaaccccattttgcagagaggaaaactgaggcctagaagggaggagtggtccacccacggtcccagcacaaggcagagctgggatgaaaacagggctgaaaagactcagggccaattattggctgagcccacggtcccctcagcagggatgcgatggtctctgaatcagtgtgcagctggggtcccaggcagcgctgcctgggggctggggaggggaggcccagaggagggctggccatgtgagcaccccatgaagggaccgccccctcccaaggatggtccctttgggtgcagcagcagaggtcacctcctgacatgcgctctgggaaaggtggcagagggcaggacaccatgagctcaggatctgtgtgaggtgtgggaggtgggaagggtgagggtctgggggaatgcggagaaaagggaggcttgaccccgggcaccatgggccactccaggatgggacacggcccctctttcttggggacccagtatgtcctctcctctagacccagacatacag

SEQ ID NO: 13139 - DNA, 1253 bp, Homo sapiens
ccgtgatgtcgatgatactcgttttccctgatccgtggtgttgcagtccgttgtcaccagccttgtttctagtgtgtatatatgtcgcccccgtgatgcatatatacacaggtattaaatatatcgctctatataatattatatatgtgtgtggtatccaaggaatcacttttatgagggctaaagataaagaatttggccagaaaatgcagccatccttgtgtgattaggagggtttcaggggccactggactatttgcaaggtgacagggactggagccatggctcagaggtgattcgggcagccagggacaggagccaccctccccaggcccaactctgctagcttcccagaccacccccatcgagtgcggagagagtgggagtgctcagggaaagaaggtgatttgtatttgtctccccgctgaaaagaacaggattcaagtccagagttttcatcttcagcctgtgatctgtccagggacccttgggatctggggcttcctggcctggccagagctggagcccccacagggtaaggaagagagagtgggaggcagagtgtgatggggaggagggacaggaagacccttttaatgatgagggtaactatttcagttgtgagccttctagggccccaggctgggaggctcagaggactgaatctgggacctgtgttccccccggcaggcagggacaagatggcatggcaagcatgggggcggggtgggtggggagggatgctgcatttctcagctgggcagtaatcaatttaatggtcctttaaaatgtctgtgtattaaaaatttaagaataccacactttaatattaaatattcataaggtctagtatcttgataataatgtagatgttttaataacaatttttgtccttcttaaaataaaatgaaagaaacttgcttcccttagcctttgttctagaaaataaacttgtgcactttgacctctgtccccgagatgtcactcctgttcctccccacctggtacttatatccaggggccttagctgctctgtcctcatgggacagacctggccggtactagctactctgaggaatgctaagcattccgaggggtgaggggcaggtctgtgtccctgtgtacacacggaggccagccgaccctggctccggcagcatctcactggcagcgacacgctgccacttgccacccttccctggctcatctgcagcttgcctgctctcagccttccacgtggggctgccagcggt

SEQ ID NO: 13140 - DNA, 2637 bp, Homo sapiens
cgagctgcccggagggtgtcagcagggcaagacacctagtctagagtcaccaaggtcacagtgccactttcacgggatagcaggctcttgggacttttacacaggcctagggtcccctcagtcttggtcccaggagatgggggccactcgtgaggctggccatgctgtggcttctcacagctgtggtctcccctgcctcacaacgactcctttctcttgtgtggcgggactcgcccttttgctgtgctcagaagattcactgaggaaactcatggaagcctctgctcatttgggtcactgggacacccctgagatgggtgtgtttatttgctcagggcgggcagcctatggtgaagaggagacagaggcgatgggcgtgcttcgtcctccgtaacactggctttatttaccgtggtggttcagagtcccaggccctgacctctaaagacttttcataacagacgttaagaccaagccgtggacctcaccccaggggaatgccacggccctttggggacctgcacacccacctctccgggggacttgacaaggggccctgaggccaagggaggtcactcctccctccaggcccctgacttttactttgtggttctctaaaaaccatgtacacactttcactctattgtaaccacacagggcaggcgcatccagcatgtcagtgtcctgccccgggcagctctccctcccgggcacgctccctctggcctggtggatcaccaagagggcggttctcattttgttattagtggaagagccttgagcttaaaagctcttcattttctttgccggaaagtatatggtttgtgtttttgcagttttatttttttaaggatggacactaaatctctggtgtccatgttccgagcccggtggctgggatggtggctcgatgtgtctcctctttatcccgccctctgcctgtttggtgccctcccttctttcccccaggcagtgggtatcgggttctttcccaaagtgcttacttggaaagagtgtggctgctggactcttttcgaaatgcccctctgagtcaggagcctggtggggacaagatggaggatgtccacagaggctgacctgtgggggaaaagaagtgctcaggtaaggttgtctcctctcctgtcctaaaaaaatccatgcttgcaggagagggttggtgcctgctcagtttctgtcgagggaatgggagtctcctcggctccctcctgggccctctgcttcttggaggccgaccgctggagactgcggctcctgtgcttggatctttgacatctgtcagtcactggaggctagagaagttgactttaccttggctttctgtgggttcccgatgggcttggaagtgccgtctacttcctaagcatcctgtctaaagctttgtggcaccctcagtgcaacctcagaacagacaaatcatgaatgagctggaactttgcaagaatattcatattataaatgtctcatctgatggaggaacgtgtgcatttagagagagggagagttttcaaggtttatggcaactttgtggaggacctgggtaactcttacccttggccaaaggaagaggttttcctgtctggcttctgaggttggagggggcacttagcagtgaaccttaagtctgggtacatgtaaccctgctgaggggctgtgcaggccgctcctacggtcctttggcctgaggcagggcgggaggcatgcaagccagtgggggaaaacccctctgaagctgggcagccctctacctgggccccgggagccgtgctccttggaacgcaaagggccgaggagcatctggttttcatggcaaagctctactccagagctcctttaacatctgctaattaagtgcaataaatttttctagaaaatggcaaagatgacttccaggtggatattgctctcttacggtgttggggatgccagaacaccacttggttttatttttctaagtgcatgtgatgtgatagagtgtgtggggctctgtgtccttccctgggagctggcattccagcgggcccctctctttacctttgttgggggaaggaggcaagagagaaattccttcttcccagccagagagggcagaagcagaccgtagcccattggccttatgtgcgtgtgtgcgtgcgagtgtgtcactgctggtgggccggagtgatgtggtgggagggaagccgggaatgtatccttttcagacaaaattaaatattttgaaatgagaatgttgggattgtcttttctgtccttctccccacccccaaccctgagtttcctctcttgagtgttggcctaggagctggagagtcaagctggaaaacttttatctcattagaatccaccccagacacccccttcatcacagtccagacactcttagcatctgaccccaaccactctgcctcagtttcctcatctatcagatggaagtgattctcgccttgcttatattgaggagggacaaatattagaccaaaagcagtttgaacaggtaaaggtgctacacaactagaagacagggaactgcttatgacaagtgttctcgaatagagaatgcgtgatggcagctctgtaaagaaaagaaagggctgggcgcggtggctcacgcctgtaatc

SEQ ID NO: 13141 - DNA, 1099 bp, Homo sapiens
ggcgggcgcctgtagtcccagctactcgggaggctgaggcagaagaatggtgtgaacccgagaggcggaggctgccgtgagccaagatcgtgccactgcactccagcctgggcagcagagcgagactccatctcaaaaaaaaaaaaaagattccaaaagcaacatcgaatgggagataatgaacttaggaagctgacagccttgatccattccatgcctctgctgtctcctagctatgtgacttcaagcacagcatgtcacttctgagcttcagttccttcatctgcagagctgagcccagccttgcagggctggagggagcccgggagcgggtgtgtgcagagccaactgctcagttcttccctgtgatgaggtttcagtcaagagaaagtcgttggcctctctgtggggacgtggtgaggcagtgaaagaggctgtccccgcttcaaggtttcttccctcctctctttcttctccttgcatgtttgtttcttcagctgaagccacacatcaatgggcccttcacccctgacctggctcaccctgtggcagaagtgggcaaggtggcagagaaggaaggatggcctctggacatccgagtgggtgagcaccttccaccccatctgtttagcaggtctcagggccagtggctctgcccagggctgtagacaatcacctatgcctactgtgtggcactttctaaggtgggcagtttctgaaatgggtttattattgaaaaattactttttcggccagaagtggtggctcatgcttgaaatcccagcatttcaggaggccaatgcaggtggattacttgagtctaggggttcaagaccagcctgggcaacatggaaaaaccccgtctcttaaaagaaaatgcaaaaattggccaggggcagtggctcacacctgtaatcccagcactttgggaggccgagatgggtggatcatgaggtcaggagatcgagaccatcctggctaacacggtgaaaccccatctctactaaaaatacaaaaaattagccaggggtggtggcaggcacctgtagccccagctacttgggaggctgaggcaggagaatcgcttgaacccaggagg

SEQ ID NO: 13142 - DNA, 1178 bp, Homo sapiens
ggtctctgttaaaaaagtctctggcccagcccagatggtgaactcttttggccaagtctggataatttgaagtcaggtggagacctctgctcactgtctcctcctgacccttaaccccaccacccacaatgcaccaggtctaattggtagctgcaccaattcaagctatgaagatatggggcgctcagcagctgtggccaagcaggcactggcccatggcctcaagtgcaagtcccagttcaccatcactccaggttccgagcagatccgcgccaccattgagcgggacggctatgtgagtgcccatatccccctgcccatctcccccaccccatgctgagtaatgcctccaggcggcacaagcccagaggcctgttgggccggggctggggcaggtcccagtggctgccctggggttccagtacagcacttcgtcctgcagccaccacatcaccccttcccatcagactctcacccacccttgacattctgtcttcctctctccctggcaggcacagatcttgagggatctgggtggcattgtcctggccaatgcttgtggcccctgcattggccagtgggacaggtaagaggcgtatcttttgacaagacagccccttgtgcacagggtacagagccccagaagttggagggggaattattggggtggagagaagagactccagccaaggtctctagctccagggactcttgcccattagaagcctctggcagacatgcctgggaagaggggctgggtgaggaagggccctgcagaggcactggggggcaacttggctgaagcctgggctggcaggaggaagccagcgcggcctcaccctgacggacacagcaggagccgtttgggaggaggcagtgccccaggtcaggaaactcaggccttgaccaaggccttgcctctggcttacgtgtggttgcaggctgggcccagtgatcctgaggttcccttctgctctgcgcgtggccccaggaggaggcaaccctggcagggcctcttcattttccctcggtaggagctaggctgggctgcgccacaggaacccagcttatctgtcctcgggacaggccaggtgacaaggccagatatccctaaccctgatccctctgacctggcaggaaggacatcaagaagggggagaagaacacaatcgtcacct

SEQ ID NO: 13143 - DNA, 1213 bp, Homo sapiens
gtcagaggccaaaagctcagagagggggctacacggggcctcacagtgagcaggcagagagggtctgaggtgattggactttttctgctttgagaaacaaacagaaccagggctgaacccaagtcctggcccagccgggtgaaaggactctggcaccccctggtggctgggtggggcagagggtgctcccaggaagggggcgccttgagcttcacagatgcatcttgtgtggggcccggaggccgtccctgtctcacccaacctccctccacacacacctgcctctgccaagcaccaatgggtggcttctgtcttctttgccactgcaaacaaccacgtgcctctgtcccctcggggcctcgtttgggtctcattcacgcaggcttcacttgcccttaggcagcaggcgaggaagggcccctccagcccctttaccgggagcctcaggatgcccaggcgccaggtgggtgaggccaggcaggtagggccagacaggtgaggacggtgccctcctctgccttataaccttacccccgcttgcctgacagaaacatggcatcaggtgggtggtgatcggagacgagaactacggcgagggctcgagccgggagcatgcagctctggagcctcgccaccttgggggccgggccatcatcaccaagagctttgccaggatccacggtgagctggagtctgtacccaggccatcctcatcccatccctagtgatcaaggtcactctccctgcccgtggctgagttgggcctggttctaggctgtgtccactgcagcccacaggcccgtcagcctcttgccccttcttaggctcacacagtgcacatccgacgctcagcttcccggcttcccgcaggccctgcttccaggcttgtagatctgagccgctgagatctaggacatgtgccagggggttctttctgatcatgaatgtgcagcaggaaggcctcgcagacctcagcaccagcgcacacttgctaggggcacccctagtgaaagggagcagaccagggccccatagtcactgcccgggcattgtcccaggcagcaggattaggggcatctcccagagccccagatgggttcagaaaatgaagctctccaggctagtcaggcccccgatgaccgaatgccgcctgctttccagagaccaacctgaagaaacagggcctgctgcctctgaccttcgctgacccggc

SEQ ID NO: 13144 - DNA, 1228 bp, Homo sapiens
gggtgaggaagggtccctgaccctatcagggcctggagtccctggagaagggtctgcgccctgcgtgctgcgtgcccgttgggagcactgctgtggctcccacatctctccagagcctcttggctgccgtgtgccccgcctcttctttgcctgtgctgggcctgctgggctcccttcacctcctgtccaggttggttcaagccagcatgtcagtgaaatgtgcgtgttctttatccctggcagggatccatcagtgagccaggcctgggccttctctcctggtggaccagcaactagccctggggctggacagtggaccctaccagcctgcgggaaggtggtatggccggctgtgaagacaacagcagctgaggccgatgctaaggagatagtgtctcgagctggacagtgaggcaaggccaggagtgcccaccagcttgccccgctcctccaccatctaggccctgctcctccttcactgcagtgatggatccatctgtggctgtggctgttgggcctccactgaccttgactgaaaagacccttcctggaccctggacttgacaacaaacggcacagacaccaatcactcacagaacagtcactggttttggattcttgttttccttgcaagaacaaaaggttctctagaatccttcagccaccaatgaaatgatcaggcaggagaaaaactttagatgggagtcttgtcatcaaaaataaatacagttgcatggagctgcttaagatctgaaccaaactcaaaataggaagacgggggctaaaaagttattttaagaacccccccaccacaaccacagtcactccgtgggctaagcggggagcaggaagcatgtctggtcacaccatcttggaataggaagccatggctggacggatcggatccactgatggcacacgtggagctgaacttgacgccagcggcggggcggggaggcactgccctcactgttgcagttccttcattctgttgagggcactgccagcgcggaaccactcaatctgcgtctcgttgaaggtgtggttcaggaggatggtctcctgggtcccgttggggtgcttgatgatgcacttcaggggctgcaaggagaaggtgggtgtgggtggaagtggtgggtactgtgtgcccttggccccgcaggggggtcagggagacagggcactgcctggggacctaagaggtcagcaggcaaaccaaatcctaggc

SEQ ID NO: 13145 - DNA, 1098 bp, Homo sapiens
ttgcctgctgacctcttaggtccccaggcagtgccctgtctccctgacccccctgcggggccaagggcacacagtacccaccacttccacccacacccaccttctccttgcagcccctgaagtgcatcatcaagcaccccaacgggacccaggagaccatcctcctgaaccacaccttcaacgagacgcagattgagtggttccgcgctggcagtgccctcaacagaatgaaggaactgcaacagtgagggcagtgcctccccgccccgccgctggcgtcaagttcagctccacgtgtgccatcagtggatccgatccgtccagccatggcttcctattccaagatggtgtgaccagacatgcttcctgctccccgcttagcccacggagtgactgtggttgtggtgggggggttcttaaaataactttttagcccccgtcttcctattttgagtttggttcagatcttaagcagctccatgcaactgtatttatttttgatgacaagactcccatctaaagtttttctcctgcctgatcatttcattggtggctgaaggattctagagaaccttttgttcttgcaaggaaaacaagaatccaaaaccagtgactgttctgtgagtgattggtgtctgtgccgtttgttgtcaagtccagggtccaggaagggtcttttcagtcaaggtcagtggaggcccaacagccacagccacagatggatccatcactgcagtgaaggaggagcagggcctagatggtggaggagcggggcaagctggtgggcactcctggccttgcctcactgtccagctcgagacactatctccttagcatcggcctcagctgctgttgtcttcacagccggccataccaccttcccgcaggctggtagggtccactgtccagccccagggctagttgctggtccaccaggagagaaggcccaggcctggctcactgatggatccctgccagggataaagaacacgcacatttcactgacatgctggcttgaaccaacctggacaggaggtgaagggagcccagcaggcccagcacaggcaaagaagaggcggggcacacggcagccaagag

SEQ ID NO: 13146 - DNA, 1236 bp, Homo sapiens
caaccattgctcaccagccccgttacacagattggaaagctggggccccaagaggctgggcacttgttctacatcacacagcaagtcagggcaggtctgacaaggggtgagaaggtgggcttcctggcagttctgaaggggcaggaggaggggcaggtccgtagcagccaatgtggagagggactccacctaaatatccctcctctgcccatcctctgtgtgcagggtgggaacgactttgagatctttgccgacccccggactgttggccacagcgtggtgtctcctcaggacacggtgcagcgatgccgggagattttcttcccagagacagctcatgaggcgtgaccggggcccacatctgtgtgtcgtgacttctgaagagtttggcctaggcctaaagagaggtcctggtgttggatagatgccagggcccctcctctggcccaggacgcctgctgcaagcccacccagatggggccagagtctgtgtggacaaccgtccccagccagtctgctcctagtggcactggcttcgtcctcccagggcccagagtgttccccatgctccacctggtggcccaggccacagctgctgcttgtatttcggtacagaagaggtttctttctgcaccaggaggaggcgtgctcaagtatcggtacgagatctagcctgccctgcctgcctgccctgggcgatgaggtacggtggggaaggtgcctattttagagaactttgtcacagtattaaagttcccagaacaaagtaggtgtcagctgtgtctgaatggataattggccccagtcacatgctgtcacagccactactttgccgacaagtaaacagcacagagagggcagggacttggcccaggtcacaaaggaagtctgatgcagtcgaggagggggccattgaatccccaaagaagagctggtttggtgtgtccacccccagccccttccttggggaccctgacacagaggcagcttcaggccacggtgggtcacagttgagggtttattgccagtgttaggaagaatggggggtctgggtggccaggggtcttgggaggaattccaaatgagcactgcagggcctgtgagtggggaggagagctgctgcccccctgccacccaggaggccccagggctgatgccaccatatcctgactgctagtggtgccttaaaaggtggcctccccacaggaggggagccttgggggcccccaggagtca

SEQ ID NO: 13147 - DNA, 1664 bp, Homo sapiens
tattttcagtagagacagggttttgccatgttggccaggctggtctggaactcctgacctcgggtgatccacctcccttggcctcccaaagtgctgggattacaggcgtgagccaccgctgcctggccagaaaatacctttgatatggaaagaataatgatgtgaggcctggcgcggtggctcacgcctgtaatcccagcactttgggaggccgaggcaggcagatcacttgaggtcaggacttcaagaccagcctggccaacatggtgaaaccccgtctctactaaaaatacaaaattagccgggcatggtggcgcatgcctgtagtcccagctactcgggaggctgaggcaggagaatcgcttgaacccgggaggcagagattgcgatgagccgagatcgtaccagtgcactccagcctgggcgacagagtgagactccatctcaaaaaaataaaataatgaagtggaatcaaggtggcaagaaaatttagaatcgtttctgatagggactttcccttatcctaaatgtgttttgaaggcacacgttatttccattgtcattctgactttagaaaggcaggttggggcatgagtgggcattttcctaatgacttgctgctaggaggttataggcagggaacagtctgggagtctctaatccagagagactttcagattccctctcttcacatgaacctccattagttagattttgggaaagtgagcatgaagaagggactcagagctgccaggtacccgagtctcaggtctgacatccttgggccccttctgccacaacttcttgccacttcacggacttgaattatgttgcttcttcctggaagtctggcctgcagcacaggcctttcctctccaaaaagctgctgctcatttctggccccatctgctgctatctttgccatcagccatcacagtttggcatcatcagagtctcagctagaggagctgtcattctgccttagtgtttgcctgcgacctgaccaggggcatgaccagctgggatgtcaagtgacatttgggaacttgtagaggccaaatgattgaaagtttaattcttctcaagacccactgatttgccagtgtgcatggaaataatagattagagcagaaactagcagggactgttgtataatcgtgatctactagcagaattgggcccaaagagaaagaatttctgaggctgggtttcttctgggagggtagcaggttggtcttggccagtgctctgtttcccaccagtgttgttcccttttccagcttgcctggcccggctctgtcttccagggtcctgctccagacccctctgcctggggtctcccctccatccagggggttctgggcatcacagctcctttttttcctttctcctcttccagatccagtttcagctggtttgcttcttccagcaggcacccttaggcccaggagcagctcccctgagagaatttgagtcactcatttccttgaacagcacccccctttatactagcagccatttgtgccattgcctgtgccctagggtttgtggggagagagcgagggatcactgagcagttttcccagagctccatgggaaggcaagctctccctcccaatgggagccccactgtcactaactgtaaactcaggctcaggcttcaa

SEQ ID NO: 13148 - DNA, 1828 bp, Homo sapiens
ctcaaaaaaaaaaaagaagaagaagaagtggtcagattcaggacgtgttttgaggataagtggtggatttaatgtagggcttgagaaaatgccattgtgtatgactgactggtgtttgaatcctttatcatatcccagggccggtctaggacacataattgtgtgtgcctaggcattcttcccagtttgttgtggctgccctgcccaagcccacatcacctattagcttcacgtccttctctccgcagccaccaaaaccctcaacaggggcatctctgagttcatcgtgatggctgcagacgccgagccactggagatcattctgcacctgccgctgctgtgtgaagacaagaatgtgccctacgtgtttgtgcgctccaagcaggccctggggagagcctgtggggtctccaggcctgtcatcgcctgttctgtcaccatcaaagaaggctcgcagctgaaacagcagatccaatccattcagcagtccattgaaaggctcttagtctaaacctgtggcctctgccacgtgctccctgccagcttcccccctgaggttgtgtatcatattatctgtgttagcatgtagtattttcagctactctctattgttataaaatgtagtactaaatctggtttctggatttttgtgttgtttttgttctgttttacagggttgctatcccccttcctttcctccctccctctgccatccttcatccttttatcctccctttttggaacaagtgttcagagcagacagaagcagggtggtggcaccgttgaaaggcagaaagagccaggagaaagctgatggagccaggacagagatctggttccagctttcagccactagcttcctgttgtgtgcggggtgtggtggaattaaacagcattcattgtgtgtccctgtgcctggcacacagaatcattcatacgtgttcaagtgatcaaggggtttcatttgctcttgggggattaggtatcatttggggaggaagcatgtgttctgtgaggttgttcggctatgtccaagtgtcgtttactaatgtacccctgctgtttgcttttggtaatgtgatgttgatgttctccccctacccacaaccatgcccttgagggtagcagggcagcagcataccaaagagatgtgctgcaggactccggaggcagcctgggtgggtgagccatggggcagttgacctgggtcttgaaagagtcgggagtgacaagctcagagagcatgaactgatgctggcatgaaggattccaggaagatcatggagacctggctggtagctgtaacagagatggtggagtccaaggaaacagcctgtctctggtgaatgggactttctttggtggacacttggcaccagctctgagagcccttcccctgtgtcctgccaccatgtgggtcagatgtactctctgtcacatgaggagagtgctagttcatgtgttctccattcttgtgagcatcctaataaatctgttccattttgatgacagaatggcagtgcctgattcttagtaagtatccggctaaaattggaatgaagacatacttagctttactagagtggtgatagctgcttaagactttttttttcttctttgtgaaagagtttcactcttgttgcctaggctggagtgcaatggcacgatctcggctcactgcagcctctgcctcctgggttcaagtgatgctcctgcctcagcccccaaagtagctgggattacaggcgtgcgtcaccacgcccagctaattttgtatttttagtagagacagggtttcaccatgttggccaggctggtcttgaactcc

SEQ ID NO: 13149 - DNA, 1111 bp, Homo sapiens
caacatggtgaaaccctgtctctacaaaaaaatacaaacaattagccaggcatggtggcacacacctgtagtcccagctactcaggaggctgaggcagcaggatcacttgagcccgggaggtcaaggctgcagtgagctgagattgcaccactgcactccagcctgggcaacagagagcaaccctgtctcagcaaaaaaaaaaaaaaaaaaaaaaagccaggaccctcattagctagcccctctttctccacctgaacccggtattcaggctgtacaaaatagccggcttttgaaatggcctctatgaaatttcctgttcatttttttattctcaatttcataaaaattatatcatttctcattctttcttggaaggtctatgcagtaagaaaggaatgcataacagaaggataatgctatcatccttttacttttcttccttcttcatccaggtcctggtccagcctcagatcatcaagacagattcccttgttttgaccacactgaagacagatggcagccctgttatggctgcggtccagaacccggccctcaccgccctcaccacccctatccagacggctgcccttcaagtaccagtaagagctgccttctcccccaccctcctccctccccctttattcctggaggtgttagtcttcagagatgttaaatctctatatgctgagtaggtatgggagggtctatagcacaaatcagtcaaattgtaaatgtcacccctcttagttgtttttcgctcgaaaaagtattagcaatgtgtgttcgatgtgggagtactggagtctacaaggaggtagaaaagaatagcagaaggaccctctattcttggctaatagctccacacaagaccattcacctcttagatcctgctgatgacttctgaaggaccctagggccaccaggcagggaagggctccaaggtgaagaacatggaaggtaccccatccttcagttgtaggttcttagccactttcagcatcctatagcatgagaatctgatagagtaaatggtgattaaaatttagaagcactagctttattcataaaatccaagaactggaagcaactcaaatgtccatccacaggaaa

SEQ ID NO: 13150 - DNA, 1208 bp, Homo sapiens
gctaattttttctatttttagtagagatggggtttcactgtgtttgccaggctggtctcgaactcctgatcttaagtgatccgccggccttggcctcccaaagtgctgggattacaggtgtgagccactggcacccagccacattgtgaaggttttttaatgaaaataaattcaaatcagttcatctaaaaaaaatttcattacctctgttgaatgtttggaaacacacagtgtggctgtgctgctgacattgttatgttgcactgtgcgcctctgagtcctatacaacaacctgcaattgtgacagctctgggtgtgacagaaatgggtgccatgttcccagctaccctgtgaggtagacaggaacacacagccagtatatcacagagcctggcatcccatcctgtgatcaggcctgtctgatcacaaagttcacctcgcttctcccctggttcctctcttactttgatcgtgctggagagagcaggaaaaagtttggttttggggctccatcaacaatagtgtctgtttctgcccaccctagggaagcttcctgcaggatccgcctgttccgatgtacacatggcgttgtgtgccgtgaacctggctgaatgtgcagaggagaagatcccaccgagcacactggttgagatccatctgactgctgccatggggctcaagacccggtgtggaggcaagctgggcttcctggccgtgagtacccttcggttcccttctgtaaacctcccctgagcacttacctagccaggagttaagatgcagaagcagttatgaacccccttccccatcaggtgctgcccacctggaggggtaggcaggcattcattcagtcgctcatttcaccaggactcccagcaaccgataaaacagaccaaaattcctccccttgtggccttaataccataagccttgtaggcaggacattttggtcccctgaggtaatatgaggtaatatgaagattggttcagcaatagcagagctactgtacttgggggttaatatgcaacttttctgttcttcaagtggtcataaaaattcttagaatcccctggttatgtctcatggttctttcatttactcagaaggtatttattgggcatcttgtattgatcacagcactgtgaatccagaaataaaagccagtgcctttgccaagctacagagttaaagaaaagaaaaatgaaat

SEQ ID NO: 13151 - DNA, 1208 bp, Homo sapiens
agacacccctgcaggcactgctgcctgctggattcacttacccctgggtccctctgcttttcagggactaggatgctatgagaaccctcccccatccctagcctccccttccactcccagtctcctctacagaaagaagctaactaagtatctccagagagtttaataccacatctctgggggggtggtcccttaaagaacgggtacaacaccttattgtggccactttataggtaaggaaactgaggcacacgttggaatgactatcttgggtggcttcttagcagcagacgtgatggtgaagcctgtgtctctgacttccagcattgaatgaaggtgctaaagggtggggcgctaaccctagctcagggctggcatttcagatctggagctggtggcatggtgccatagtggcagcattggagtcaacagatgcacatgtcatatcagtgtggggcgtggcagtcactggcttgggcccctctgcctgtcacgcaggtgacacatagtgacctgcctctcgactccctgtcactgctgcaggagccccctggtgaaggccatcttccatgcctgcagagccatgcatgcctcactccctgggaaagcagatgggcagcagagttccttctgccattgcgagagggccagtggccacctatggagcagcctcaacgtcagtggggccacctctgaccctgccctcaaccacgtgagtgggagctgagttggcccctgggggaggtgctctgcactggtttacgagaacactcccactcacctcatgctgaccctgcgggtggggccatccgaaagacagagaaaccaggacagcagccccctttcaaaaaagttacggcttattggcctaggtggactcctttttcatcccttttcagcctctgaggcaagtgtgtttctacctgcacctttcttaggctcccagagtcccaggtcctgctggcccatagcctctgtaagcccaggtgcaccccagctggccaggggttcacctgcatttgctccagcggtttgcgtgacttcccaggcctctgcaggcagccttggagtgggttcctgccccctcgggcacacaaacagagctgaagaccaccctgggcacctccttggctggccgcatacctcctggcgggcagctgtggtgcattgtagttgcattgcatgttctggtggtacccatgcaatgt

SEQ ID NO: 13152 - DNA, 1208 bp, Homo sapiens; identical to SEQ ID NO: 13151

SEQ ID NO: 13153 - DNA, 1144 bp, Homo sapiens
aggatggatgtgagcgttcagtgaatgagtccaggtaacgccaaggaactgcaccaacttcatggtagattctcggttgtgacacacatctccttcccacaggagaggtggatgcctggcccggccagcgagagcgggccaccgccatcctgctggcctgccgccacctgcccctctccttcctctcctccccgggccagcgggcagtgctgctggccgaagctgcccgcaccctggagaaggtgggcgaccggcgctcctgcaacgactgccagcagatgattgttaagctgggtggtggcactgccattgccgcctcctgaccaccaggctcagcccacccctccacctctctctcgatttctctctctccccctcagcatcttcccgctgagagtggtggggaagagccttgtcttcttagctgtcacctgccgaggcttctgggccactcaggccagtgcacccctgggcagagccccttaaagctgctgtcactagatgcccatggtccagggcctggtgggcgtgagaggataggtggcagggcagaaactgggcagccctgacttgatagcagcagggggagctcccaagctgccaagcccctgcctccagccttcctgagtttctctctcctgaaccctactctctcctttttgcttcctcagtttttatcaggctttctctgggggacagcagtctctgagcaccagggagcagttgccctcaggcctgtgcccagcatgccctcccctttttatacgaatgttttctaccagtgtgcttgggtttgccatgatgcgaggctgagttgctgtagcgtcttgattctctccctgggtctgcgttccctcccctgggcctgactgagcctgctcattgtttttccctttattacacaggacagccaggggaggaggggggcccagccctgggaggctggtgggaggcagggggcaggcctgcggatgcatgaaataatgttggcattattttttaattttttaaaaaataaatggtatcttatttaattgtcctgttccttcccactccccgcctcctaggatgttagcccaagctcagggtaggcccagggggctgggagaaatgaagccacccatggggactggggaccaggggc

SEQ ID NO: 13154 - DNA, 1149 bp, Homo sapiens
gggaggctgaagcaggagaatcacttgaacctgggaggcggaggtggtgttgaaccgagattacaccactgcactccagcctgggcaacagagcgagactccgtctcaaaaaaaaaaaaaaaaaatgctgggcgcggtggttcccacctataattccagcactttgggaggccgaggcgggcagatcacaaggtcaggagatcgagaccatcctggctaacagtgaaactctgcctctactaaaaatacaaacaaattagccaggcatggtggcgggcatctgtagtcctagctacttgggaggctgaggcagaagaccggcatgaacctgggaggcggagcttgcagtaagctgagatcgcgccactgcactccagcctgggcgacagagcgagactctgtctcaaagaaaaaaaaaggagtggggcggggtaaggggagcttggactcgttatgccagtcagactccacatcctggccctgctattatagaacctggttgttgcctcttggagcttgttttctcagatgtgaatggagatgaggttctgctcaccttgtcacgttgggaggattgaatgagacgatggacatgcctgggactgtgtgaccccccatgcctgcgagtaggttgctgtgttcataacatgtgttaatgccttgcaccttgctaggtaggcactcagtgaacagtaactatttgaaatcacatggaaagccgaggcgggcggattgcctgagctcaggagtttgtggctggcctggcaacacggtgaaaccccgtctccactaaaatacagaaaattagccgggcatggcagtctgtgcctatagtcccagctacttgggaggctgaggcaggaaaattgcttgaacccaggaggcggaggttgcagtgagctgagatcgtaccactgcacttcagcccaggcagcggagcgagactctatctccaaaaaagaaatcacacagcggagttcaaaaactggtgcaaattaggaattacaccactgtcagaagtttgcaagaagtgagaaaagctggctggaggtctcattttggggttgatggcgagagattgtacagtgccagttgctttccttctcccttgggtctaattggagattgtagaggcatcagaagtggact

SEQ ID NO: 13155 - DNA, 3437 bp, Homo sapiens
ctaaatgcctccgtgacccaaacagaagctcacctcctgggtgttgctgtattaatgaactgactacctgttttgctttgttttgttttgttcatagtggaaaacctcaaccactgtgagtttgccctgcttcgagactttgtcatcaggtaagatgtctcccctccagctgtccagacagcaggttgaattatttggggtcagggtctatctgttcagattcacctcctgcatctccaggtctctctgacagagctttctgccccagttccagctcctgttgcaaaatggaaggtgctgtagaagaatccttagctcctgggagtggttcccattcactgggtccagtccctcgaagtgatgtgtgtcaccgcctcctcttcctgcccctaattgcagccctcttcttctcaccctgtgtcctctaggacccacctccaggacctcaaggaagtgacacacaacatccactatgagacttacagggccaagcggctcaatgacaatggaggcctccctccggtgagcgtggacacagaggaaagccacgacagtaacccatgacgaccacttctctgtgtcatcacacatacccacttcacacacacacatcccaaataccaccaccaaccaccttcttcctctcaactctgtcccacaggcctgtctggtatttgtggagcatcttgtctgtgtgtgtgtgtgtgtgtgtgtgtgtgtgtgtgtgtgtgacagagagagagcgagagagcctgtgtgtgtgcatgcaggggtgaggtattttcactgccctccctggagagtcccttgtaagtttggctcctccatgcctgtccattatctgtctcctttccttgtgtcccaaaacaaagctgtttgcctcactcaggagatctgggggaggtttcatttaaaagtgctgggagcaggtgagccacaggcaactcttctctcggaacctgcacacaaactggggctatagagattctccaaggacagatggcagtggagctagacctgagtagggggcagggagttcaggacaaccctcctgtaagttgggggtggtctgggggtaaggctggggcttcctgggaaaaggaaggccatgagaaggcagagaagtaggccagagctgggttcttgcagaaagcatcagtgcctacaaatggagctccacccttcagtctgtgtcgtgttcagtgtcacaaagctaccacctgtcaccagagcctactgctgctctccactcaactggcctctgctgccaggccactgcctgtctctgcttccgactttgtcttctttctccctttccctccttccctcatacattgctttctctccctctcctgcgtgtctctgacatctctcacttccttttagatgaatctactttaggttcattcctatatttagcatttatgcccagtctacttccagaaatgactttagactgcctttcacataaaatcacaaaactacaggacagtacaaacagattgccagagaaatctgggtcaaagaaaggaataggaaagaaagtttctgtagtcaagcacctgaacaggccctgagctcacaggcagccaatgtaaagagggaaacacagtgagttatgcagttcccagtgtccagttaaaggaagcacacatgctagtcatgtgagacaaccttttattgggacatcaggttctagaactaattctaaagaagtatcagaaacaatatacataatttgtctttcttagtaatttggcttcaaagacaaatttttgaccacacctccgttttctccgtcagacttctctcccttctaagcaggcttctctgttgctccatttgcttcatacatacttgacctctcttttctattccccatcacttttgtgctgaagctaatcatatttatgtctgtctttctctacttttccctaattccctctcctcctgactcctgtagacattcccaatgatacccaccgtcatacatttaggcttttcttgcctttccctgaagccctgtatttattaatgcatatatttcccctgcttgttgtacaagtaagttactcttttcctttaatctgtaagattcatgaaattcggggccagggaaacagtttagccttagggaagggaaaacactaagtgaaactgtttacaataacctcatacaaccttctgtcccatctcctggttcagcctaggtgtttcactggtcctctatgaatcccagcacttataatcccagtcttttatcactcaggtgctaggaaaaaaaacatagactcaagacccaagattcaatggaccaggagaaaggggggcggtgatcaggtcaccagtgaccccaacctatgctctcggtctttcctggaggctgccaacccagccctcatcctcccttgctcacaaagttacagggtaggcacctgtcaggacagaacagcagcagcgctacagcccagaggttatacatttcaacagaacagggatccttggctactgtagaagcagtcctgtatggagaccttggaccagcaggggaagatctatgggcatgggaggtgggcgttggaaaggctgagtaggaatggtgcctggcacccctgaaccatgatctgagcctccctggagaaggtattttatatgtctgctgccagctgctggtctccacaccctcaaccgttctcaacccccctgcagggagaaggcctcctgggcactgtccttccacctgtgccagccaccccctgccccactgctgaatgaaggccatttcaagcgctgcttctcactccattcctctcagctgttattgctgcagggccaagccctttttagtgctgtgctcgtccagctcaccaccacagcccctctcagccctcagtaggtgggaggggccagctgcctctttaggccagttgcatcctccatttatccaaaccactcctctcctcccagtggagtggggttctgccagtacagccctactgcatcatctgcgtcagccggtcctagcccatctgcagggtgaaagaactcatcaagagctccttctgcccttgtaagcccatcccagctacttgtaaccatctctaagggcaatggcattgctccctacccattcatctgcatgagctactcttggcttccttaaagggtcaagaaagcaatttttctgcttactagattcattgagatcagctgtgtgagccccaaagtgggacaagggtgtctccttcattacttaaagatattcatgagggtgggtcactacagatgttggggagcaagggctaggatcactttttaaaaaatcaccacttgtggctgtcccagagtgcggttgtacatcctccccacctcataacgcagccactgaggaagagtggttttcctaagaagacattgctggagttgactttcttctg

SEQ ID NO: 13156 - DNA, 1131 bp, Homo sapiens
tattccagtctcatcttccatatttccagccacacaccgattcccagtattcaccatttcttgagttttcacactcatacccacccccaaacattggctcattgttcctcccacatggaaggctccttcccagagctctgggtcttaattccacccattctacagtgtctttgaagtcttcgttcctcctttcatttgaaagttgacggctccttcctctaagcaaccagtacctctcttcaaatactcggtattatgtggctaaacacacacaaagcaaaattttactagactctgagcttcttgctggcaggggacgttttttatacattgcggcccccagtgcctggcctgtggtgaatgcccagttaacgtgcgcatgaacaaccaaacgtgctcaaagctgcctttctcctgccatgtttgatagaagcactttgtggaattctttcagtctgcggatggaagactacgctgttgcccagttcactgctgctttcctttcttacaggaattacagaaaggagaaagcactaactgaagaaatggtgatgctctcagtttctctgccttccctatcagcagaaaggctcggggaaggccctcagcctcccagtctggtgaagcttcctgtatggtccatgaccgtattccaccccaggctctgggaggctccctgagatgtgctgtccactaagcactgcacaaacaagcaatcaaattatgaataaacataataaatatcagccgtgcgtgactgagtgatggctgcagtttctcagtatccctaggttctagttggtgcagttgtctctgctgtcctttatttatgggagaaacataggcccaggctatccaggctgcagtggagcctggtgaactattctgggggccctgggaactattttcattgtttacaaaagcccaacagaaactgtgcattttcccttaagaaagcttcatgggctaactaaagcctcatgccattctgtgttcagtgccagtcatgacagctctgcttgttagcatactacttaaatataactagaatgattcaaaactcgggttctgtgatatgaggatatagataggttttcatctatttcctggcttataactcccaaaaccctt

SEQ ID NO: 13157 - DNA, 1587 bp, Homo sapiens
gactgtggagatgagaaggtggtggacactcgtgatggaatggaaatcgtcctaccgtgcagccacaccctgccctgccccgccccgccccgcccgcgtgcctgcccatgccagcacttccttaagttctcacatcacactcaaaccagtgacaccacaggaaagaaagacccaagacgttggaatggctgtttccatggacacaatctccatagtgacaatgtggggggaggggggaggggtgggatgatggggaaagggtggggggaattaaaagggagggataaatatatatatataaatctatttttagtctggaaagactttgtttaaatgaaaggtgcgctatcccttttgattctgttttaaaattatctcgttaaagatctccaaatttgttccgatgacaagtgaaatttaaatgtgagattgaactgaacaaaccctcatctcatgaaggacggggtgtgtgtgtggcgttgatctttagcctgtctcacaccagttcagaaaacactagacccaggattgaaaaagcaaaccacagcagaaccatccttttgtcattaatttgtctcaaagtgggaaggttttgggggagggggaaatacagggatggtccatgttttcaagagtaggggaatgatgtttaaacacaaaaataaattttttttcatttccagaaacactatttatttatggttttttttttttaattttttctttttgggggtgaaattggcagatgcctgaggtcatagctgtgtcctgggtcactgtggctggtgaggacctcaaggaccccatcaagtgtacacagcagcagcaaaatcaagggatgaccctcctctggggccccctgtcctcagcacattccaggcagctgtgccctgacccacagggacccgtggggatgggaggaggtccaggcctgtgttgccagagctggcagtgtgagctgtaggcagggacggggagggactgtcgctgtgatcagagtgggttaagctgaccaggaacacccatttaacccctttttctttttgctttcatttttataaaggaaaagaggacctgtcagataggcagccccatgctacgtgattctttatgttgtgttgttttgttttgtaaattgtataatttttaaatatctgagttttaaaaaaagaaaaaagtacaaaaaaatcttgttatggccttaagaaggggttagtgcatctttcaggggtcactctgccatggggataaaatagctgtttcacaaacagttttatttaaaaaaacaaaaaacaaaaaaaatcaaaaaatcaaaaaaataataaacttcattttaaccttgtttcctcttctgtttactttaaagtgaatgcgtctcttccttctcccattctaacccccaaagggtagctctggttctccagaggaggccatgatcagaacctgtctgtcccattcctggcctctcgatggccacgcagccgggaagcaaacaaaatatagggttcttctgccactcctctgggcaggtggagtgtggccagtgtatggggacagtcagatttactcaagttgatatgaagacat

SEQ ID NO: 13158 - DNA, 1162 bp, Homo sapiens
gtcaccgtccttcatttgtggtagaagccctggtgactggggatagaatcacacctctgactaaaggaggactcatcttgggccccatgctggggacagagagccaccattattgggtgccctgacaaggcagggaacagacagcgaatgtgcgtgtgtgtctgcctcctagtgcgccatgttctgacagagtgatatgataggtgctgtgtgactaagatcagactactccatgtctctgtacttcggtttcttctgtaaaaacaggaatagcagtgccaaccttttgagattccattgggaaatgtctctaagtgccagcacagcacactggctctcagcccgttgatctgccatgcctagctgtgggtttctcttgggagttggaggggtcaaggcagcagattggaccctgcagctgtctcttatagcaaaaaatacccaaggcttggggttaaaagatgccgcccctgcctcccagcctgtgaggtatctggtacctgaccctcgccaggagtgcggaggggaaaagtccttctgcaggcccgtggttgcccactgtctctttgtgccaagggggttgccttgctggcttgtgtcattggttggcagggcttttgacagtggagtccctatacccagctcttcctcctgtcgtgaattaaacaaggaggccccagcttgccctaacaggccctgtggtccagcacatgggaagcataaccttgatcagggctaatgctgcatcctggatgctatgtaccctgcacagaacagccatggatggacgctgagcaaggcagggaacggggcgtggcccccctgcccctggagctggacatcacacagtccatttgtgtgtatgcatgaatgtcacattctagagttcccctttccccaaactggtccagaggcagtccagggttacacctccagaggagagcctgagtctgtccactttccttccccaccagccccagcccaggcattgtggctgctatagtgcccgcctccctgccactgctcagcagccaagtgcaatcttcattaggcctccctccagtcctgtcccttctctacgtcagagattcttgtcatcttccacacaaagcccagacatctcaccttgccttccagagccctatggaagtctcaggtgact

SEQ ID NO: 13159 - DNA, 1194 bp, Homo sapiens
ctgaaaagggaaatgtattgggcatttggggtaagtagatcaaaaataaaaataaaatcttcttacaaatacaagaactagaaaccaaattccacttctaattctaaaaggtttatatataactctactaccttaccctctcttaccccagattttcacagcagaagtaaacagggaagatctgcaggccgctcacgatagcagcaaggaaatgcctggcatagtgtgtgggtgggtggatggcgggggtaccagaggcagggctggggaccccactctggcatgtcctttatgacatggattgctcatctcaccctgctgtattgttgatttgagaacatttgtgaggcttggtctaaaacattattgctggatcccttcccatggtgtggtcagtgaatggcatttagaaattgaccagctcatcctgccaccacggactcctctaaccacagagacacgtgctgaggtctaacagatggggaccagggaaggcctggaggagagggccaaatctgggatactgacatgcctgacttttcccttcctttcagaaatgttcccactgccaggaggcaggcgccaccttgggctgctacaacaaaggctgctccttccgataccattacccgtgtgccattgatgcaggtaagaggagaccacagacccttgtccagagcatccaaaggattaggacatacagtttgattctctctgttgtcgttgttttttttcttttcttttctttttttttttttttttttttgtcacttcataaaaaaacttcccacccattagcagcactcatctcccttcccttccctccagtccctggcaaccactattctgttttcttttttaaatttttatgatttttttttccctttaagctctgttggactcaatcctttctatctctgtgggctttgctgtacatttgggttacttccactttttgactgttatgaataatgctgctatagaacattcacatgcaagcatttgtgtgaacatgttttcagttctcttggatgtgtacctgggagtagaattgctggatcatatggtaactctgtttaaccttttaaggaactgtcagactgttttccaaaatggctgccccattttacgttctcagtggcagtgcatgagtgttctcctttccccaggtcctccctgacacttgctgtcata

SEQ ID NO: 13160 - DNA, 1171 bp, Homo sapiens
catcaatgctgaggaagaagaacagaccaaattagtgaggggcaggaagggtcagaggtcactgacccctccacctagcagcactgaaagcaaggcgctcccggcctcgtcctttatgctgcagggacctgttgtgacagagtcttcggttatggggcacctggtttgctgtctgtgtggcaagtgggccagttaccggaacatgggtgacctctttggacctttttatccccaagattatgcagccactctcccgaagaatccacctcctaagagggccacagaaatgcagagcaaagttaaggtacggcacaaaagtgcttctaatggctccaagacggacactgaggaggaggaagagcagcagcagcagcagaaggagcagagaagcctggccgcacaccccaggtttaagcggcgccaccgctcggaagactgtggtggaggccctcggtccctgtccagggggctcccttgtaaaaaagcagccactgagggcagcagtgaaaagactgttttggactcgaagccctccgtgcccaccacttcagaaggtggccctgagctggagttacaaatccctgaactacctcttgacagcaatgaattttgggtccatgagggttgtattctctgggccaatggaatctacctggtttgtggcaggctctatggcctgcaggaagcgctggaaatagccagagagatggtgagtatgagaaatctcttaccagcttgggatttttatttcatttggttccttttcttgcatgtttttgttcttacatgtcacatgattattcctccaaattaaagtgcctatgcccatgtgatggacagaaaatgaaataggtaatttggaagatttgtatagacttctaaaatcgtttttcattttttgaaatgtataatgcttatgaagcatattattatatttcaagtttcttgggccacatcttttctaacgcacactttccagttaggatatttattctttggatctgtttcataacttatcctggggcagatcatcaacatcatcatcttcatttctttctctcctctattgaatgttctgtttcctgaatcccatttcttcctcattcttaaagtgagccttcatttaagggcgtgcatcatcctttagtagttttgtgagaaagggtgtgtg

SEQ ID NO: 13161 - DNA, 1267 bp, Homo sapiens
agccaagactgaggagcactgactgcgagatttgcaggctgtgttctagttgcctaactatgtattagcttaatagtctctccccaccctgagccacatgtaggggcagagcaggggccagggcagcctagaaactaaaagtgtgcagggaaaagccccagagatttggtagtttctgggtgaagctaaaccagtccccttgcttagcaaaggcaagaacagagggaagtggatggctggagtgtgaggcatggagaccacaaaggcccacccaccactgtaaatgagctgcctggggctggacgcccctcatacgtggcggagtcacctacacaccgtggggccttgagcgagttgtgaccaccatcctggacttcgatttccctagctgtgtgaggcggacttgggtctgttcacctctcaggcccgccactgctctaaggggctgtgattctcttgttgctttggttttcttggaaggtttccatgtaggtagtgacttgggcggtatcatctgcccattgatttttccagaaaggatgctttcttccctcccattctgcactcagcccacagatgagtgacctcttgcctagctttcccatttctcctcctgtccctgctagtaactcacctggtctaggctcagggaccgagagggcccagcccagtagcagctccccagaggcccccagagggcacaagagccccatagacaacacaccccatcacctgtgaggagcacctggggtggtgtctacggggctggggagccacatccagcccacacatggctttgtgagcccgattgccacggaggcccccagtggctcattcactctccctcctcccctcagcagaagctttgggatccaacaggtgtggcttcctccttgctccgctgtgtctgctgggtgactgtaggcaccacacctccctgagcctgtttgctcatggggtgaatcgtcccacctcacggagcacctgaggctggaatgatggcaacagcacttgtggcactgagaagcgcagtcactgtgtgcctgcagccctcactcgggggtgatgttaatgtccctgttctacgggtgaaaaggctgaggcttcaggagcttagggagcttgccgaaggtcacattgccctctgtccttccttattttattttatttattgagagggagtcgctctgttgcccagactggagtgcagtggcgcaatctctgctcactgcaacctctgcctcccaggttcaagtgattctccagc

SEQ ID NO: 13162 - DNA, 1268 bp, Homo sapiens
ggttgatgctgctctggtggagccccctaagaggggacatggcagctctttgccaatgtaaaggttctgtccagactacagttatggttttacagatgaggaaactgaggcccagaggggtgatgtgctggccttgggtggcctggctaaacggcagggctgagcctgtacctggctccctgaggctttgagtccagggctctcgctggtggcccccatccttacccagaacctggcatctgtcagctgggcacaaatgcctgccctagattgaagagcggagagttggaagcatgtcacagggtctgtccaaggtgctgctggcagcatagcaggcgacggtgctatgtctcatttctatgagggatttggtgcacggctcttgggccccagccgagatgggaaggggcattgtcacagggcggcttcaccagaatcagaatccagggtgaccctggagaggtttactggggaacactcttaataacaactcctgtggggggcagagggtgaggttgggctgcagtgcaatagaaacagaggcctcaggtgatctcacgggcacttgggagcaggggtggtcccgcttggttccagaccaaggcaggggctcagccattacatcctgcgttgactggtcagtggttagctgtccccaggagaggatggctccttcctctcctggggggagttggctccttcaccaaagggaccctcagcagctggcacccctggcagccagagaagcctgtattttggtcttgaaagggggccttaggtggtgcacaggccagatgtcctgtgacaacaaccagagcaagacagatgctggtgcctgggagaaaccatgtcttactcacctgaggacggcaataatagcagtacctgtgcctctgaaccctgctaatcctgcaagctagggccctgacccccacttttgacatgagaggctgaacctcagagaggcgcgctggctccaggcaagtcggctgcagaattggggctcggaaatgcagtgccttgctccccacggcctccacttcccagctctggcaggtgatggttccctgtcctgcgtagcctcagggtgccgtccttgggtgcggcccagcttctaccctgttttggactgtgagctccttgagggcctccctttgtcctgcctacctgggatgcctggcacaatgcccaggccgaagggctcactacacagacgtggccagaattgaatgaagtctcatgccctcccctccccccgagctggtgtg

SEQ ID NO: 13163 - DNA, 1148 bp, Homo sapiens
gggacgaaacttcagagcccaggcagtccctgaatgaccaggccagtgttgtcactgagtggtcccctgctggttgggagtgaagagaatccaggctggcagagctggagccagttggggagcacggttctgggagctctgcaaaatcagtagcaagtgctggaaaaggcacatgccgaagatactcaagagctcccaagatttgcttgaggctagcccagtgaaaaaaaccagagactcatgtttccaggggtcagtctgtcaggcaggaaggacccaggatttgaacccagcttcagtgtgcaggctctgaggctgcccaggacgggaaagtccaaggaaggggcctggtggtgctccacttgcagttctttaaagaatgctgctttttattctcctaaccctttcaagtgggtgcagacttctcgttagcagctggaagacattcctcccacacttttcccttcctggcccaagagagcatccagaaggcagtaggacctggtttttcaggtactgggagccgggggctcactgcttgcactgtgcttagggtagggatggtaaatatcctccctgcatggctttatcctccctctcatcccaaagcaggtatcttctggttgtcacagagtttcattgagtccagctgcagccacgtggccatctggagctggtgctataggtgaccatctggtacattgaggggacctgtttgcctcctccactctataagcagtcatcttgggagaccgggaggagaaggtggtgggctagtcctgtgtcctcctccacttcccatgcctctatgttacccatctgtgtctcctgtgcagaaggagaggaaggggcattaagagatgaagggtgattatgtattacttatccatttctgaataaacatttgttattcctacctttgagttatcttttttttttttttttttttttttttgagacaaagtctcactctgttgccaaggctggagtgcagtggcactatctcagctcactgcaacctccgcagccagactcaagtaatcctcccacctcagcctcccaattagctgggactgcaggcgtgcatcaccatgtctggctaatttttgtagagatgaggtttcaccatgttgcacaagctggtcttg

SEQ ID NO: 13164 - DNA, 1139 bp, Homo sapiens
tgggctttgtacactggtttcaggctgcagggcctgaggccataggcttgagtcagggttgggggcagggggtcctggtgacagtttgctgggatcagcctctccattcttcagcatttaaggaattcaccgcctagggttggtcggtcagcaggttggtgaccacacagccacacgtcagcttacctggtctctcaccccacagcctgggactacggccagggcttcgtgaatgaggagatgatccgggaccaccttccacccccagaggaggagccgctggtgctgatgtgtggccccccacccatgatccagtacgcctgccttcccaacctggaccacgtgggccaccccacggagcgctgcttcgtcttctgagggccgggcacggtcacacggccacccgccccgcgcaccccacgccctgttcacgctcacccagtcacctccccacatcgcacactggggccccgggttcagcctggcctgcccgtgccctggtgaatcacctggctgagcagttcccctggagccccttcgggagcagggctgtgtcccagatgggccacggctgagccttcagagtacgtcctgcctggcacttactggtccttaccagagacgcccagccccatccctgtcctcatgacccctcgtccaccccccacacacactataaggctgagggctgccagcagccccgtctgcccaccattcccggccgtggaccatagtcgggatgtcagcagacacacatgggcagcccaaagctgcaggtgccagggcccaccccagcctcgcctgtcacccccactcccgcctcagggccaggcccaggcctcaccacctgacgctgcatgagacattgacaccagaaagccctcttgggggcactgctccctaccccagggccctggccagccgggagcttggctctcctctggctagagtgggaagagggggctggccatggggccctcccagaacctcagcatttccttccagcccatccaaacactgaggcagccttggggaaccccgagctggggggttggcagcccactgcaccgcctcagggttttggggtcctgggctggggccaccatccctgatggcagaactcccacaaccacatgtat

SEQ ID NO: 13165 - DNA, 1480 bp, Homo sapiens
tgcccagactggagtgcaatggcacgatctcggctcactgcaacctctgcctcccaggttcaagcgattctcctgcctcagcctcccaagtagctgggattacaagcatgagccaccacaagcggcttatttttgtatttttagtacagacggggtttcactatgctggtcaggctggtctcgaacttctgacctcaggtgatccacctgccttggcctcccaaagtgctgggattacaggcatgagccaccatgcccggtcagaaattgctcttaaagaagacagattttctattttggctttagaagaaatatgtcatttttatggataacttaactattgactaaaatatagaatgacccacaactagagttgaaaagaatttcagagacaaaggattctgatcccatcatataacaaattcaggcttttgggctcaaaaaagccaagtagcctcttcccctccctggcaccgctgggcctgcaggtctctgtcgagccgcggacgcgggtctctgttccgctggatggggtttgttaaagttgttaagaataaggcctactttaacagataccaagtgaaatttagaagacgacgagagggtaaaactgattactatgctcggaaacgcttggtgatacaggataaaaataaatacaacacacccaagtataggatgattgttcgtgtaactgacagagatatcatttgtcagattgcttatgcccgtatagagggggatatgatagtctgcgcggcatatgcacacgaactgccaaaatacggtgtgaaggttggcccgacaaattatgctgctgcatattgtactggcctgctgctggcccgcaggcttcttgataggtttggcatggacaagatctatgacggccaagtggaggtgactggcgataaatacaatgtggaaagtactgatggtcagccaggtgccttcacctgctgtatggatgcaggtcttgccagaactaccactggcaataaagtttttggcgccctgaagggagttgtggatggaggcttgtctgtccctcacagcaccaaatgattccctggttatgattctgaaagcaaggaatttaatgcaggagtacaccagaagcacttcatgggccagaatgttgcagattacatgcgctacttaatggaagaagatgacgatgcttacaagaaacagttctctcaatacataaagaacagcgtaactccagacatgatggaggagatgtataagaaagctcatgctgctatacgagagaatccagtctatgaaaagaagcccaagaaagaagttaaaaaggagaggtggaaccttcccaaaatgccccttgctcagaagaaggatcaggtagctcaaaagaaggcaagcttcctcagagctcaggagcgggctgctgagagctaaaccaaacaattttctatgatgatttttcagatacagacaataaacttagggccagcaa

SEQ ID NO: 13166 - DNA, 1237 bp, Homo sapiens
aagtttaggctgggcatggtggctcacacttataatcccagcactttgggaagccaaggcaggaggatcactcgagcccaggaattcaggaccagactgggaaatatagtgagacctcatctttacaaaaaatttcaaaaatattagcctagcatggtggacatgcctgtagtcccagctgcttgggaggctgaggtggaggatcacttgagcctgggaggcagaggttacagtgagattagattgcaccactgcactccagcctgggcaacagagcaagaccctctctcaaaaaaaagagaaagtttcagttaaatcagtactgttgcttggtagccgggttggtaagaaagctctaagtgaggttgcctaatgggaacttcagagaccctcactggctccaggtcactgacaggcccctgtggggcctttctgccttgtaaaggcttcagggatctttcagacttccccttcttcaaaggcttaatcaaaagagttagacccagaagccactgttgctatgaaactgttacttatggtttgaaacctgggagcagatggcatatttatatagaccacacctcctggactctttccagagagaccttggtgtattgtttatcacgacctgcagattgtctaataggaacataaatgccttctctagtcctccttggcatggtgaccaccactagtagaatgaggatactattaggtactttggcaactgaggtaaaataaacatggactctgaaagcaaatatattagttcgatgaagagctcttattgctttcaaattattcattagcccattagaacttgaacattatgaattatgaaagagttctgtttctgttaaaaataagataaaacctgtccttgtttttttttattattgagttccattatttctaggatataaacagtataattatatattgagtacaagataatgaaactagaacaatttgctcagccttataaagccagcatggccttaattagaatagacaactgtctatagctctaaatcagagcaaatgtgatattagggtgctcttatcaagggattttaaggaatgttttcaagattgggtaaagacagagtgggaggggaaaaataaaagtaaaaaagcattgagagctatacaatcaaaacattagaaagccaataaaggtttggagatgaggaaggaaagtctgtgtgtttctgagcagggactagtggccgttagt

SEQ ID NO: 13167 - DNA, 1104 bp, Homo sapiens
tcggcctgcccgccacagaatgcctggccctccaccctctgtgggctcaaagctcgtgaatgcggctctgtagcccaccgtcggtgtcatacctctcatggagacggctccctctttgtcttgcaggggatgagctgaccaagatggaggacgaggatgagcagggctggtgcaagggacgcttggacaacgggcaagttggcctatacccggcaaattatgtggaggcgatccagtgatgagtcggggacaggccagcggggggacggaggcggcgggcccaggagcctcagccagccacgtgggcatccactccttttcctgcaagagatgatggttccattgctcttggcttcatggtgttcctggaaggcagatgagctggtcatttcgcctgggactcggcacctttccgagtgcagctggagggatctgagcgcaggaagacgcagaacaacagaaatagccgcccctccccgcccactgtgcctgttggcctatcatagatctctatgttcttgactttgtctctcctttccgagtcaatggtgggttacactgatcttgttccactgattactctctctgacgagtccatcacctgcaacttaaatgaacaagcttacatcccattttgagtgaagattttgaggtttttaatttaaaggctgtgtacagttatacttttttatacacctgttcatttctacttaaattatggcacagattgatgcgcaccagtcttgaggaaacgatctccctattcccttaccctgttactcagccacgccgtgtgtaggcttagcctcaggtggcagatgtttgaggaaaggaattatgccaggaaggtgggaccgggttatggtcgggtttctattgggaatgctctttgtgcttttgggcatctgaatggaagctttacatagaaccttaggtagaactcccccaaatcgccatatttaaaaattattttcactctattcttgcttaaaactgtactcttttgcaaattaacaattttatcactgattcagagttaaaaagaagactaacttttcaagcaaatgcatctgtaaagatgctttagattagactgtcatgtct

SEQ ID NO: 13168 - DNA, 1170 bp, Homo sapiens
gctgtggggccccacactgcacccacagggctctatgcgacaggggcccaggaacagcctgaggccaccacccagcaagcccgccttatcacccattccagctcacccagaaccttcaccagcaaacctcctgctgaggtcctggcaggaggccaccgtcttgttaccgtttccttttcgtttgctgagggtcacagaccccaacagggaaatcagtatctgtcttcccagtggttgccctgctcgccgggcactccacggggtcccgcccttgtgtgagatgggccaggatccttcggcaaggggcgcctggggctggggctgattgtgggcggtggagcgccagacagaaaaggattccaatgagaacttcaggttaaagtcagatgccacctaccagggtctacagtcaaaatgttggctttttcttattttttaatgtatgggagaaaaatgtaaaattccagttcttttctaattgtgtttctgaaattaggagtcagctgccagcgtttttgtgtggctgcagtgtgcctgggcccagctcacgggcagtgggtggacctaactgcccaggcaggcgagagctacttccagagccttccagtgcatgggagggcagggctaggtgtagcggtgtctcctctttgaaattaagaactatctttcttgtagcaaagctgcacctgatgatgctgcctctcctctctgtgttgtctgggcccttgtttacaagcacgcgttacccttcctgaggggagccatgctctagcccctggagggcctgttgcaggggcagggcgggcccgtcgcctttggcagctcctggagagctgtggacatgcagtccccctcagttcgtgctgcaataaaggccatcttctcttatttctgccctcctttctctttggaccctggagccacaggctcagcctggcctgtcgccccggctgtcactgaaaagccccggataccaagaagtcacccacaaaaagtgggagaagaaataagatggcctttatatcgcaggcctccaccccacagtctgatttccatgtgctggatctgtttccaagccggccgggagcctcggtcctcgagtggccccacagctctagtggccctggagatagcagcctccccacacttgcctccttgtcctggggtggg

SEQ ID NO: 13169 - DNA, 1163 bp, Homo sapiens
gaactagcacataataaacacccaaattatgccatttaattttaatgacaaatgtgaggtggacggtgtggtccagtcctgcggatggggaaccaggggtcacaagggtacaggttgcgcccctccctcagcagattggagggagcggggtctgaacccgggctgtccagcatcatgactcgaacccaggacttgcctctgcctcattagcttcaaaacagggaagggagtccctgagccagggctagtgctggagtcccgcttggacacttgggagccgggatcacccagctcgggctctccccacagggtctacacggacgtgcagcaggtggccagcagcctcacccacccgcgcttcaccctcacccagagtgaggcggacgccgacatcctcttcaacttctcacacttcaaggactacaggtgagggcacctctggccgcaggggccctcccagtcagggcttctaggcactgccggcctccccttgagctggcgcacctgcctccgccctgcaggaaactcagccaggagaggccaggcgtgctgctgaaccagttcccctgcgagaacctgctgactgtcaaggactgcctggcctccatcgcgcgccgggcaggtggccccgagggcccaccctggctgccccgaaccttcaacctgcgcactgagctgccccagtttgtcagctacttccagcagcgggaaaggtggtaagtcccagacacggcatcggtgtgctccatggcccttttccccggcccagcgtctgtgtccgcctgctcctccatgagcacccactgtggaaaccgtggtgcaggagccgagctgtgggccccgaacgtcacggccgtcttcacggaccgcaggacctctccaggtttttgctggggctgtcctctccaccgcagcgcagctgcctggcctctggcaaacccctccttgtttcccatgcccctgcctctgacagctctctggtgccccctcagctcccaaggagaagtgggctgccctcttctgcctctgggtcctggggtggcaccatctgggaacacaggccccaggcgccccccagacagcccttctgctccccaggggcgaggacaaccactggatctgcaagccctggaacctggcgcgcagcctggacacccacgtca

SEQ ID NO: 13170 - DNA, 1195 bp, Homo sapiens
tggggctgggctggaggaggcttctctgtgagttgactcagctgtcctagtgttgaggggttcttctggtgaggggggcattggggtgtgcccccagccaccaagatcctgactcttccattgacctccagtgtaattggagccaccctctctgcctttggggcctctctttctgtgtaatgtgagtggggtggactacagatacctccagcaagtcctcaaggtcccatctccatgcacagcatcctgtgggacgaggctctggatgacagctcaggtgacggtggggtacattaggtccctgttccgagcctgaaatctccaggagcttcagtctccccgcccgtaagactgtgtggttgcattaaacaggtcccacacctctgaaggagacaagtttgtccttgaggcctgggtgtggcacctcgggtggctttctggagtggtgaaggcattggggtggggtctcctgcccacacccctgctgacgggaactctggcccccaggttttcgacgctggggaagtgtttgggatcatgcaagtggaggaggtagaagaggaggaggacgaggcagcccgggaggtgcggaagcagcagcccaacccggggaacgagctgtgctacaaggtcatcgtgaccagggagagcgggctccaggcagcccaccccaacaggtaggagcctggccagagacaccaccacaaccttcacttggtgaaaggtgggagatgcagtaatgcagattctcctgggccctgcaccgccgctggacatcttccttaggacagctttgtggcaagcacgtgtggccagcggtgtgtccatcagggcttcagagtactgtccgtggcaacacagcgttcctggggtgaccggatggaccgcggcctgagagcctctcccagcggtctcattgtcacagtggtcctgctacaggggattagaagttccagttttgctcgaggtcaccctccaggttaagggtgcaggtcagccttactcctccccagtcacagcccctctctggtcctgctaaattggaatctggggtgggccctggaacacctgaggacctgagacccagagcaggcctggccttgccaaggaccacggtgtagttagggcagagctgagactgtaccccaggcttcctgcccccagggaccaagagtggctatccctaggtcaggcc

SEQ ID NO: 13171 - DNA, 1193 bp, Homo sapiens
aatgcagtcaggagcatttgcatgcagtgggtggagagtcggccaccaaaggaccgagttgcgctcggaatttgagctgaattccacagccttactttgtttcctgaagtgatagcctactaatgctggcaagcagatgcttaatagtaaatttctaaaatccccgggtctttatcattcagtttgttctgtgcacctgaggcgctcagccgtgggaggaccattttgcgagtgtagccctgtttcactcggatcaggttggcacggccgcctgcgtgtctgtccacctcatccctccgtgtatctgagggagtaaaggtgaggtctttattgcttcactgcctaattttctcacccacattcgctgaagcgatggagagtcgggggccagtagccagccaaccccgtggggaccggggttgtctgtcatttatgtggctggaaagcacccaaagtggtggtcaggagggtcgctgctgtggaaggggtctccgttcttggtgctgtatttgaaacgggtgtagagagaagcttgtgtttttgtttgtaatggggagaagcgtggccaggcaggtggcacgtggcatcgcatggtgggctcggcagcaccttgcctgtgtttctgtgagggaggctgctttctgtgaaatttcatttatatttttctatttttagtactgtatggatgttactgagcactacacatgatccttctgtgcttgcttgcatctttaataaagacatgttcccggcgttgcgtcgagcgtttctgcttgtgggggtagaggggtccctgcagcggtgctgtcggtgcttgggacaatatgactgtgggccccgttgacaccccattccctggggttgacagcagagggaaacaggcccgtgttgggctttgatgaagcagaattcagactttccaggggttcacttctccccattatttcactcaaattcagactttccagggggtcagttcccccactatttcctcattcacctctgatcacttctataaatggggtggaggagaaagggtaaaagcatgggagatgcgggtgcacctgtgggtccaggtgtcgggacctcccagtctctgcctgggagccctgtgttcagcgttgcgcactgtggtgcccgaggccggcccctccaactgtgcttccccactgggaattccaaagcctgtcttc

SEQ ID NO: 13172 - DNA, 1096 bp, Homo sapiens
caaattctcccgaagccaatgacgccttggtggcactgttgagctgtgagtggataatggcgtgggaagggccagggctgcctgtgatgcccagagcagtgcactcccgcggcagatcatactcgctcctgggatgtttattaaacacctgccacgtgccaggtgccgttctaggtgctggggacccagcactgaacaggagtagagtctccctggtgggccccagcggggggtgtggaatggcaccaggaggtggttgtggctcactgtgccacagcctcagagggaagctggttcaggtcatgttctgccgcatccagtagtttcacaaatgttaggggaccacctggtctgtagctcagacggcccttcctgcccccataggccaagttcaaagggatccaggaatagatctggaatgttccagatccatttccaaggcttcctttagttcagtagctggccggacagcaagtggccccagcagttctcttgtttgcgtttcaggaagagttgggctgtggaaggacatcttcaccgtctccatgaatgagaagtttgacttggtgtataaacagaagatgggaaagtgtgacctcacgtttgacttttatttataataacagaaacaacaacctgcatgctcacaatacccagacagtctactagccaaaagtcctgtatgcattcatttattccttgctggacaaactctggaagcagcgtgtgaaacagcgggggaagggaagagcggcgtgagcggagggagtgtgatgattcccaaccgaaagcagctgtctcgcctttagaacgtgcagcctctccatgtctgattacaaacagtctccacattgcagttccaatggcctggaccgtaaggataaagcctgtaatatatgcaactagaatgtctgccttttcaaccccgtattattgtattttatagagcttttcactggaaatctacataaatgtcagtaaaccaaataaaagttcatttccaaggggaatcaggagcgagccacacccgaatggtagaaagatctcagggttaactctttatttttgtagttttattatctaaggcacagccatt

SEQ ID NO: 13173 - DNA, 1263 bp, Homo sapiens
aacaacaggagagcaaattattttccttttttcccctgataaatgcctttgtggcattttatttttaaatgattttttaatttccatcgggcctcagatgtccagaattaggttggtcataatccttcatccatgacatgtcatcatggatttgtgcgtgacccttttggttaatttttttttttttttttttttttttttttttttagagatggggtcttgccgtgttgtgcaggctagtctcaagctgctagcctcaagtgatcctttctccttggcctcccagagtgctgggattacaggcatgagccaccacactccccctgcccttccctgttaattagtttttatattttatttagtgaccaccagtgagttaaccaccaagccaagaacttgctcattagcaatagctgacggcacctttttactccctggtccctattcctgcccctacctctacttgaagggaacaactactgaattttctgcagcaccatctaaagacaaaactcaaaggtaagtgtgtgtatatatgtgacaaagtcatttatctgtggtcgctccctccctttcagagtttggagcctcttccatcaagtggacctgattttggaggattaggagaagaagctgaatttgttgaagttgagcctgaagctaaacaggaaattcttgaaaacaaagatgtgagttttctgttgaaggtcttgatagaattgttagtggaaacattcacttccatacaccactagggagatgtaaaggaattaacctgtttccgtgcctttatcaaagaagagtttgtaaccacctacaactagaaaaactgatgactcttagaaaaacagtttctatttttaaagaagtcgctcttccttggtgatttttatgtgggaggtttagacaaacacacttttgtatttatgacaaaaaccaaaaatatatcaaggacaaactcaaactatacttaaatttatatttccattccctactcccagaaaaaagactgtgggtctcaaatgaaacttttcctaaatttattacctttgaaatttgaatatgcttttccagttcttgaagagtttactctctagcgagactgagaggtgagggccagtttgagtcagcatttattgtgccacctgaaatccctgcggggtctttagaggatgcatacagttttgttttgttttttttatttttaaaattttttttgagatgaagtctcactctgtcacccaggctggagtgcagcggcac

SEQ ID NO: 13174 - DNA, 1127 bp, Homo sapiens
tgagtaggattgggtgccttcctcagggagttcaggtccagaagagactcccagcagatgcctgggtgctaggggtgcctggaaagcttcctagaaggcatggaagtctccaagctgagactcagagtggggcttcccaggtggtcaggggatggggaaaagtcattctaagcagagggaacagaatatgccaggcccaaagaattgagaaggcgtggctcattctggatgtgagtaagtgtggctccaagtcctctcttgacctgggtcctaatctcacttcatgcatcctccctaatctctaggcctggctttaaaaacaactgcagggcccagccagggggagccagggcttgtctgggagagctgggagagcttggaaggacgggcacgcactgttgctcacaggtctttctcttttcaggggagggccccaaagctcatattcgtaagctggctgagtgcatccgctggtcgtacggggccgggattgtcctcaggcttggcaacatcgctcggttggaacttaattactgcgtccccatgggagtacagacaggcgacaggtacgtgttgggaattattttccacaatcacatcccactctccagtaattttattttgttttggacgtggttaatttcattagtggcttttaagcttgaagattttaagagaattaaatagttgcaaaataatgaaaacacatgtattttcctcctttgcgtttttctccatctagctgggaggagcaggtgtgaagcgttcccaccccctccctcaggtgctttgtgcttattgttcccagggtagtgggagcccctgccagggtctggctggaggaattgacaggtgatttggttcctgtgtgctgaaaacagaaggcagtgttttgagcagttgactttgcaggccagggtctctaggaaagttggggtgagtgaagctttgttcctgaccacagaggacacgatcttgagaacccctctctctacagcagaggaacccaccttcttggcttttcttcaccccttattttattgaggaaagattccctaaatgttacatgggtgaatatggtatagggctagttacacagttatataaacaaattctatttcttacat

SEQ ID NO: 13175 - DNA, 1295 bp, Homo sapiens
tctgtgccctgtgcctttccagggagccaggcgccatgggcttctggtccaagctgtgttgactgtcatccccaccccacccctacctcacgcctgccccaccccctgcctcttttggttgttgttcttaatctcctctccatgtagttcccagtgggcaagagcctttgaaaatgcaggattctaaacactcgtgcttgcgtttgaagcctcgcgtcactcagtcgcgtgggatgatgagtccgttgttgtctgccttggccgaaagatgaaaaaaagcctgaaccccaacccccagctggttgagagcaccctgcattctgcctcatggtgcagttagcgatcacaggccttcagaagtacaacatcagctcagcaggaacgccggctccccgaggacccaggcttgacgattcaccggggatctcctgggctgggctctccttggaagtgaggccttttattaaaaataaaagggttttgcagtttgaaaaactttaaagtcccagaagcttagatgtgacatgggtgtcctccacccacattcctatcacttcttggtcactcgttttaatgtaggttttgcacaaacatccaagactcaggatggcccagctcccacagtccttgaaaggagctgtctgctggggacgtttcttaatttcttgctgtggttgaggggctgggtctggagatggctctaattgtgctgcttgagacagcttgggtcacagctttccccttcagaggccctttttgggaatgaatgcatctttggaaactttaaaatgaggggggtgcattggttcactggcactgtgtagtaaagtgccacaggggagtggctcagacatcagagaattacatcctcaggcctttcgccttggcttgtagatgccggcttctccccgtgtcttcacatggtctcccctctgtgtgtctgtgtcctcaccgcctcttttattttattttttatttttgtttttattttttgagacagagtctcgctctgtcaccaggctggagtgcagtggtgtgatctcagctcactgcaacctctgcctcccaggttcaagcgattctcctgcctcagcctcccaagtagctggcattacaggcaggtgccaccacacctggctaatttttgtatttttagtagagacggggtttcaccatgttggccaggatggtcttgatctcctgacctcatgatctgcctgcctcagcctcccaaagtgttgggattacaggcgtgagccactgtgcccagcctatttttttttttttttttgaga

SEQ ID NO: 13176 - DNA, 1354 bp, Homo sapiens
agaagggctgcggtcctattggattagggcccacttatatgacctcatttaatcttgattacctccataaagaccctgtctccaaataccatcacatcagaggtgctggggttaggacttcagcatgtggatttgtggggggcataatttgccttgtaccgggaggatatgaagtgttcatgttactctccctgtagccctgagagcatctcccttagagtatcctataaaaggagtcgctgctcactcagttatgggttgttcaccccctcgctcaccccagctctgcagagaactggggatcccatcggccatgctttctgggctggcctctggtcgcagtcagtccctcgctgtggcgcccccccctcccccagctccttcccagggtgatgacccgctgaccccctggggtgcacctgctgcaaagcagcccccttccttggcatctctcagcattctccgtagtgagcctggcctttctgatcttgttagctttttgtcttcctgccgcagatcagagctttggagtaagttttgatatgaaatcgaatgccaacaccgaagttttagaaaacagtttaatattccctctcagttccggctgttgctaggctggggatgggttcagaatagccattttgatggaggtgatttcccagcaggggaaagaaataattaaaacagcattacggtgtctcttgcgggatgcagtgacattcaaaagccacactgacaaaaagcctggggctggaacgttctgtgctgcctgcatggcatgtacaggaccgcggccccctggagctggtggagtggcccagccttgccctgctcacaggtggacctggagagggcactgtgccttcccagggattgggatttgaaaagaacagagcttggccaggtgcggtggctcacgcctgtaatcccagcactttgggaggctgaggcaggtggatcacttggggtcagaagttcgagaccagcctggccaacatggtgaaaccccatgtctactaaaaatacaaaaattagccatgcatggtatgtatgcctgtaatcccagctattcgggaggctgaggcaggagaattgcatgaacccaggaggtggaagttgcagtgagctgagatcatgccactgcactccagcctgagcaacagagtgagactctgtctcaaaaaaaaaaaagaaagaaaaaagaaaaagaaaagaacagagctgtgattttcagccaaaatgagcagccctggcccattctgtgtcatcagaggggagaggacggttactgtgggagggggcttcagcttctcagggaggtcctggcggcccccatctagtaaaccagtaaacc

SEQ ID NO: 13177 - DNA, 1212 bp, Homo sapiens
aatacaggctttaggttcccctggactccagccaaggctgttcaggtgggaccatggtgctctttaagcgtgatcggagggaagacacacagcagggccaccattccatgaatgggaggtgtacagatcactttctctttgtgctcagttctgttctgtctccagcagctatattggtaagactagtacctgccagggagaggtgcccccaagtgaaggggtacagtggcacctgggaaaaggcacctggaaggtttccatgtggcccagcccagcatggaagcagggtgggaactctgctgtgtcgccagcgctcactctactcgagtggctttttgaaagccctaccatgtctgtgtcaggcctgtgctgcttcacatcctacagctgcctaggaaaggccggccacgctccctgtccacacactccctgtccacacactccctgtccacacactccctgtccacaactgcagccgggccctctgcctatgggcacccaatccaagcagctgctccacctttgtttggcatggtgatttgtgttttttctcttggtgcttatgtgtgtgggcttgggacgagtgctggtatgcacttaggaccttcttgatagctccctgcactttggaacacggagcagatgagagagggtcggggcttgccctccaccttggacttggaagaagcccacattggagaggtgaggaccccatggtggctctagtggaagatacgttagtctccagctaaggaggatgaggcgcagccccagagggagacctcagtgataggggatcaggctaagaaagtgggggaagggagatgctttgtacatattttggggttataatttctctaaattttaggagaacgggtattgattgataaaagggacaggcagtagtgttcaacagtgcatgtgaaggaaagttctgttttccatggttttgacattctttggactgtattgtgactgctgtctggtccacatggtacccctttggtaagtaggcttcagtgcataccagggtatcactggagatgggagttagtgaaggggtgactccctggcctagtatagtgtgaccctgggactaacttaatgtcctaaagcattttggtgacttctagggaatagcaaagacctatttcattgtccccaggtaagtatgtgatgagcaatgaggaggagtggaaaacaaaacccaga

SEQ ID NO: 13178 - DNA, 1110 bp, Homo sapiens
gaaggacaagtctgactgttcataggctgattttctttaagaggattattctgttttacaatttcaattctagatcacattttatatatgctgcatgccaaaaaaaaaaaaaagagaaaactgccttttctggtgtggaggggaagaaaaactaatattctaccttactagtagagttcaaaacaagttttcactgagagccttttcagtaaaagttaaacaagtttgttttttgagcatttgtcagttattctatttcagaagagtcaaaattcaagcacgatacattttgaaggctttgcaaactcctaaacccctgatgagtcctctcattctggaagtgggaatttgagtagatactgatttgtcccgtagtatggcagatgacagggaggtcttttccaagcaggcactcagaacacaggtcaccgtatgttctcagccagtaacaatcatactgaggacgaaggactctccgtttgatgcagacacaattgtaatggagatgtaaaacttcttagcaatcagatggataaattgtttgctttttactttaaataggaaattgttttctaaaactaaaatacttgaattgtcagacaatataatctcagcttgtattagtttttgaatgctcccatcgaggaagtgtaacaatccatgaaatgtgaataaatgaaaagtaaacaaaatcccaatgtgtgagtcttatgttcctctgtgatgcacttggcattaatacaagtcagacagacctgaggaagaagaatcaacgcagaagctgcaaccggaaacttccttgaacaacaggaaggtcagcttggaggtgagtgagagaccagtttattatcagactccttgttgggggccgagactacttttaaaccattcagaccaagggtttctgttggattaaaatcttaacagattggaatgggaacaattgatccttaatgggctagtgtgcaaagcattggctaggtgctttatatgtattaccttggttagtcctcaaagcaaacctttgagacttattttttaacctttcctatgttactcagcatttatttggtttataaggggtattttctggtttaaaaaaataatatt

SEQ ID NO: 13179 - DNA, 1918 bp, Homo sapiens
catagcactcaccgctgttgagggttactgtttcacctgcttccctcctgccggccctagacatcctggaagttcggcagaagcccatcctgatgacctagccgcgtgcggagcctgcgcagagccccggccgggcccagccctcggagtgctgccaagtgcctacctgtccaccgccaccggggtctgcgatggcacgccagtgctggagccgcagccaggcgaggccactcgactcccggggccggggccgactccacgaacaccagcccaaactgaagtgcctcttccctcccctgctggcgctgctccgccctgtgccccccgcccatcgccccccacccatctctggagagccctctgcacccaaagaggactagagatgccgagcggccatgagagagagcggaaggagcagctgatgcccagagcggggccagagcggcgggtctatgttcacgtccccccagcagcaggcggaaccacccagccagggcactcagtgcattggactgtccacatgttcttgaggaaagccggtggaagattctggaatgccgtgcggatgaacttcagcacccgagtcagtcccagctcatcctccccagtttaccactttgttctaataggagatgggaacacgagaagtttgatggctttgccctgggctgggaatacctcacccacgcccagttccagaaaggcctccagctgagcagacggccccgatcccgccagaacggccttttgcttccagccaaagaacaccgccaacacgcacacctccaacctgggacatcccacgctgggcctcgcacggaggaacctgcagaatttggattctgagggtagtcgggaggcctcggtagccaggcagaacaggatatctgccaaagggtgtctgatgtggggtggggctggcatcctcccaggaaggttctaggtgggaccccgtcttctgggggcgggggtgtcttttcatcttccctggtttcctagaactcacttcctttgacggcgtgtgttggtcccatctctcagaccagctcactgaggcagaggagttgctcagaggctcacatgggcacccccattggttcgtgtgagcagctgcccagccccaggcctgccctcggcctggtccagcatgaaggcgtttccatctgcaaggatgcacggtaccctccccgagagcaggcctgtcccctacccaactgggaataaactggaagctgggtctctttgttgctatgtttttttgtttgaagttcccaggaatatttgaggggttccggtgatgtgtttagggatcttctctgtgggggaaaaggaagaggagggtcttgttctcccatctgtttattctttgggctctgggaacaggggactactttggggctttctccagacttttgtatgttgttattaaaagcgagctattgcatttcattctgcctcagtttgcccacctgtgaaatggggctgataccacctacctcactgaagtcccagggttcaagtgtgtggctgggtcagggcgtggtcacccgtcattctgcataggtcgggttggatgttagactcctgggatgccctcctccccctcgccctttgtaataacctaatctgagaccgtgcttggtggggggatgtgaactttctctctcccccagcagtgtctgctcaggcctgacagctcagctctgcacgatttcatgttcctaaacccatgtcttagggcagcacagagccaggtcatgtcatgccccaaagtgtggggacagagcctcagggagccccgagcatggtccagccccatttgagtgctctccggggatgccaaatgctgcttccaagtttgagtccatgtggctaaaatacacccatttcttcaggaactcttcccctggttgttctg

SEQ ID NO: 13180 - DNA, 1218 bp, Homo sapiens
atatgagctctttaaatcattatgacaactttgaggggaagatgcccttagtccattgtacagatgaagaaactgaggcttagtgaggagaatggatggcccctgggtcccatctcccgtcgctagagaactggggagcaagaattggagttctggccgggcatggtggctcacacctgtaatcccagtactttgggaggtcgaggcaggaggatcacctgagcccaggagttcaagaccagcctggacaacatggcgaaacgccacatctacaaaaagttttaaaaattagccgggtgtggtagcacgtgcctgtggtccctgttgcttgggaggctgaagtgagaggatcatttgagcccaggaggttgaggctacagtgagctgtcattgcaccactgctctctagcctgggcagcggtgtgagaccctgtctcaaaaaatagtaagaaaaaagaattggagtccttgtccatcgtaatgcctgcatagtagtcagggaagaagaagagcaccacagtgggccctgggcactcacttctgctctgggcctcgcaggcagctgagcctgaggtggaggtggaggtgtaccggcgggactccaagaagctgccaggcctgggagaccctgacatcgactgggaggagagcgtctgcctgaatctcatcctgcagaaggtatggggtgggatgggtggggctgcggattggccctgtgggatggctgacccctccctgcacgctgacccgtgctctcttccagctggactacatggtgacctgtgcggtgtgcacacgtgctgacggcggggacattcacatccataagaagaaatctcaggtgagccctggcacgagagcccccagcctcctaactgccagttcaggctgggcgtggcagagagagacaagtcctcctgcttgcttctctgccctggaggtgaggggtctgactccagaaatctgctcagctcctgggatcccgtatcccattcgaggagcacagaaccagcttatcccccacatctcctggtaggtctctggctttggactggctctgggccgggtggcctccctatactggcttggactggctctgggcctgtgtgccgggtggggcctcacttgtcctccaaatctgctttcttccagcaagtgttcgcgtcccccagtaaacaccccatggacagcaagggggaggagtccaagatcagctac

SEQ ID NO: 13181 - DNA, 1152 bp, Homo sapiens
ttgtttttgagacggagtctcactctgttgcctaggctggagtgcagtagcgcgatctcagctcactacaactactgtctcccaagttcaagcgagtctcctgcctcagcctcctgagtagctgggattacaggcatgtgccaccatgcctggctaatttttctgtatttttagtagaggcagggtttcaccatgttggccaggctggtctcgaactcctgacctcaagtgatctgcccacctcagcctcccaaaattctgggattacaggcgtgagcatcacgcctggctgggtacatactgttgatcttttgctgccatgcgtatatatgttttgtgagaaagaatataatgaacatttggtttttatttcagtgtatgtaacatgttaaatattttaaaaccctttagatcaagccaatcaatgaaagactaagggagcttaaaggctgtaaaatggtgattgatgtcataaagactcagtttcctcagctgaagaaagtgattcagtttgtgtgtggaaatggtcttgtttgtgagactatggaagaagcaaggcatattgcactcagtggacctgaaagacagaaagtaagaaaagaggcttggatcacacctttggataagttgaagtagtatttataagactagcatacacaaacacacacaaatatttacatatgcgttttatgtgttcttttttctaaagagaaccaacatagaacctaaggtggttatggcttcagtggtttttataatgttctgttgaatttagaaaaaaaactcttatagcatttctcaacatcataaattataattttggaaattagatttcttttaataatatcttaaagcagttagttgttgttgttgttgttgttgttttaaaccttatatggaccctggatatggtacctgtggttttgaataccaggaaagattttgggtatttattttacaatgtgggctaattcttccatactttagtggagatactaactgtccttttgcatattcaaggtttaacatatttgaatttctagaaaacacaattgaaatgagattactaaatacaagtatcttgagggaataattttggtcttaaaaataagtactattttactctcagtggaatagagagtatttagttat

SEQ ID NO: 13182 - DNA, 1164 bp, Homo sapiens
ccccattcaggggtggagagcagcccaggacgcgctttctcgtgttcgctggagtttgcagcgcagaggcccctgccgagacttccctccaagacaatataagcactggggttgggaaagaggatggagttggggtctaaccaggttccggatccaggatctgctgagtggccttgggcacatccttcagcctctcctggcccccgcgtctgtgagatgggggagatggagaagatgctgcccctccgtggggttcttgaggaccacataactacagtctcagaaaaagcagtagatatgaacgttagcaggggagagaaatcactgctttcgactccgtgcagtccacagcccggatgtgcacatggtggacctgagctcagtttgcgagggtgcagggaagcacttccaccgtggctttggcacattcctttctaggatgtattaggatgggtcgttcttgctggtcacccccgcactgcctcggtctctcctagatgtcaatgaatgcatcacgggcagccacagctgccggcttggagaatcctgcatcaacacagtgggctctttccgctgccagcgggacagcagctgcgggactggctatgagctcacagaggacaatagctgcaaaggtacagcatgcgctccgagtctgcaaacctggtcttccaggcgtagatacggcgcggtgggaagggcagctctggggtctgggctcccgcagtcctgcgccctctgtggctgcctgggcgactgcctgctcatctgcaggagggaggtggttatacccaccagggtgtctggacaggtgggatggaaggtgaaagtgcttgccaataatgttcagaacattgaaaaagttgacagtagtgcaccggtgccagctagttcagctgttaggaaagatttacgttcttatggtgcagagtaaacgatggcagatttgggtttctaaaaaggctcagtgcatgactatttaaaatcaagaccagggatgaatttcaggttctcacatgtactttctacaaaaaaaaaaaaaaaaaaaaaaaaaaaagcaaaaacaaaaatcccacaactgtttttgcacaacagctgccttccatccaaatccaggcttccttgaagttcaaagcatatccccttccactgcataaacacatg

SEQ ID NO: 13183 - DNA, 1124 bp, Homo sapiens
agggaagcatcagtactcaaaattggggaattataaattagcagtaaagtccgtgtttcacagtgtcacttggaagggcagctattttgaggtctctgtgtggtatagtaattgagaaagaaagttgagaatgtactgtgttttataattggtgatcctgatggggcgggcagtgtggcgctccagagctgctgtgctgtggtgggcggaaggaggtttctcttttaatgatatatgctaaataaagaagcaaaggggaagtgctgtacaaatgctgtgattaaataactattagaatggagccagcccctccaccatgtgctggatttcatcgccacttgcccacgcagaagcttttctcctgaaattatccccttgctctcaggcagcctctgtttttttcctctttactccatcattttcatcagcaagtaatatgccctcccatttttcatttaaaaatatcttcttttgactccatgtccccgtcagtccagtatctcgtttttctgctctatcccaaatgtgctacaaaagatgtatttagtttttacaatatatggtaaaagattatttcatccttcacaggattactttccactgaagcaggtagatgacctaagaaaaaatttaacggagcagatatctgaaactacttttatgaaccagtttgtcattgaggagtaaattggttatttggttgttagcttggctattcactcatattcactaggcagagagggcagattcttacagacctgttacatgttagctgtattaaatgttgttcttaatttaggtagttgcatttgtatgagtttaattgttttttattgatgtgagattcacatattgttaactattttaaagtgaacaatcgagtggcatttagtacatccacagtattatgcaactaccatctctacctaattaaaaaaaaaatttttttttttgagacggagtttgctctcgttgcccaggctggagtgcagtggcacaatctcggctcactacagtctccgcctcccaggttcaagcaattctcctgcctcagcctcttgagtagttgggattacaggcacccaccaccacgcctggctaatttttgtatttttagtagagat

SEQ ID NO: 13184 - DNA, 1181 bp, Homo sapiens
ctaccaagatattgcatagaagttcatatttacccagaaattatgcaagttcttaaagccagagttttttcaaccacagcattttacaggatttctgtggacaagaaattaatgtattttatgggatatttgtatctttaaagtggaatttgcatgctgggaatgctttaaaaagaaagtatttgcataaatgtcatgtacatagctagtaattttgaacatttattccactgttggaatgtctttttgcttgaataagaacttttctgactctttgctccaagaagacacataatgacacataatcttgcattcttgatggcagatgtctgctgttagtgaaaatgatgagtcgtgtacatatttcatacttctgttttgttcttcatagttttgtttttctctttgacttattacaagcacagactctttaaatttattgaaatattttattctcttacagttatttataacagttaaataatttctcttaaaatatgctaaaaagttatgttttcttttctttctaggaggcactggctacaattaggcttctcgacgtcctgtgcgaaatgactgtgaatactgagctgctcggctatctgcaggttttccctggcttgctggaaagagtgattggtgagtgaaatatcacacattgtatttttagctaagaaatctttggcttgtcatactgtaatataaatccaaatacaaatccttaattttcagtgtactttgggaattttgtgaatatatttttttgagaggaatcacagtgttgtaacagttcaggcaggccagataaacctgagcccatgtgtttgttcagccacttcccttctgttaactgaagattccttctcagtaatgtgaggataacaatgcctgttatgcatatagtagatgtttcatcaatataggatgtgatgaagaaggtggggcaggcaggtttgcgatgatgattgtggttttatattactatagctttgtaaaatgtggcagtaaatttttcccatttacatttagtgaacacatagaatggtgttttatacatattatatatacaaatcttatgagaaaaaggttttaaacaagaaaccattgttaaaagtattaccaaccttgctaaaaagctgtttgcaaaataattcaagtagaacctgttccttgtggctagc

SEQ ID NO: 13185 - DNA, 1175 bp, Homo sapiens
gctggagtgaagtatagagaacatatgctggcttctgatgatttggccagttggatgagggaaaaataagcactcttcttggtttctgtcatatgcatcattatggatagatattgtgttttagacttcattgactgaagttattagaaaagttctttcataaagaagttgagattggaaacctttttgtaagaaggatgctagcaaacttttagctaactttttttgtagataaatagaaactctgagttggggtagtcattatggcttatctccccaaaactagagtcaaaaaatttaaagcaaaggcagaagagccttctaatcattttttgaagcaaaggcagaagagccttgtaatcattatttaaataaagctttctgtgctctacctttagcctattacaataaattagatttgtctatggaaaactattagtacaacatactaaaagttacttttctgtggaaaatgaagtttactcttttggttatagatcttttgcgggtgattcatgtagctggaaaagaaaccacaaacatcttcagtaattgtggttgcgtgagagcagaaggtgacatctccaatgtggccaatgggtttaagtctcatctcattcgtctgattggaaatctgtgttacaagaataaagataaccaagacaaggtaagaggatttcttagtatgtattatacatgtatggcttcatttagaatatagtccttggaagacattcactcttttggagtgaaagcttgaggtgcttagaaagtagcttggatagagagatatatattttatatgaatacacacacacacacacacacacacacacacacacacacacatatatatacacacacacacgtgtgtgtgtgtgtgtatatatatatatgtatatgttaatatataggctctttggagcctagacaaatttctaacacacagtagatatttaataaacactagttattattgcctattatcttaaaaaacaaagcttagatctatatcctatgtttatggacgatagcatcataagccttttcttctagatgttttaaaatggatataaaaggaatataatatttaagtatgaagtctttgaggacctagtaggctgcttttagaaacctcttatgtgcagaagagcttaaaggtagttatattgaga

SEQ ID NO: 13186 - DNA, 1309 bp, Homo sapiens
ccattgcttcaagcacgaggctctttgtaagaatatggatgggagaattgtgccctctatagtggtttaccgaggaaagccctaaagatagctgcaaacggtttttttgttccggctttatgctgccattttcttaaaagagggacaatttcaaactcattctgggtgagaaatacaaaaggcatatcaaaagttatacatggtctaaaagtaagttactcataggaattagattttctttaaaagatagttaatgttcactatagtttaaaaaacagaactccttgaataatattgcatgaattgttttaggtttctctaagttatttgtcaccactgaccaaagttctgggttttttccccttttgtctgatgaatcttgtgaacagatttgctacatctgcaattttgtttctttcttcttctttagtgaatgaactacatccaaatacctgaatttttggaatctgtttcatggatttttcatcttctaccgtatgtgaaattgcaagtgtttgaagatttataagtacaaatttgggaacatacaaatcttttaggtagtagagtttaacgtgtataagctaaaagtgaaagtaactgagtgttctcttgtttctttgcattaatgtaactgtgtggtttgcctttgtccccctggatagaacgtgcatttaaagaatatattgtacttactgtgacagcagataataaaccagtctcttggagggcacaacccttatttgacaaaacttggatgttggcttgactgtgtttgtcccttcagatggcaagtcagcatcattctttatattcctcttctcattgggttttctgaactctggcaggcggttgaagtagtttctcactgtgattaattctagcaatctcttttcacccctctgcctttccaaaacattgacaagactcatttccagttaattaattcgagaaccctccctcttcattttgggtactgggctgtcttgtcactgagccctatccctttggaatgtggcagggagtgaggttggtgagagaacatgtgggcacttaactcttcatgttccagttcatcccagaagtagacatcccaggacccattctgtgtcaaggtgaatgcctgtgtcctccccagcttcatgcctctgtcatgggggaaggaatagcttatgttctgctctggtgcagtgccgtagattaaaggtacatttctatcttctttgatttaaaaagcaccagtctcataaaggtgccactcagttttagccatgtcttcactgaaattgcaaaagtacttttagggagc

SEQ ID NO: 13187 - DNA, 1165 bp, Homo sapiens
cctaaacccagggcacacgggggcagaggctcaggacactcaatgcatctgtgcacacacacctgtcctcacagactgcccacgctcccgcaggcacacacaggcacatgtaggcacatgcatgcacacacgcgcatacgttgccgagcacagccccccaagaggagcacaagcctccgcgcagttcccccggggagccgcccccacgtgcaccttctggagccaggccagagctgtgtggctccctaaaggtgggggtacgggtgtcccagccaaggcaacttgggcaagccctggaggcggctcccaccgcacgctccggtcagcctcccctttaaaaaaacccgccgggggaggaggcggatgtaggggcggcccgtccaatggcagctgcgcgcctcgggagacttggagaagtgagccagagcgagcgacagagccggttcgcaccgacagacggacggaggtccagaccgcagccaaggcgcgcccgctgcccccggccgggtccccgccccgcactccagccccagctcccgccgctgccccagacccagcgccatgcgcggccctagcggcggggcacgggcgacaactgcgcccgggcccacgagacccggcccctagcgcccagcgccgccgccctgcatcggggagctccgcggggaccccggcctcagctggcccaggcgcccggcccgcggagcctgttcagccccgccaggcacgccggcccaccatgcttctactgtcgccgcgcagcgcgctcgtctccgtctattgcccgcagatctttctcctcctgtccagcggcagctacttgtgagtgccgcgggcggcgtgcggggtgggcgggtgggctccccccgggcctccagcgctggaaccgggcgggcagggaacgcggcagcgaggcccctgggcggggcaccgggtgaccgtcgcgcgcgggagccgggggactttaggtcgcctcgccagcctaagctgccgaggtggagcacttggcgggcagctacggcagtgagaagtcctggctctggggtcaaagaaaggatggcctgagagcggctcgactgcgggagtagagcaggctgtgcacgcccagcgcgagggcccgcgggcacgcgagcggcgccgagattccctgcgcgtcccagcagag

SEQ ID NO: 13188 - DNA, 1140 bp, Homo sapiens
ctgcaagctctgcctcctgggttcacgccattctcctgcctcagcctcccgagtagctgggactacaggcgcccgccaccacacccagctaatttttttgtatttttagtagagacggggtttcaccatgctggccaggctggtctcgaactcttgacctcaggtaaaccacccacctcagcctcccaaagttctgggattacaggcgtgagccaccatgcccagcccagtacttcagtttcttagcgatgaaatccacccaatgtcaggcgatgactattattattttactgatttatactgtttgttctctattaatgtcttattttccccaaccgattttgaagttgagtaaggactatgttccgcgggtatcttgagtcctctgaggcactgagcttggtgatttggacgcaggagctgctcattagtgagctgatagctgggagcatagcgcatcccacatcacctgacttaccttggtgtcctcctttgtagccttttgtcatacatgatatggagacactgtgtatggctgagaagacgctggtggccaagctggtggccaatggcatccagaacaaggaggcggaggtccgcatctttcactgctgccagtgcacgtcagtggagaccgtcacggagctcacggaattcgccaaggccatcccaggcttcgcaaacttggacctgaacgatcaagtgacattgctaaaatacggagtttatgaggccatattcgccatgctgtcttctgtgatgaacaaagacgggatgctggtagcgtatggaaatgggtttataactcgtgaattcctaaaaagcctaaggaaaccgttctgtgatatcatggaacccaagtttgattttgccatgaagttcaatgcactggaactggatgacagtgatatctccctttttgtggctgctatcatttgctgtggaggtgagtggttgatttaatctgctggtatcatgtcactgacaggctcctgtcttgaaaaatttgacaatgggaaatccagtaccagcctgagctgttccagtggaggggacactcacatggtgggaagacgtctgacccccagtcactgctgagaattcagtgggaattataacaatattgtataatattatagt

SEQ ID NO: 13189 - DNA, 1166 bp, Homo sapiens
cgggcgcagtggctcacgtctgtaatcccagcactttgggaggctgaggcaggtagatcacgaggtcaggagatcaagaccatcctggctaacacggtgaaaccccatctctattaaaaatacaaaaaattagccgggcatggtggtgggcgcctgtagtcccagctactcgggaggctgaggcaggagaatggcgtgaacccgggaggcagagcttgcagtgagcggagatcgcgccactgcactccagcctgggcgacaaagcaagactccgtctcaaaaaaaaaaaaaaagaaagaaagaaaaggggtaattatagtagtatttccagagaggcgccttctctacccaagaactagggacacatcctaaggggagcctccttcccctctcctggttccaagcaagaagacatgacttggctgtgcaattgggaaccctggtccctcctccaggaagccttctacccgccaacccccactgcaggctggtgagggtgctgcctctgtgcccctcagcccttggcacttgcccttgctcttgcacccctgccatgacctctccaggtcagggacagcatctgtccccagcatcacctggcacatggcctgcactgagtagctgtcagtgaaagttggtgaatgaaggcataaataaatgaagtcaaactctgtattaggccttcttgcattgctatgaagaaatacctgacgctaggtaatttataaagaggtttaattggctcacagttctgcaggcttttcaggaagtatggtgctggcatctgcttctggtgcaacctcaggaagcttaagatcatgacataaggtgatggggagccagtatatcacatagtgagagcaggagtaagagagaaggggaggtcttagactcttaaataaccagatcttgtgtgaactaagcaagaactcatcaccaaggggatggtgctgaaccattcataagggatctgccctcacgacccaattacttcccaccaggccccacttccaacattgggatcacatttcaacatgagattttgaggggacacacatccaaactacagcaaatcctattgggggcagaaatgaatctgccatacataggccacacctactatgtgctgacatgatacagggagaggagtatcaggaatgactgtt

SEQ ID NO: 13190 - DNA, 1206 bp, Homo sapiens
gaggcagtgagtggcctggaaggccggatatgggggtgcacggggggtctggggccttgtcagttcctcgtcttcagtgccatccacgacctgtggaccttgcgggctctgtcacccggattcactccatcccctctgaaccctgggaggggatgcgcctttgtcttccccttgtacacatggggagactgaggcagagctcaggaagctgattgcagggtcacagctcaagggcaggtcctgggctcttcctcttgcctctccacagggtatctcacgggagctagtgcagccatgggcatggctcaggccccttggcctggtgtagtcctcacagctcctgttttctcatttgcttcctaatgtattccaccaccacccccactaacacgagctctgtctggttcccggatgagtccgtacctggctacgaggggaggaagggagcaaggtggatgatggctgggtggacaggtggacggacagatagatgggcggacgggcaggcaggtggacaggtggacgtgcagagagggagggaggaagggagcaggtggtggcgatgggcacaggcctgatcctgccctcccgcagctccctgctgaggaccgcattcctcctgctgctgctcatcagcgccacctggctgctggggctgctggctgtgaaccgcgatgcactgagctttcactacctcttcgccatcttcagcggcttacaggtaggtgacggccgagttgcccgcgggacccctgcctggccgccgtgacaccatcgctgtgatgcgaagcagtggaggcctctgcggtcccaaaccagccctgcctgggtcccgcgtgggggcctcctgtggctgtgaggactcagtcccttgtgcagccggcacgggggctggtgcctcctccccactgtgtctggggacgatgaccctagtgccaggccagcacaagtccacttgtgtctccagggaacagaagtggccatttctagtcataccaagggccacacagcaagtggacttacgacacagtggggaccccagaggggccccaaggactgtggaaggagtgcccagaagactggcctgagccggggccctcactgcctccagcacaccgggggtctggcccaggcatctcagtttctgagctcccccacctggcctccagatagcagcagtccctgaggaggggaggcctggccgtg

SEQ ID NO: 13191 - DNA, 1201 bp, Homo sapiens
caccaccaaagccatagctgaagagtgcggggcccttcctcctggggacagaaagatgtcgtcaaggagggacatgggggcctttcaccaaccaccgagaaacgggcctggcggccctccttcctcttacatgagaccctcctgtggcatttgcccttggtgccgggctggggccgggcgcagtgaccctgcctgcgctccacactcgctccacgggaacagagagggtgagaagggcccacccctcgcctgccctcagtgtctttggtggcaccttccttgctggcctccagggcgctcagcaccgcgtctgtaagggcctgcctgctgctctcggcctgacacgccggccaggaggtctgtagctggggaccagtaagggcacaggatggtgcaggtaaaagcacatctttctcacactttgctctttggaaggcccaggagaacatccgcgaaggctgttggaggtgctccgagcactgtggcatgtctggcacatggcccccaggctgcggttgcctgggttggttgggggaggaagtggggaggagtgttccgggaccatggtggcccaggctgcagccgcctttgggccatccgagaggctctggcagcccctgtgctttagggagcaaccgtgagccgagcccagaggcctgggcctgcactgcctgcagccgacatgcgacagcgttccctcccccgcgtgcctagccggtgccggtccgggcacagacccccccagcccccgccctgccccagggaagcctgggcttcccgggaacaaggtggcatttgtggagggagcgcccgcaggcctggtctgctggggccgcctgcgctgggctgaagggagggaaaggcggcttgggcctcctggaaggaggtggccaccccgcgggcctgcgtgtctgctggggcggatcccgcagctccctcagcttgtcctgagtcccttgggtgtcgttgagattgttgttttttgaagaaacagaagattctattttttacagcgagcaagctggttttcttatttttgtatcctttttcagatgtaatttttatctttgctccgatcctcatttgctggtgtgggtgagggatccggcggcatgggctggtttcacccccttcacgaggggccgcagagtcacacgctggtgccgggggtgctttggggggagctgcgccgatcaccaga

SEQ ID NO: 13192 - DNA, 1131 bp, Homo sapiens
cccgaatggggacagaacccgctctgagccgtgggtctggctcctgtaggggactggctctcttggtgcaccaggggagggggacatatcccagtgaaccccaccttggcgcctgaggcaacacagggtgggcactgacccacccccaggggcggctgcagaggcagtgcccgcagacaatggccacacctctctccccagggcccggcagtgcccaaggatgggtccggggcctcggggccaatgagcgcctcttcctaggtgctgggattcagtccccaaacacagcgggaggggtccctggggcagatggggctttaccagcgtcgggtggtttagttcgagtcccttttgtggagaaagggagatgaaaactgaccacgtgccaggtgtggccgaagcccccagggagggccacattcggggagcggggggtcgggggagggccaccgactggctctgctgccagcacaggcccctccctggaagtcctcgggagcggagcgcggatcggcacgggctctgggctccccgtggagagaagctgtagtttttaccaaattgtgtacatctgggcagatgtttaatttctgtgactaatcactgaactagacgaatgttaaattttttatgtctgaagcctgagtctattttggatctgtaaataatcattgccagtgtgacttttgttcaacaaaaggattgtactgtattaagaaccgatgaaaaaaattctcctgtaacatttttttaagaaaactttgtttgtttaaagaaaaagtattgtataaattataatttttatttaaataaacctaaaatgctttgtgctaaggctcagggctgtctgcctccttggcagggccacacgcattgtaggcggcctgagccagctgggccaccaaccccaggccctcagtgccgctgccagcccgccactccctggggccccacggctgccggcggcggggcgtttgggtactgatgcggcctgagtgacggctgtggggtgaggtggggctgagaagcagagtcctgttggacgtgggcattggaggctgggagcagggggcagggcctgagttccagaagacaggaggccaggtggcgagggacgcggcctgcagggag

SEQ ID NO: 13193 - DNA, 1152 bp, Homo sapiens
agcagccgtgtcctctcccaggccctaggacactgccagagactgtgggacatacaggcataagtgatgtgtgtgtttctgcttctgttttaaaaatccagggtcattacacacagcatggaaattagcacaaaatgctgtgcaaacgtcagatgctcccaaaccagcaaagggatgggcttgcttcacatcagatgcgggcacgccttacccctgccttccgtgtccccaccccagggtcaagggttcctcagaccagccatgcctcctcctcctgccgcctccttttctagatggggaggggattccgtcacaagaagagccgcccctcggccgtgtgcaggaagccccatgtcgctttgccgagatcagccctgggaggatccccttctccagctcagatcatgccgtgtggccagaaggctgcggacacaactgacctgcttctcgaggtggttgatgttttaaacaggaagctccacggagttcagccctgtgtgcatttcctcatgtatgtaaacgccaagactgaatgtgagaggtgttggccgcgggccttaagtctgagcagatccatctggaatgttcggggtgtgctgtctggatgtggtgcgctaaaaacacggaataaagatcagtgacaaagccgcggccttggcctgtgattcgaggacttgcccatcgaggacaggggcaccctggcccagccctgccgagggtctgagctcagggccattgcggcgcaccagcgtgggcccggcagcacccgtgatctcgctgccccccgcgggacctctcagggagatggggctgcagctgctcaggtggtgcagggatgccacttgcccgggcggggcaagactcagaaaccagtctgacccccgaagcccggctctgcactagctggaacacgggagtgtggggtccaggctggcccctgtcaggctcctgaacaagggacctccccttgggccacatctgtcaagcacctgctttgaaaagggctgttccggggtaggcaccagggtctggggtcccccccgcctctcctgggatacacttgcctcaccctcacccacacactgaaacaccctccttgccctgtgttactgaagcaaggcccttcaaagggcctcagtttctcagggcagc

SEQ ID NO: 13194 - DNA, 1128 bp, Homo sapiens
cttcgtttcaggccctccaggaggccggctggcaggagccggggagggaagaggagcctgtgttccctgtggccctgggcagcgtctgcaggaggctcaccctctctctctctttgctcctcaggtctcctgacaaacacagcccctgaggggccccgggagtggccttggctccctggagagcccacgtctcagccacagttctccactcgcctcggacttcacccgttctctgccgcccgcccactccgtttccctgtggtccgtgaaggacggcctcaggccttggcatcctgagcttcggtctgtccagccgacccgaggaggccggactcagacacataggcggggggcggcacctggcatcagcaatacgcagtctgtgggagcccggccgcgcccagcccccgccgaccgtggcgttggccctgctgtcctcagaggaggaggaggaggaggcagctccggcagccacagaaggctgcagcccagcccgcctgagacacgacgcctgccccaggggactgtcaggcacagaagcggcctcctcccgtgccccagactgtccgaattgcttttattttcttatactttcagtatactccatagaccaaagagcaaaatctatctgaacctggacgcaccctcactgtcagggtccctggggtcgcttgtgcgggcgggagggcaatggtggcagagacatgctggtggccccggcggagcggagagggcggccgtggtggaggcctccaccccaggagcaccccgcgcaccctcggaggacgggcttcggctgcgcggaggccgtggcacacctgcgggaggcagcgacggcccccacgcagacgccgggaacgcaggccgctttattcctctgtacttagatcaacttgaccgtactaaaatccctttctgttttaaccagttaaacatgcctcttctacagctccatttttgatagttggataatccagtatctgccaagagcatgttgggtctcccgtgactgctgcctcatcgataccccatttagctccagaaagcaaagaaaactcgagtaacacttgtttgaaagagatcattaaatgtattttgcaaagcctaaagttatatatttaacagttt

SEQ ID NO: 13195 - DNA, 1222 bp, Homo sapiens
ttaattctttttccccggggaggggggaggttttatttccaagttttctaggaacccatctccgtctgggcgctgtgagtggggtgggcacgtccgggcagcccagtgcgtctgtcgcacgtccccaggccgtgctgctggcgtcactttctttgatatgtagctttttcttaaagacttttgaatgtttaataattttgtaaatcatgctctttacacagagtaccacttatttaataagacgggatgtaaatttacaatgacaaatgtgtattttaagaaagaaaatgacattattttgaatggtactttgtggaaagaggggagaataaagttatgctgtgtacatcacttgcagatcaccaaaaacactccgctgcccgtgaccgccggtgggtgtgtccccgctcccgtcgtcccgcccacctcaaaccccgcaggtgtgcctcccagcggattatttattgtagaaagtgtattcatttgctttataatgaaaaatacatttgcaaaggtatattgatatgcatttttatacaggcacataaaaattcaacttggcttgggagcagaatgcattgcattgtataaatgactctggcctgtgtgtactttgattttataacttgtaatcttttgtttacaatgaggggctttctgtaacttgttttaatttagaacactttggtagcaatagaaactttggatacatttttgtatggtacctgtgatgtatatagaattagtactttatttttatttttaagaggtaaagcattatgttggggaaagtagggtgggtttccaaatttgcattttttatattaaaaataaagtcaagatttggacggtgtggccattttattcctacagccctagacggctaggtgagccccaaggacgggtggggtgctggctgcagggggcggggacacgcctttatcttgaaaactgtcatgggatggcattatttgttatttcacctgatcatatttttattttaaaacttcagttacataaaagttttaaatgctttttttaagcctacaccgtttgtaacatctccatagaaacttggaaatcaagtcttccttagatagttgctgtcctgcatctggcaggtgcttcctatctgtcgtggctctccttcccacagccagccccgcccggcaggcccctccccaccacgagcagctggtggcccccaggatcactcaccgcc

SEQ ID NO: 13196 - DNA, 1191 bp, Homo sapiens
ccgggccgcaccaaccccgcccgcgcctccctgcagccaaggcggacaaggagagcttcgagaaggcgtaccaggtgggcgccgtgctgggtagcggcggcttcggcacggtctacgcgggtagccgcatcgccgacgggctcccggtgagtcggaccgccgggcgggcccgggtttctcgcgcgccttgcgcctcgcttggcccggcctgacccccgcgtctccgcaggtggctgtgaagcacgtggtgaaggagcgggtgaccgagtggggcagcctggtaagttggggcacgggcggcggcggcggcggggggcgggcgcggggcttttgctgaccgccgtgtcccccagggcggcgcgaccgtgcccctggaggtggtgctgctgcgcaaggtgggcgcggcgggcggcgcgcgcggcgtcatccgcctgctggactggttcgagcggcccgacggcttcctgctggtgctggagcggcccgagccggcgcaggacctcttcgactttatcacggagcgcggcgccctggacgagccgctggcgcgccgcttcttcgcgcaggtgctggccgccgtgcgccactgccacagctgcggggtcgtgcaccgcgacattaaggacgaaaatctgcttgtggacctgcgctccggagagctcaagctcatcgacttcggttcgggtgcgctgctcaaggacacggtctacaccgacttcgacggtgagcgcgggcgcggggcagggaacgttccgggggccttgccggcgggttaacgcctgcaggggcggcacatggaggggctgatgactgttgggcggccgcgcgccctgggtctgctctcgtggggagcagaggcccacgcgctaccctggggagggctgagcgagggatcaagagcgggatcgtgctgggtgggggctaggggcgcgctcaatattgcttcctccatcgcgttggggggtacggggcctcttgccccggtgtgggaggcgcgtgacatccttccggcccgagagacccccggctgggggcggtagcggaggagtctccgtgcgtgacgcagggcgcagccgggctgggtctgcgccgggagcctggaggcccccgcggcgcggttggagtggcggggcctcccctgcgtgggggcgggagctgcgtgcgtgcggagcgcgggggcgcggcggcaga

SEQ ID NO: 13197 - DNA, 2019 bp, Homo sapiens
gggacggccggcccctcccccagcccccccatcgcctgccggggtttttccagggtgatgacgagcaggattttgaggcctggctctgcttcctgttactgaggccagggagttaaccagcagggacctcgccgtctgttgagcggctctgcctctgtggtgggcgtgctaagccctgtgtccccttaggcacccgagtgtacagccccccggagtggatccgctaccaccgctaccacgggcgctcggccaccgtgtggtcgctgggcgtgcttctctacgatatggtgtgtggggacatccccttcgagcaggacgaggagatcctccgaggccgcctgctcttccggaggagggtctctccaggtgcgtggtggctcgaggcgggggtgggggcctcgccctgcttgggccctccctgacctctccgctccgcacagagtgccagcagctgatccggtggtgcctgtccctgcggccctcagagcggccgtcgctggatcagattgcggcccatccctggatgctgggggctgacgggggcgtcccggagagctgtgacctgcggctgtgcaccctcgaccctgatgacgtggccagcaccacgtccagcagcgagagcttgtgaggagctgcacctgactgggagctaggggaccacctgccttggccagacctgggacgcccccagaccctgactttctcctgcgtgggccgtctcctcctgcggaagcagtgacctctgacccctggtgaccttcgctttgagtgccttttgaacgctggtcccgcgggacttggttttctcaagctctgtctgtccaaagacgctccggtcgaggtcccgcctgccctgggtggatacttgaaccccagacgcccctctgtgctgctgtgtccggaggcggccttcccatctgcctgcccacccggagctctttccgccggcgcagggtcccaagcccacctcccgccctcagtcctgcggtgtgcgtctgggcacgtcctgcacacacaatgcaagtcctggcctccgcgcccgcccgcccacgcgagccgtacccgccgccaactctgttatttatggtgtgaccccctggaggtgccctcggcccaccggggctatttattgtttaatttatttgttgaggttatttcctctgagcagtctgcctctcccaagccccaggggacagtggggaggcaggggagggggtggctgtggtccagggaccccaggccctgattcctgtgcctggcgtctgtcccggccccgcctgtcagaagatgaacatgtatagtggctaacttaaggggagtgggtgaccctgacacttccaggcactgtgcccagggtttgggttttaaattattgactttgtacagtctgcttgtgggctctgaaagctggggtggggccagagcctgagcgtttaatttattcagtacctgtgtttgtgtgaatgcggtgtgtgcaggcatcgcagatgggggttctttcagttcaaaagtgagatgtctggagatcatatttttttatacaggtatttcaattaaaatgtttttgtacatagtggataatcctgtatttatggggctgggcatcctgggggaagagaggggctctgaggaagggctttggctgctgggtgacctgacaagtttcccgtggggctggtagttttgcccacgggggaaacgggggaggcccagctgggtgccagcctccccagtgccacaggctacttcatgtggcttgtggcccaccgcactaccccgtgctgcacccagggagaagagcagctgcctcctggggtgcctctgggaggtggaggcagggagccaggccctgaggatgcagcaacccacactagtcaggaggtcattcctcggtggtcccaggaggatctctgcagcccccacccagggaggccttgccagtggaaatggccatacttgcatcctggcttggtggaaacagagacgtgcgggggggtgggggagggagtccatgctgcc

SEQ ID NO: 13198 - DNA, 1155 bp, Homo sapiens
gtgtcccatgtactggtgatatcacagtcaccctcagccgcatcagtgaagtcacagccaggcccgcccagggctggccaggcccccagagtcacagtgtctatgctctcctggcccaggggcccaggagctcttccttccctgtggccaagcggaggcagggctgtgtgggccaacaagatgctgtttccagggtgaagctctcagcacacgagggaggcatccacctgccctccacccggctgctgggttccaggtggcaggagccctttaagaggcccctcagcggcacccagacccaggagaggaacagagggcagccgtcacacccttttcttcctgatgtttccattttctattcagatggacccttggcttgaccatcatccaagggcttggtctgggggcaggcgacacacaggggcgcaggagcagagtcaggcttggaagtcaggcaggcctcacgtttgctgtgcagagccgcttttcgttcgacagaaactgtgccgggtaccaccttccccttgtgacccatcaccatctcctcgcaggtcacaaagctggtgaagaactaccggtcccacgaggccctgctgatgctgccctcacggctgttctaccacagggaactcgaggtctgtgcggaccccacagtggtgacctccttgctgggctgggagaagttgcctaagaaaggcttccctctcatcttccatggtgtgcgggtgagttgtgtcttgaatccgtaggtgaccgtgtcgggtaaggacagtatggcaggaggtccttcctcccaggtgaggctctgtcacctgcctgtggcggggcagatgttctgctggtctccagagagtgaaaagccatcgggggcttgtgccccccaagatggatgctgacttctcctgccagatgagttgtgcctggcaccaaggaggcatcacaggcaccactctcaggtggtcacagcagacaagcactgggctccaagagaagcgaagctgcccagtgagctctggagggcctggggaagctcgcagggccatgtggctggggacgccccagggccgcaggaagctcccagaggccaccaccgcctccctcccggtgcttccctcgagggttggagctgtcaggagagagcccggcagggaaggc

SEQ ID NO: 13199 - DNA, 1240 bp, Homo sapiens
aggaatctgggaccttcgcctttcggaccccaaaggtacggctccagggcaggccggctcggctgctggaccccagggccccgggtggggtggggggtcaccttcaggactgtgaggggaggggcagcagggagaccccagggaccagagcccagccaggggctcgccatgccctgtgctgctggggaagccccctctgccctctgcctccctggggacagagtggcacagagcagcgtccatggggttcccgaacttccgacacctgaaggcctcccctgctgcccttggctgggaagggacccggtggccacagggaggctgcccttgtgacccccgccccacgcccctctgtgggggcaggaagtgcagtgtgcccctgcgtgtcccccagctgtcccacgatgccaacgagacgctgcccctgcacctctacgtcaagtcttacggcaagaatatcgacagcaagctccatggtgggggccacgggcgcagtggggggcgggcaggggacgggtgggcacaaggcggtgggtggggggacaggtgggcgcagtggggagcaggtcgggggcgggcaggcacggggtgaccactgacggcagctctccccgcagtgaccctctacaactgctcctttggccgcagcgactgcagcctgtgccgggccgctaaccccgactacaggtgtgcgtggtgcgggggccagagcaggtgcgtgtatgaggccctgtgcaacaccacctccgagtgcccgccgcccgtcatcaccagggtgagcccctcgaagcctggcctacaccttccctcgtccctggcatgagcccctccctgctcacccggctctgtggtttcagatccagcctgagacgggccccctgggtgggggcatccgcatcaccatcctggggtccaatttgggcgtccaagcaggggacatccagaggatctctgtggccggccggaactgctcctttcagccggaacgttactccgtgtccacccggtgagtggacggccctggtctgggccctgtcagctgggtcagtacccacgctggggttccgggtgactgggtgggtggggaggctgagggggtgagggtgtcagggtgtggggtgggtcggggagtgcctgggccacactgcctgtcgcccgccaggatcgtgtgtgtgatcgaggctgcggagacgcctttcacggggggtgtcgaggtggacgtcttcgggaaactgggccg

SEQ ID NO: 13200 - DNA, 1268 bp, Homo sapiens
ctccccttgggtagagccaagtggacgggtctaggtttgcttgtctgacagtgtggagcgctggaaggaggaggtgacagccacttcccacccaggctctggtgcctagaaggcagctgggaggctgggcctggctggggccagctgacagtgagagtggccagggcttgggcatgggtatgtcggagcagcctgctgggcccacgtgggctgatgaccacacgggggatgcagtttatggttctgggcccctgctgcattctctcgggggtgggtactgacaggatgctggcttggtaaacactggagggcttgaaggtagggccaccggcatcttgagggacagggacgtccctcagtcctagagggcttggaagggggtgggctgtgaccagcaggctggaggcggtggtcggcacacccagagcgagctgtgtttgtccagtgctctgcccgcatacagggcttggggggctgtggacagggcctgcctccccgctgcctgtggacatgcgggtctctggcctggtgagtggccaggcgggagggcggtgggtccccgaggtgctgaggccgcctgtccctgcagatccacaagctgctgcaggtgtctgtgctggtggtggagctcctggattcaggctcctccgtgctggtgggcctggaggatggctgggacatcaccacccaggtgtgtggcgcgtggggctggggtgggccaggctcccgggctcctcgctgacctcctggcggtgctggcaggtggtatccttggtgcagctgctctcagaccccttctaccgcacgctggagggctttcgcctgctggtggagaaggagtggctgtccttcggccatcgcttcagccaccgtggagctcacaccctggccgggcagagcagcggcttcacacccgtcttcctgcagttcctggactgcgtacaccaggtgggcaggccgctgtgtgggtgggccgggactgtgcaccctgaccgctgagccctggcccctgacccacatggcgtgcaggtccacctgcagttccccatggagtttgagttcagccagttctacctcaagttcctcggctaccaccatgtgtcccgccgtttccggaccttcctgctcgactctgactatgagcgcattgagctgggtatgtggggagtcggggctggggcagccacgggtcaggaggggcccaggctcagtgctgcttctgtgcagggctgctgtatgaggagaagggggaacgcaggggccaggtg

SEQ ID NO: 13201 - DNA, 1233 bp, Homo sapiens
cagtagcagaagcaggagcctgggagcaaagcagctgccagcagttaggagtggtggtcgtgagtggtgcaggcgaggcggcaggggcccagcaaggggctggaacttggcgtctgatcacaggagcccttgagggtgctgagccaggagtgccttgtccagacagtttcagaggagctggtggccctgagtgcagaatggtgggaggggcagaaggatgggagcggggcagcttggggtgggttggggtgtggagaagctcctgggcagcctggggtggggattggcaggactggctctcacctgcactcagctcttctcccaggacaaggagctgcgcgcggtcttcctgcggctgttcgctcagctgctgcagggctatcgctggtgcctgcacgtcgtgcgcatccacccggagcctgtcatccgcttccataaggtggggtgcctggtggctgggcgtggggtaggagataagcgcatggtggagacccctgagggaccgacctccttctgtcatccaggcagccttcctgggccagcgtgggctggtagaggacgatttcctgatgaaggtgctggagggcatggcctttgctggctttgtgtcagagcgtggggtcccataccgccctacggacctgttcgatgaggtgcacctccaccctgccctcccagccccctgccctggctccgcctgaccatggcttacctaacctcctgcttaccccgctagctggtggcccacgaggtggcaaggatgcgggcggatgagaaccacccccagcgtgtcctgcgtcacgtccaggaactggcagagcagctctacaagaacgtacgagggtagcaggacgggagggcgtcgtaccgccttgatccctgggcccctgccccacacctgccgtctccccacaggagaacccgtacccagccgtggcgatgcacaaggtacagaggcccggtgagagcagccacctgcgacgggtgccccgacccttcccccggctggatgagggcaccgtgcagtggatcgtggaccaggctgcagccaagatgcagggtgcacccccagctgtgaaggccgagaggaggaccaccgtgccctcagggccccccatgagtgcgtaatgagggaggggaaggcaggccccgagcgtggcccaggatgggcgtggggtcaggggtccgagtgtgtgtattctgtccccgcagctgccatactggagcggtgca

SEQ ID NO: 13202 - DNA, 1145 bp, Homo sapiens
ctacgggcttctggcctatggcactgtgcactactttggcctggaggttgactggcagcagcgcaccatccactccagaaccagtgagtgccgacctgggggggccagagggcaggggcggaccagtcctcacacccccctcctccaccagctttcaccttccaccagttttctcagtggctgaagacactgacgctgcccactgtgtggctgggtgtggcctccctggtctgggagctgctgagtgccctgtggaggtacatggcccaggaagcagggagggggcacaggtgtgcagggccggcctgacgaccttgggtccttgcccacaggtggacccaggtgcggggctggctacggaagctcagtgctgtagtccaactgtcccttgtgggcactgcgaccgtggccttgttcctgattagcctggtgggtagcgctgcagggctgggggatgggctgggggcagggcagccctgagaacctcccacctgtctccaggtgccgtactcctacgtggagcccgggacccacgggcgcctctggaccggggcccaccgcctgtttggtgccgtggagcacctacagctggccaactcctacggcctcttccgccgcatgactgggcttggtggacggcctgaggtggtgctggagggcagttacgacggccaccactggacggtgagccctcccagggcgggcagggtggtggggcccaggtcagcgggcccagctgacctcggcctgcctggcaggagatcgagttcatgtacaagcctgggaacctgagccggccgcccccggttgtggtgccccaccagccacgcctggactggcagatgtggtttgcagccctgggcccacacacgcacagcccgtggttcacaagcctggtcttgcgcctgctgcagggcaaggagccaggtgcggagcgggcttggggggtgtggagtgggctggggtggagcggggtggggaggggaggggcagggcgggtactgtgggggccacgctgatgcctctcgctgcagtgatccgccttgtccagagccaagtggccaggtatcccttccacaagcagccgcccacctacgtccgagcccagcgctacaagtactggttctcccagcctggggagcagg

SEQ ID NO: 13203 - DNA, 1115 bp, Homo sapiens
gcctgggcaacctgtttggtggagccggtcagacccaacagtcttgggtggaagtcctggacgtagcgggccatggcttcaacgtcgtcccgctcggggtccacagtgatgaagacaggctgcactggaggcaaaccaggctctgcttccagctgccgcaccacctgcaccagcttctccagctcgtctgggcagatgtcagggcagtgagtgaagccaaagtacatcagcacccactggccccggaagtcagccttgcagcgagcccggcctctgtgatccagcaggtggaagtcgccctggcccacagctgcctggcgcagggcttctgttcgcttttgctgctgcagcctctccttctcagccctcagggccagccaggccccaccgagtccagccccgaacaggcctgtgatcagcagccgggttcgaagcccagggccctggggctggccctgcccacctgtctctgcagggccctgccttgacaaaagccaggacctcagatgcagggcctggcctcccagggtcccagggaggacccgaggcttgagctgagagagcctgtgccaagctgtggggctccgagtcagcagcagcatggatctgatgctcctggaaacaagcacaggcgtcaggagccagaagggaaggcccaggacagtgcctgggctgcccctgcgacttgagaccagccacccatctgaaggacccagcccacgttcaggcttaacaggcatttgcagctgctcacctgagctcagaactccacctccaccaaacatccacacctgggcaaccacacctgtcactcctgtcctctacctgggatcaccagcctgtcaccgcaccctgccctgcacctgcacctcagcaaggtgaacctcttgctgacggaaagcattccaagtgcatgccttgcctgaactaaccacgttatctatttgcaataaacccatttcttaaaaggaggtgggtaactctctggcttgcaatccccgagagcaaccgattcctccaacactttcctgttacctccagccacttcaaccaaccgcggccttcctccacactcccagcagaaaacctgcacgacctacccccggagctcagac

SEQ ID NO: 13204 - DNA, 1108 bp, Homo sapiens
ccctccccggagccctagatccctggcccctcctctcgcccttgccctgtgcacagaattggccccctccccaggctctgcccacagtgataccactgcagaccctgcctgccacgcctccagctctctgactgctcatgagcccccgctgctctatgacctgtccaaggaccctggtgagaactacaacctgctggggggtgtggccggggccaccccagaggtgctgcaagccctgaaacagcttcagctgctcaaggcccagttagacgcagctgtgaccttcggccccagccaggtggcccggggcgaggaccccgccctgcagatctgctgtcatcctggctgcaccccccgcccagcttgctgccattgcccagatccccatgcctgagggcccctcggctggcctgggcatgtgatggctcctcactgggagcctgtgggggaggctcaggtgtctggagggggtttgtgcctgataacgtaataacaccagtggagacttgcagatgtgacaattcgtccaatcctggggtaatgctgtgtgctggtgccggtcccctgtggtacgaatgaggaaactgaggtgcagagaggttcaggacttgtacaagatcacccagccagaaagaggttgggctgggatttgaaccctggtgtcgtggctctggaagctgccctggcgccttggtgatctgcgtgggtcagtgcacacaggcacacgtcagcctcaaggacatgggcacatctgttcacaggagcagcgccacgtgcctttgagtgccaggaacggggtgggagggtgggagggtgtgagggccagaagactcagaagatgcaaagtgcctgagagagacgggatattcccccagaagaagcattcttagagacacaggcactggacctccttggttcttataagaaacctgtctgaagctgggtgatgagttgcacactccaggtggggctaaggggcctggagcccctgctggctcctaggaaggcacagcagcaggccctgagacggctcctctggggcccctccaccctcccaggcctctgcatttcacctgtgcccacacttctgtctcctgccttcaccttt

SEQ ID NO: 13205 - DNA, 1189 bp, Homo sapiens
tttctccccacggagcccagcctggattcctgtgcctgctcgcagggaggcagagaaggtcccccgggaggagcggaagtcacccgaggacaagaagtccatgatcctcagcgtcctggacacatccctgcagcggccagctggcctcatcgttgtgcacgccaccagcaacgggcaggagcccagcaggctggggggggccgaagaggagcgcccgggcaccccggagttggccccggcccccatgcagtcagcggctgtggcagagcccctgcccagcccccgggcccagccccctggtggcaccccggcagacgccgggccaggccagggcagctcagaggaagagccagagctggtgtttgctgtgaacctgccacctgcccagctgtcgtccagcgatgaggagaccagggaggagctggcccgaattgggttggtgccaccccctgaagagtttgccaacggggtcctgctggccaccccactcgctggcccgggcccctcgcccaccacggtgcccagcccggcctcagggaagcccagcagtgagccaccccctgcccctgagtctgcagccgactctggggtggaggaggctgacacacgcagctccagcgacccccacctggagaccacaagcaccatctccacggtgtccagcatgtccaccttgagctcggagagcggggaactcactgacacccacacctccttcgctgacggacacacttttctactcgagaagccaccagtgcctcccaagcccaagctcaagtccccgctggggaaggggccggtgaccttcagggacccgctgctgaagcagtcctcggacagcgagctcatggcccagcagcaccacgccgcctctgccgggctggcctctgccgccgggcctgcccgccctcgctacctcttccagagaaggtccaagctatggggggaccccgtggagagccgggggctccctgggcctgaagacgacaaaccaactgtgatcagtgagctcagctcccgcctgcagcagctgaacaaggacacgcgttccctgggggaggaaccagttggtggcctgggcagcctgctggaccctgccaagaagtcgcccatcgcagcagctcggtgagcagggcggtgcggggagggatccgtgccttgtccgtggccccgtctgtcattcctcttg

SEQ ID NO: 13206 - DNA, 1167 bp, Homo sapiens
aacatggattcccgtgtgtcatttctaaagtgcagtaagaagatagatggaagtcacgccatctccctgcactccatctgccctcttgccttctccccaccacttccccgtctgtcctgcccctgcccagaaggatctgagcaggggcctggcttgctgctgaggctgtcacagctgccagagccctgggctgatcccataggtctttccttgaggacccgactcccaaggctccttccaaagaggagcccttcgggcccgtgggctgcatggatgctggcggcagagctggtcatcccccacccgcccccttgtctgcctttttaaagctgcttttgccttctgtgcccctaggtctcccctctcctctttgggtctgggggggtggtatgtggatgccacctcttgactcctgcttcttgctgcctggaagaccaacctagtgggccccgtactgtcagccttggaggacagagttcacagcgtagcaacgtgttcagaacttaaggactttgcaggtcttacaaaggcctggccattctaccttctttagttcaggattcaaaagacaggtaggagcttgggaagctcatgaggcctctcctaaggtcccgggatgctgcctccagctcctgtcatcctggggaattgctctggggtcctctccccttttagccttttccaactctcagccaaactggaaagccctcttcccagcagtgcagtgttgaaggtgcccgtagaatgggtgttataatcagagtgagcagcctggtcctaggcctctgtacaggaccagacccctgaggctggggtctcctgacccacacctgaccagcccccatcttccctctctgcttctccctccgctcttctctgcctcttggtcttgatgaaaatcaaagccattttaaaaagtgcatagcacagtgcctggcctggttcgggccctcaataaacatttcttaaatggatgaaagaacaaagcaaaatgcaaatgctgtgttttgtgatttgagatctagggaggtggcttaggacaaaaacccacagaaggacttactcagcgttcagactcatcaggtgtcgatcccccatggtcgggctcaggtgggcccaggtctcgtcattggctctgtcctctcctgtgaggcagctgcagcagtt

SEQ ID NO: 13207 - DNA, 2116 bp, Homo sapiens
ctgccatcacaactccactgaaagctaagccttggggcaggggcagggccagggtaggtgtccatcctgtgatacaggtccccaggccagggccactttgttggggctggtgggtggaggccaggtgcatattcctggtcctgcccctctctgggtgtccacagtcaggtccctctgagtgattctctcggagtctcctctggcaagcccctccagcagtcaccaccacctgggcacccacccccaggggaccccccgacccaacaccacctggcacctccccttgggaatccccccaaccttggctgcctccccactttggcccactgtgcaggtggatccatggaggccaggtccaatgggagcaaagacagcttattctggtggttggtgcctgtgctgaggcccacctcaggtgttcttgaagcccctttctgtttgggggcacagtgtggcctcttcaggaagttctgctctggatctgagcagctgggaggaggcagtagggacagaggctgaggagaggacagaaatgaggtcccatgggagagacagagctcagatctccacagagggctgacctctcacaggtgggagacaaaagacgaaacctgctttaaggggagccccatgcgtgtgtggggcaggcactggtgatgctgtgtggtgaggacagcctttaaggggagccccatgcctgtatggggcagggactggtgatgctgtgtggtgaggacagcacagaggttggggtggggggactcagcctgggcaggggcagggagagggggtgggagggccactggagaggggcccggccaaagaggatgtcaggggctcagcacccccaggcggccaggcacctgccgagcactgcagccacgcttgtggttcacctgcacttggagactctcgcacaggcgcctctcctccaccagcagctccagctttgtccctcccacagcagctgggccctctgcacctgagttcctccctccacacctggctgcccattgtgtggttgcagctgtgggtcgcgtgggcctggccggctaactctctctctcattgctctctcctgcccatctgcatgtggctgctctgtcgagctgcgccgtggtcccgagcgccggctgtgtaagtgagcatgcccatcccatgcctcttgccgtccacacgctgtgcctgtctgcctgggtctctgctctgcgtggctgtgagaggctctggtgccactgacagccccttgaggcttcccctgacacagtggggatagggatgggaatgggaggacatgggagtgggttttctctggagctatcaccccaggtaggcctcccaccacggcagagccaaggaggggctagagctctagggtcctgtcaggtgaggctgggaagtgagctgccatcggttcttgtgtgtgtgcgtgcgtgcatgtgtgcgtgttgcgtgtctgcgtgtgtgtgctgctgccaccgcagcatgtctgtaacgcgtgtgggcaccgttgctgctgttgtgtgccgtctgtgcaggaggctgcctttgtgttgagggtgtgcacggcctcacacctgccctgcatgtgctgctgctccatacgggtacgagccctgcctagtgtctgtctcctgtgtcacggacctgttcaacctcgtgctgctgccagcctttatcgcgactcagctgtccctggaacctgcccaggatcccctgggtcttctcatgagagcagagctgtgtggggggtgggcggtgaagggtactgcccaagtctcagcgtcccgggtatctgtggatcccgccatgcccagagccggtgtcggaggctggcaggagggagaagcccgccctttgccatgagaggctgtcttttctttggttgggctgcacttggagcctggatggagtggagggggccaccagtcattcctcatattccagccagtcgctggctctggtcccaggggccaaagaaaagggccagggtaaccgtaggatcccaccctttatttcttcctctggccgggctactcccgccagccgcagccccagcccgtttcctcctggaccctgcccgctcccctccgcccgtccccccttggctgtgcgc

SEQ ID NO: 13208 - DNA, 1207 bp, Homo sapiens
cacatactgaagcatagcttgctagaacaaatcctgtacatatgaatgccagcaactggggacacatttagtattcacattttatgcaaacttacttggtcaattatttcttttttaagcacaggtttattttggaattcagataagaactgacacatcatagacagtcattgttaaggtaaccctgttatttcaattgcaaacaaacaataaacgttttttcttcaagacagttaccactttttaagatcttagtactaccctatgcaaaaacagttttttttaaaagcctgaacaggttaagatagataatagccaactatgttttctcaggtgaaactattccaaaagaactgtacatttcagtgatataaatcagatccagaaaggtggatctctgtttagttcttgaaatatataattcacaaaataagacccttgttgttctacagaggtcccctaaactgtcttttattctggtgtagtctctaaaacctcattaagagggaggggagaaaatttagtcttaccagaaatgctctgctttttagtagccatcagttttaggtcttctttatgtaactcagaagttcatctttttccatttggtaaccactttttttccactgttctcgcaactgttgtaatagagccccaatttcttttcctgaagaaatgcccacttttctgatgtcatggccacttacaggaaatggaggaatggaccactgctgcatttcctttaggagacagtgctctccttggtacttcagtagttcacatacacgagtagttgcatcaggttccctagactacgtgtcaaaatcaaacatttagtttcgtcacacatgaaaacatacacttacaatcttatcctaaaatttaaatactcaacataaattttttcatttaaaataagtaaaattcacagatttgtagatcttagttttaataaattaattctaaattcgtgacgatacttcatatttctgaccaagcctagtatatacttacatctataatgaagtcttgatagggtttcaatgggtctgaactatctgttgctttaattaaatctttcctatttttaactataaataagccaaggtttttctcctcttttgcgatcttcaacctcaaatccaattttgtgacatcatcttgtactttgaataatgaggccaaaagagtcactggctttggtgaa

SEQ ID NO: 13209 - DNA, 1208 bp, Homo sapiens
tgaaaacttcctgtgtcattaaatactatgtaaagacatgactttcaatggctgcttacttttctattatatggatgtgcctaaacttaggcaatcattggttgttacatttttcttttttgctgttatatctaatgctgaacatctttgtactatatccgtgttacatttataaggtgaaggacgttggaaaatatgtggttagttcttgaatgtgctgccctttttaaagcatacatgttaagtatccatacaggcagggttgtggggaagcactgtctacagccggtgcaatatgcatctgatgggttagagccttcagctgagagtcccagtagcacttaccttgctctttctctctacacagtcttattgttacaggtatcgctgtgctgctcggagccagaacacacctgatagctctgcttcgaatctgggattccgctgtgcagccgaccgcctgcccactatggactgacaaccaaggaaagtcttccccagtccaaggagcagtcgtgtctgacctacattgggcttttctcagaactttgaacgatcccatgcaaagaattcccaccctgaggtgggttacatacctgcccaatggccaaaggaaccgccttgtgagaccaaattgctgacctgggtcagtgcatgtgctttatggtgtggtgcatctttggagatcatcaccatattttacttttgagagtctttaaagaggaaggggagtggagggaaccctgagctaggcttcaggaggcccgcgtcctacgcaggctctgccacaggggttagaccccaggtccgacgcttgaccttcctgggcctcaagtgccctcccctatcaaatgaagggatggacagcatgacctctgggtgtctctccaactcaccagttctaaaaagggtatcagattctattgtgacttcatagtgagaatttattatagattattttttagctattttttccatgtgtgaaccttgagtgatactaatcatgtaaagtaagagttctcttatgtattattttcggaagaggggtgtggtgactcctttatattcgtactgcactttgtttttccaaggaaatcagtgtcttttacgttgttatgatgaatcccacatggggccggtgatggtatgctgaagttcagccgttgaacacataggaatgtctgtggggtgactctactgtgctttat

SEQ ID NO: 13210 - DNA, 1139 bp, Homo sapiens
caccttttgtaggtgcaacctttcgtaggcaccgcatatttctgaagctttacaattgaaggaaggactaattgagaatactgtcagggagtcatctaagtgcctggtacacagtgtccccactgagagctgtagttttttagaaacctttgcgtacgctggttcaaagttgggaggctgggagctttgtgtgttttaccccagagcaaactcttcccagggtctcggcaatgatgccaggtcattccattttaagcgatatctctgaaactgtcccacttgttgttgaagccataatcccctgcttattctggaagacgtgaccttagtcttatggatttggcttgatggagtcaacagaaatgccacatactgaaggaattttgttttacgtttttaatgcattataatcccctttgcctccctgcccgccaccaccctctgcaatctttttccagctatagttcctagttttctgagactgatttctttcattctactagattttgattcggcttagcaaactctgtgttcaagagagtgcctcagtgagaaagagcaggaagcagcaacagcgtctgctccggaacatgggcgcgcacgccgtggtgctggagctgctgcagattccctatgagaaggtgagcggtgcctcatgcacagcagctgctctcaggatggggcggatccctgggtttccccaaactcttcacatctggatattgttagtgaagaaatgcatccagtgtgactattgtgactacaaagcaatttcaggtattgatatgaaacagagcatctgaaaaataaagtaaaatcacccgtgaataatcctcatccccagttttaagattctgtaaagaaagagagtccatttattctccatactcccaagacatattggatagagacaacttggtctgtgtcagagcttagagctatatctacccatgagttggtgtgtttcaatttcatttgcaatgtgactcaaccaatttaagtatcaccagctattaagtgcatgtaggaacatgggatgtgcccacttttgaagtcctcagtaagacgctgacatctgcttaagtatttggatttatcaggtgatgctttgatctaggtcttcttttctgttgctggaa

SEQ ID NO: 13211 - DNA, 1150 bp, Homo sapiens
gggtttgactgatgtttgtctcatgcttagactggagttctccttttttaagacgaagaaagaagcacctatccagaaagaggagtttatgccattgtgaatgctacctttaggattatgtttgggataacccagcatttttgtagattgttgaacaaacctgaaaaataactagcaaatgattcattggccaaacgagttccctgtcttgattattcttaaaatacacacacacctcagtgaccctaagaagccattcattgaggaaacccattgaactttaactctgacatgccctggccttatgacctgagagcattttaacattcctaagaactgcttccccccagaattcacactgggaaaccctgacctaaaagatggtaaagttgacttgagcttctcagtctttaagctcaataccaggcaagctggcccattctgggtgtgaaaaacctgctggatggggactagggcattacgtccatctgtagggtgtcccccataaaagttgtaggctcacgactcatctttctcctgtgcagccaagagccgggccattgccattcccgtggacctggacagccaagtcaacaacctctttctcaagtcccacagcattgtgcagaaaacagccatgaactggcggctctcagcccgcaatgccgcacgcagggactctgttctggcagcttccagagactaccggaatatcattgagagattgcaggtaatgcctggtgttgagagaagtgatgcttagcctggcctcacgtgattgccacacacagcagtgcatccttgagccacagagcatctaagctgggccgtgggaagatgtcggtgtgctgaacgaatagtcaaatgttatatatgtagggccaggagtgggaagttacttaggaatagaaaagttcctgaaaagtgatggtctttaaaggttactcctagatttgcagatttcttggtgaaaaattgggactctgctcttattagaaggaagtattgaagtattacagaggatgtttagagtaagagcataaatgttccattttccccatcactctggggttatttagcctcttgaatcagcaggtgaacaagggtggtgatacctgagagaagaattttacatcagaatgagccagat

SEQ ID NO: 13212 - DNA, 1176 bp, Homo sapiens
tacaggtgtgagccaacatacccagccctcacctagactttcttccctcttcacgtgttcttctttgacagctgtgtcacagaaaccgcttctacccttgttgaaagaagaaactgtgaaatgccaggacaataggtgtgcagggggtggtgaacttgacatacatgaaatagttaaagaatgggcaggaccggtcgggcagcttgactcggcagtgtgtataatcattactttgtgatcatttttatagtcgccatctgcttactaataatgtttttaaaacaggaccttaattcaacctctagagattgcttgtgttaaattatttggtctatctcacaactggtgagaacttttcaaagaaaattttttaattcatttacacagacttgaatgtttaaattagaggaacatatcatcacttttattttagtcacagtttccttctcttgttttgatgtgctgtttgactttttgccttgccaacccagattcaactgtcttcaaaatatcttcagctatcatttaaaaaatcagctttcttttctttagataattctgcaacatgaagaattaaaacaatattgtctagctgtgctgttgactcttgcgcaatcttcaggaagctaaatcattttcatgtggctgcttaggttttagagcaaggttcccataagcatgtgctcttttttggagaatgaatgatgataactctgtctgtttttctttcctattcttcgtgatatagaaaatataagctgtacagaggatataaattactaagagtctatatgcctttaaaaatgcatctcctagtcaaaaggtttgtataatttttgttgaacagtacagtttaggaaaagaaactataaatctataaaactgatatctatcaaaatattttctatgagttctaattttttcttgtccatctgttgccacaaacttacaaatgagaaatagcaattattatgaaagcacaaaaaccaaagagtgcttccttccagttttggaataggttatattattttgtatgtcttcatctaaggatgtaaaatatcattggaaacctcaatgactctatgaggtagataattttgtattgttttacagataaagataatgacatattaagaggttaattaagtcctgggatcatattgtcacacccaaagg

SEQ ID NO: 13213 - DNA, 1431 bp, Homo sapiens
cctaaaaagcaacaaaaaagtttttgtgaatgctgcaagattgttgcattgtgtatactgagataatctgaggcatggagagcagattcagggtgtgtgtgtgtgtgtgtgtgtgtgtatgtgcgtgtgcgtgcacatgtgtgcctgcgtgttggtataggactttaaagctccttttggcatagggaagtcacgaaggattgcttgacatcaggagacttgggggggattgtagcagacgtctgggcttttccccacccagagaatagcccccttcgatacacatcagctggattttcaaaagcttcaaagtcttggtctgtgagtcactcttcagtttgggagctgggtctgtggctttgatcagaaggtactttcaaaagagggctttccagggctcagctcccaaccagctgttaggaccccacccttttgcctttattgtcgacgtgactcaccagacgtcggggagagagagcagtcagaccgagctttctgctaacatggggaggtagcaggcactggcatagcacggtagtggtttggggaggtttccgcaggtctgctccccacccctgcctcggaagaataaagagaatgtagttccctactcaggctttcgtagtgattagcttactaaggaactgaaaatgggccccttgtacaagctgagctgccccggagggagggaggagttccctgggcttctggcacctgtttctaggcctaaccattagtacttactgtgcagggaaccaaaccaaggtctgagaaatgcggacaccccgagcgagcaccccaaagtgcacaaagctgagtaaaaagctgcccccttcaaacagaactagactcagttttcaattccatcctaaaactccttttaaccaagcttagcttctcaaaggcctaaccaagccttggcaccgccagatcctttctgtaggctaattcctcttgcccaacggcatatggagtgtccttattgctaaaaaggattccgtctccttcaaagaagttttatttttggtccagagtacttgttttcccgatgtgtccagccagctccgcagcagcttttcaaaatgcactatgcctgattgctgatcgtgttttaactttttcttttcctgtttttattttggtattaagtcgttgcctttatttgtaaagctgttataaatatatattatataaatatattaaaaaggaaaatgtttcagatgtttatttgtataattacttgattcacacagtgagaaaaaatgaatgtattcctgtttttgaagagaagaataattttttttttctctagggagaggtacagtgtttatattttggagccttcctgaaggtgtaaaattgtaaatatttttatctatgagtaaatgttaagtagttgttttaaaatacttaataaaataattcttttcc

SEQ ID NO: 13214 - DNA, 3063 bp, Homo sapiens
acattcttttgctgttttttttttttaacctggagttctgtggggtggcccccaagccccgggaattactgcatcttttctgtgtattatacttaaaagcgccttgagggcaaacaggggttattcctttttttttttttttttttttgccttcctggcaatttgcatgcaacacctgattgattgtgtgggcaacacataaaaggtggcaccagccgtcctatacacaacttaatttttaaatcagaaaacgcttcagtctctgataattcctcatattctcttgaagttcgggtaatggagtatggtaatgcagatgcagaaaagcagcagaggtcaggcatagtgtgtgccttgaattagctgccttttaaatattgtctctgtttgatgtttagttttttaactttaatgtcttcacttttcccctctatctttagatatcacacttcagtggcttattcagcattcaaaatctagaagaagctgaagcatctcctgaagtcttccagtccttcttggctataatcctagaattattgtccgttcctctgaagtaattcccagaatacggtccttcctaaaccccagaaattgcctttttcagagtttatttctcatgtgcactgctgaagatgaatatccctaatccttcataaagaatcagctagagttgtcatgataaagtcagcacacacaaaaaggcttcttacacatacctgtcttaaaccatgtgtagagctttaaaaacagaaaaaaaaccccatatacttatgaccatcttaaatcaagaaaattgcatatttccattctggtctttctgggccagatttttatattggttttcagtaaatgtctatctataatatttcattatagagtccagtagcttaatactgacactgacttgatacagcatgaagtttctagtgccacacacagtatttagaaaacctttaggcgtgaatgactcatgtgggatatatgtaaacataatgtttattttatctcacaaatgcatgtgaaatgtataattacatcttaggaatccaaaatggtctgcagagagtgagcggaggcaccagatcaatgttggttctttgcactggtgagattctgcctgatgaatattaaagatatcctgctttctgagaactctatcaccagatggcagttgggatatgggaggaactaaagcatcctgttttgtatctgtccagatcattatttctgtctcttgttttttcttcctggttcaggatacttttttaaggggttgagaattgaagattttccaaaagcgttcatgaatttagagcattccacccaatataataaaacctgttaagaatgtcagtctttgttcaaacatctgtttgttctatctccagtcattaaatcagtgctgctgcatgacactcttaactcctgactttttatatccagtcataaagttgactttcagcacaaaagatacttataaacaaataaaaaatttttatttttctctcttactgatgtaagctttggcactcttttgactggtgccattagacatcttgattattgtgacaactctagacctgcctgctttatctaatgtaatcatgctcaatgtctacaggttgtttaataatcagtcacacagagaactgaggaactgatgctgtttgtttgcttctatgatacagagatgtctaaaaacttcaaatggacatgttttgtagtttagcgacttccgtatacataaagggacatattaatactggttcatttgtaaattattattcatatagaccactgtagtagataaaactctatggtacacctgcttatgtgttgcctcacactgtgtgtgattttgtttcttttgttaagcagcacttatgtagactgcatttccaaatgtgttgagcactcagagtgtagtcaacagtaagttcttttaatgaatatcagttttaatttatagactgccatggccttaaaaatattctgtacaatatactgcactgtgttgcacagacactacttgcttttctccattcatatttttatgagtagaatctgggcttttaaatttctcttcttattctttgaagcatgttgcatactaccctggtgggatggatggttctgtaaatgaagggatatttaaacttgctactgttgttcaacaccattaatggtcagtgtgaaccattacaaagaatgtggcaacttgcttgtgcctaaaaggaggaattggaactagaatgtgtgactctgtggggactgcataggtttgttaattgacctatagctaaaccttaatgtgtttgtgtgtctatacattgctttccgcatttcaagacatccagacgctattaccaacattttcctgtgcattaacctctgcatgtgaaaacttttaacagttactgaactatgtaaatatgtgaatttttttatttaggtggatgcattttttgtctgtttactgctcttctcagctttattcaataaacttgcattttaagggttgtattggcaattttaacttaaaatgtgcatcatgatggaaggtgcagacttttttggaagtttccgagaggagggtctatagaccatttgtcagaaatcagatcagccctcaaagaatggggtctgtgggctagttaaaatagaaataaacttttaaaatatccacagaattgatattgtgattttttgggggcgggggaaatgctactacttgtcaacggtcacaatacaccaaatttaggactttaagtggcaagtgctagtaaaacattttatgtcccagtttttacaaatcaaaccaagaccctgctaagcaaatgaagttgcaagacatgcctattcactgacttcagttcagaatggaaatattttaagtaccgaacatgctggttttcccacaaaggcacatttttagcataaagctttttgctagtttggtatcatctgcccataaaataagtcaatacttgagctattggaaaaataattgtgtatatttttatttgtttagaaaggttcagttagcattttctccatacg

SEQ ID NO: 13215 - DNA, 1129 bp, Homo sapiens
atttatttttgcttttcaaagccacaaactaaattgagcagtaatccccaagggtcttgctctgatgcatttctccaggcccatgctgtaggacattactagagaagagactctttgtaccaaaagaaccaagcttttctgctcaggtgaaatccagcataggcccatactatatactgaattctcttatgtggcagggctcttaaacccaaagctcaaagtgctttctgcagaatactgtgaaatcctgacatattacaatggctgcgttaggaactttgatcctgtggaaaatattatcttctgctagagtctaatgtagataattaaaggcagtctgtctgcagaggtttaaggaatgagttaggagaaaaaattaatgttaattccgtttaaatgaaactaccagcagctgctggagaggtagagatctgtcagtgagctttcttttcaccactgaatgtgctgcttgggtttgcaggcgggaagcctgcaatgaaggagaaggagaccctccactctatgtcaacgtgaacatgttcagtgggcagctgatgaacacctggattgactctctgcaggcctttttccctggactgcaggtattttgccatcagatttcctaagaataaccaatcaccagaaagggcttctccctccttttctttcttttttaataccctgagcattctctgtctcctttggatttgggaggtcactgacactatacgtcttcatctctctgtttgagaaattagtctccagaatattgaacagagccattccacacaagtgcaaaaccgtgcttgagaagtgactgtgtgtgatttttgtttttgtttgtttttgttttgagatgaagtcttcctctgttgctcaggctggagtgcagtggcgcaatcttggctcactgcaacctccgcctcctgggttcaagagattctcctgcctcagcctccagggtagctgggattacaggcgcctgccaccacatccggctaattttttgtacttttagtagagacggggtttcactgtgttgtccaggctggtctcgaactccaggccttaggtgatctgcccgcctcagcctctcaaagtgctgggattactggcatgaggcactgtg

SEQ ID NO: 13216 - DNA, 2484 bp, Homo sapiens
aaagagtattttcagtaataaacgtgccatctctatctcttaaacatttattacaacaattgttttaaaatagaaaaaataaaatgcttctattttaccttttttcatttcagaagcattattctgtttattaacagtgtcccatctactgaatagaaaactttgagaataatatatatatatattttaaatgttttcactgactcattgaaaatgttaattacacacacatgcatgcatgcacacacgagcatacttgtacctttgtctctgggcaaacaggtgggactgttagtgacccatttgggaaaatagagcatctcagagaaggaggtgagttcttcctgcctgtgatttctcttggcgctcccctcctctcccgctctggcttctgtggcggcagtggtgggtaagcactccagtgttctcttaatgaggcactttgcctgtcactcgagcaagcctgggtgttccttcctcctcatgctcctggaatagggaatagggatctcatgcttgcaaactacacaatgctgcaggtgcttcccaggggccacaggctgtcaggaaacgtgttttatgttaagtcacaaacccacttgacttctgggtactggaattaataccagtgggtgagactgagggtgagtgagttagtacatattaatcctggttgttgagcttccagactaccccgtccaaagtttgatgctatgtagtcagtggtttgtggggctggatgccagaaggttctttgagccagtttcaaaggttacttgttttttttttttttttttaaagtcagaatgttaacagctgtgatatatcctgcagggcttttgcagtttcttctgttctgtgttctgaaatactgggtagagaatggctgaggaggagattaccagagaagttgctttgctcagtgctttgccccaggattgcctcaaatctgagtggacttcatcctttgcggcggctctgagcctggcccatcttcctattcccacgtgtagctagtgtctagtgtcagctttgctcagtgtggtggaaacattttgcagaactgttgtagaaagctgccttatagttggcttgacaaagcataattctctcataacaaactttcaaatcattacagtagcttagctactttagttgatgtgaccgaggaatcccttctagaatcataggtggcaagggagggtttgctagctctccatttgcactggccattgtgaaaaaccagcttctgtattcaaatctttccttcatttttttaaattttttttttggcagcgcttgtgctggaacttactcattgtaactgaatcctcagggcttttcttgttttagatcatggactgtgcacgtgacacttaaataattttctatgtatttaaagaaaaatgcaccaggatggtgtctgtgcacgtgactattagaggagcgtctgtagaagtacctggtttggtcagtgcagttgtgcaatctgagggccttgtttcctcctcccctttccccttctccccaccaaaggaaaatatccctcttaatgatttcgtagttcagtttactgaatgattaccacctgtaattcctctttggattgtgtagactcaacatgagacattcctttctgctttctggagggcaccaggggcctttctctttgataaattttttttgtctgttgacaaaaacaaaaatcttttttcaaatgtagtgctggtgaaaaggtagggctgagtgattaccttagccacagggtggctgagcaggaactttagaagaaaatcctgagctttcctgtccattcccagcatccagctcctattctagtgcctcttccctgcagggcagggaccccttgggaaatcgaggaggtgggacgggctgggccctgtgtcccaggtttcacagggctcagggttatgctcccgcttgaatctggacgtgaatctggtaaaaatatcaagtacctgtggaactccctgattctataccctcttccttctttctgcaaggcagaggaataatatttttaaaggttattttgttttagttttaaatagcaaaacacaagctgcatttttatttattttgcataagaaaggtaaatctttttacaaaaaaaagtatagagttggaaactctgggaaaacttacggaaatacacaaatgcttctctgtaatgtgcaatatgctttgcaactgtagatgatattttatgtttaatctgtaaataagaaatgtatttaaattaaaagggatctttttgtaaaaggaccaaatgttcttttataaatgtaataaggaatatcttgctctttaaaatttattaggatttttatgagtaatttttattaaaagatttctttttttgagttgtcatcttgtttcttttttacattctcatgtacattacattacatgcaagacaaatgggagaaaagtctctaaaggaagtgcccatctagatgaata

SEQ ID NO: 13217 - DNA, 1119 bp, Homo sapiens
ttgaaaatctgaaattggaaatactctgaaattggaaactttttgagtgctgatatgacactcaaaccctcactggagcattttggatttcagattttttggattagggatgcttaactggtaagtatgatgcaaatattccaaaatgcaaaatctgaaacacttctggtcccaagcattttagataagggatactcaacttgtatttaagatctctgaggagaatggctaagaaatacttttatagtgtttcacacccagtctttggatagcagctggatacattttctggcaagattctagagctgctcttactctagtgctttccaaagaagccagctggcttggtgtcaaatgaatagacagcaaggctgacatgctattgtaaatgtcttttcttgaatggggttcaggtaggcagcaagcagggagttttttttggtccccataatataactttggaattacaagcacacaattgaaaccccaggattccacatgatgtttatttccatttgggtcacataagaactgcatcacagtcttaaaagaattgtatcatatcttttatgtaatagctgattttgagcagccctgactctcatgcctaataagtcttcactgcaaaatgcactttctagggaacattattgaatgagctattttaatataactatttgaattttaaagagtatctactgaaaacattttggcaacataaatattgaatttctgaaagcatgacatctacatagaatcatttgttttctatttgcaatacgtggtattgtgttacttaggttaaaaacctaaagaagggggtggggctaagagaacctatggtggcacaatgtaaggcccaaatctgattgtcaagagactgaccttacccactttgtcacagttttgtagaaatacaggcttcatggaagcatatttgtctaaatgtatttggggaccattgctgatttctatccagaaagggaaaatagttgaacaaatgctaaaagtcataacctggtcaggggctggtttttgttttttttctagcaaagtaaaagaatatcgtagtgatgaactgtgggatagttctgttttaaaccagctaagctcgtcctt

SEQ ID NO: 13218 - DNA, 1231 bp, Homo sapiens
agtgtaatgacctccttgagcacatttttgttaagcatctaattgccataaagctgagccaggtagagaacctgctataatcaggtgaaatgaattaaaactcactaagaagttcctgtttatggaattgcttaagtcattggtacttttatgtagcttgaattttagcccactagaatttctagcatgctttaaagaggtggaaaattgaataggtctatgtaagtgtgattctaagtgaagtcctcacagcatattccacaagcgttacatatatgtcttctaagtgtgcctctttaggtctgacctctttttgagacccaagtctctcacttctggtgccacctaggcccctgtgtctgaatgtcttaccagcacctcagatacatcatgtcagacactcaactttatccacaaacttgatttttctctcccctttttaatctaatggttctactattttcccggtcacccaggtgttgaatcagaatttatttgccattttacatgaaaagcatttgataattcacaataatcatcaggtatcttccccccttttcagttctgttcacaaaaggaagccgctgcccaaaactgtatataatttgctctctgatcgtgatttaaagaaaaagctaaaagagcatggattatctattcaaggaaataaacaacagctcattaaaaggcaccaagaatttgtacacatgtacaatgcccaatgcgatgctttgcatcctaaatcaggtaaagtaataaaacagtgagttatgcttactttctggataaagcaattttgtgtagctcagaaattataaaccatagaaaaatattgtaaataaatacatttttgatagataagacgtgcaaatgtgttccttcaaaaggtacctagagtatgctatgataagccagccttcctctcagcctgccttccaatccccagatcccttctcagaggcaccccattgccagtttctcatgtgcctatctagggagaatgtggtggggaagagtggatctggagagcctgggttacagtgcccgtttttcagctttgtggcttggtgactgtgggcacgttacttgatatctctgtacctcagttttctccttcataaaataagggttataataactacccacttcataatgttgagtgaaataaatgataaaaggcatgaaaagtgcctaacacagtaccttagcaagtagttagctttcagtaaat

SEQ ID NO: 13219 - DNA, 3371 bp, Homo sapiens
acaatgcgtttgtgattatcattagtaaggtaagtcttagatcagagccctccagcccttctttttgaaacctcccaatggcatttcagaagtgagcagtggaattttcctgccatcctaataagagccctggattccatcattaacatttcagcccattggatgaagtggtgccctctcctctggtcccccgcgaaaaggtaaatacacccaaagggagggacctagttaagtcactggcacctagataagttaggagggtaaagccactacctcgtctgaaggactggacttgacaccccacagtggaagggagcatcaggagaggaacaaaaaaagggatctcagggagaggccagtgtcaaacttgacctcccttgtttggcctagaatgaacccttctctttagctcctggatatgaaaggccatctgcttggagcacagaaagatattgccattttacagcttaagagagtaaggccttgggctgtgctgtgacctgcccaagatttgacactggctaggagcagaggctgcgtcaggctcttaaagtcatgtgtttgcatgctggatgctatactgtccagccaggacacaagacttctgatttctaccctcaagatactcccagatcctaaatccagtagcctcccaggcaaaatatagcaatctgccacaactgccagatgaaaagcaacaatcagagtagaaaaatctgttgcctgatatacataacaccaatcagaccgtgtggatttttctctgaattgactgattttgtttttttcttactgaaaatggacctgcctttcactgaattttctgagggcagagtcttagctgttttctttaagcaccttttttttttttttccattgggaaatggctgatgagttcacatttagggatgtacacacacagatggcagacgtctccccactcatccagccccagatctgagccttgacgcaggccaagtggaaaaatactttcccgcccccctcccctgttcccacttcctcatctggcactatgcatgtctcactcaccctccacagcactcagtcccatcgacgttcactgaacattggctttctctttctgactcctgcctgttttagtccactatatattgctgtatttgcttaaatgctggaaagtaactgttaaaatgtgaaattgtaatttttaaaaaggctacaattaaattttagccaatgccactcaccaaatctttgcacctagtagatagatcaatgtaaaaacaaatacctaactgtacagtgagtgtgggggaaatgtagtaacctagttagtagtcttcaatataaccaattgtacaaggggaagtggtgtttacctacttgttcatcaccattattgaaagccgtactgatcagttagttgacaacgggcatttttttttctttgcttcatggaatgatttcttttcttaaccttcgacttatcctgaggtcaagccttttgtctttatgtgtaaccgacgttcagtctattctaggaatgaaccagcaagttgttcatttaaaactgaccaaagacaattaattcctggtctagtttcctgggccttgtggctcagctgccactaaagagctttttggataaaattgagaacaagctgtgcttcctaccccactctccccgtccccttttattcccttttcctcttaaagagctgctctgagctgtgggattctatgaaaaattcttgcctttccttgtttcagtgctaacgatttctcacctcgaagcgccttttgaaccccggacagagtgcacaatcggagggaattgcgagcttgggaattagactttggagtcttttctctgaagtcaccaggccaggggtcaggagagagatggattcccaagggatgaaaggtttctattcaatgaagaaatcggagtgggaagagacacagggaaattgagccatattttggctatcggctggaaccagcagttcagagatctgccttataaacatttaaaaccggtttgtggtacacaaagaggaaccagtgtgggaaggggcctttatgtggggctttcttctctgttggagtcccttggagtgccttgttgggtatatttctctgtcattcaggaggcacgaatgtggaggacttctcgtgacctggtcgtgatgtggcattcagtgcatgtccacagctaatggaaaaacacgaggactcgggtaatggttcttcctctcagtctttctattcctaacttttcacacatccagatggttccacactagtgcaaatgcctcactctcctgagaaacccagaaagaagagtggctggctcacaaccatggggttagcccctgctgggctgggagtcggggtggcggccaggaggaaaggcagaaaggggtgagccgaggtgttgcctagctgattttctgctgtgcagagctaatgctgacatttcatgtcaacttccccggttctctggggtctcctctcctctgagcagccacatagaacattccccacatatccaaagctgcccaggggagccgagagaagggactttgctgtcaggtccaagccctcctgacctccctgagattgatctgccagtgtcctgctgtccctctgggactggccacatggccatcgctgccccttgttgacacctcctttctgtgtgagttgtccccggccaataacaaagctgttccttgaaccagaacaaccagagtgcacttttccttccttagacggaagtagatcctggctagggtttctgcccaggcccttgttcccggcagtgtgactgtttacatggtttggcaataggtttgattctgattgcttcagagtggctggtctattttgtttcctttggtttccttcctccccaaattgtgacaggaaaaacagaccaaaaccaccctaggaaattgctggttgcctgtccccacgtgatgataaatgttgccctcttctggatatcgtttctctaccttacgaccaaacgcccgtcctatagagtgtctgattggatcctctgtcgcgtattctgatggtgcctgctggtttgacgtggagctatcctgtgaaataaaacagcttaacttttctcaaacatgctccagtggtttttgaaagggcgaggtggcacatcaggggtggagaggtcctggggggagtccccatcctccagtccacactgtctgcctgcttcccccaggaaacacctttgaaatgtccattagctcagatccaacaagatgaaggtaaggttacaaggaggaccacttccattgtagagctaactgaagaaggtaactaactgtaggatgactgctggggaaagagggtttggaaatgtc

SEQ ID NO: 13220 - DNA, 1342 bp, Homo sapiens
ccggccgtgacgcccaccgagaagatgttccccaacagctcagcggacaagtcgggcaccatgtgacctgcaggatgggccgcgccgccgtggcccgctgtggctcaccacggcccagggtggccttggtggcttccacgtgcttcccagtgaccctggccttggagggcagaggtccgtctgggagggtgtgtctgtgcagagctgaggcccgggcgctggctgcagctcacgtccagccatgggaatcccacggacctctcgcgtgtcaacagacgaccagaggagtgctggagctccagcagccccaaccacagcattccctaacatggaggcaaaataccacatggcttctcccgcatatcgtcactggaaacttcctctctcgacattctctctacatacgtatatgtgtgtgtatatcgatgtgtgcatatatacacatgtatacgtatgtacgtgtctgtaggtgtgtgtatatatatatatatttatgcatctatatacatatactagatctggacacacgcatactaagtgtatatagtatctcctttttctttttatgaaacttagatttacctcagatccatgccaccaaacatctcccaccgagttatttggtgggatttgcagggacttttctgggagaacttaaaggcccatagtaactgcgaatgaagcaatataccactaacctgcagaaaaacacaaacaaaaacagactcccactgtctccagaagtcgtggccttccagaacagtctgcccctcaaggaagggtggggcaggcagtacccccaagcaggctgctcccagaggtggggaacccttcataggaaatccccacccccgtccaccccagagaccctgcccttccacccggaggccaaaggccaactgtactcccaaaggcatgggagaaggttggcgagaagacccctgactaccacatccttgtgtttgtgtgtagagacgggggatagtgagaacctaagccccatcgtagcacagtattacatgtggttgggaaaaataaaaatacagtggtgtggaatactccaaaacctagaaatgctgtaggaataaatctgtggtaactatagaggtttaacttatatcattttcaaactatttaattttttcttttcctggttctactaattatactgtgtcagatttggaactaaacaggcaaggaggctttgagtcacatcgttttcattttaaatcaggctgtgatgcactgtggctggtgccgtcttgcatgaaacgcatgagccgtgagcgcccagttcagactggggccagggaggggcagtccttggcactttctgtcctag

SEQ ID NO: 13221 - DNA, 1095 bp, Homo sapiens
acggataccaactgtccataagcaaagtagaggtttatttgtttgattatagtggtgagaaatgaatgaatttctttctctgtcctttacaggaagaagttctaaaggattttgaagacttggctggaaaactcccatggtcaaaccccttaaaagtgtggaaaattaatgccagttttaaaaagaaaaaagcaaagcgcaaaaagataaatcagaattcaagtaaagagaagattaataatggacaagaagtcaaaatcgatcagagaaatgttaaaaaagagttcactagccatgctttagattctcatatcttagattattatgaaaatccagccatcaaagaggatgtatcaacattaataggtgatgatttggcatcttgcaaagatgagactgatgaaagctcaaaagaagaaactgagcctcaagtgctgaagtttagagtcacatgcaacagggcaggagagaaacattgctttacctcaaatgaggctgcaagagattttgggggtgctgttcaagattattttaagtggaaggccgacatgaccaactttgatgtggaggtaggtataggctctgactgtggtgattgaagaatgctgtcacagatttgtagaatttccagactaacccaatgttatgcacaattaaactgaggaaatagtagggtgtggttaagaagagcataggctatggagacagatttagatccaaattttaactccacaactgtataactttggactagatagtctctgagcctctgtttcaaatggagccaataatattatgtacctttaaggttatcctgaaggataaatgaggtacatttaaaatatttggtgcaataccttgcatacactaagtgctccatagatggaagccatcaaggttgagttgtctgttttctttttctttttcgagacagagtcttgctctgtcacccaggctagagtgcagtggtacgatctcagctcactgcagcctccaccttcctggttcaagtgattcttgtgctcagcctcccaagtagctggggctacaggcacatgccaccacacctggctaatttttgtattttttaataga

SEQ ID NO: 13222 - DNA, 1157 bp, Homo sapiens
ctctccccgatcccccactccctacccccgttctcgcggccttgtgacagacaactctgatcgctctgggggccgcgatctcccctccgtaatcttcctggacgccttccctctcgttttctggcttcccacctcagatggctgcttcccaaaggcattaccttcgccacccccaccacacgttctctggctccccgtggcgtgtgccacagcgtgtctgagatagcctcgttgaatgtgtagggttcgagcctggagttgagccagattgtgtcgttttacttgccttgggcgtggagaacgatcttgtgagaatatcttcaaaggcagaaaaatattccctttatgaattctctttccctctgcgtgtaagtcgggaatgtgaagaggagtgtaggaaagagccctggttcaagtaggtaaatcgcatgagagggaaagttaaactgttgggaaagccccttctatgctaattgattctatagagtccttgcttgtctcacttcttgggcgtcagtggtctttctcttggatatggatgctgcagtcagctctgctggtctgggtcaggggtgcgtgtatgacctgcattttctgctttctcatgttacttgtgcaatgtattcaccggtaactcatttctttcccagacctctgggttccactgggctttgtctatatttaagttcatttctccagtttccttcctgcacataggtactgaacgaatccccaagttctgtgctaattaccttcatcagttgactaaacaagtttttagatgacatatttgtgaccaaggtcatatttacatttctttgttggacagatgttacatagctatacttgtgattggggaggatccagctgagtggagtgtgctgagctttttaggagagtgtgtactccctatttgaaattattttttggttgttaattttatattattaatgtttttaggtcacagaaagttctaagtggtaattttagatgtgtgggatctgagctaggactaaagcagagaatacccacgtaatcagaggtttctgggctccatagaggacgtagggcttttttttttctattggatttcttccagttttctcaggatcattagttctcttctgtagccaaaaattctggcctgttatgggatt

SEQ ID NO: 13223 - DNA, 1147 bp, Homo sapiens
gtattttagtagagacggagtttcaccatgttggccacgacggtctcaatctcccgacctcatgatcttcccacctcagcctcccaaagtactgggattacaggcgtgagccactgcacccatcctgtttttctttcatattaaagtttcaaaataactgaccctttttgaaaagtttatgtttgaccttgcctttatttacaactattccccacatttaaaatgaaatattttatttttaatcttctgttttccaagttatatgtgtcatcttactggtagttaaatgaatttctgtaaatttccattaaaaatacttttataaaagctatccactcgtcctcatttgaagcttccttctacaccagtactatctctttctagaccagggaagatagaaaggtagaagccatcatgcatgcttttgaaaacttagagaaaagaaagaagcggcgggatcagcccttggaacagagcaactctgatgtagagattactacaaccacctcagagactcctgttggtgaagagacaaaaactgaagcccctgaatctgaagttagcaactctgtttcaaatgttaccatcccaagcaccccacagagtgttggtgtgaatacccggaggtcttcccaagcaggggtaagagttgaaaagacttcagcacttagacatcctcacctttgctaatgtcaatacctaacttttggaatttttaaaatcagtgttttcagctttgctccatatcacaataaataaggccattaactgtttaactggaaccatttcattggcctattttataaatgcttattagaaataacgcaaacatttgtcgctagcctctttagctcatttaagtgtatacatttttgtatttaaaaattagattttaaattagtgtttctaatccttatatttttcatcagtagacattctgaatgcttaaagtgaataggaaattagactgtttgctgataaaacatttctggtaagcatctgaccctactattgctacaggatattgctgcagaaaaactagtccccaagccacctccagcaaagccttctaggccccggccgaagagtcgaatttctcggtacaggaccagttcagcccaaagactaaagcgtcagaagcaggcca

SEQ ID NO: 13224 - DNA, 1143 bp, Homo sapiens
gggtctgacccaactgtggtgtcaattactggatcccatgtcaaccgtgctgcatctaaataccccaaaaccaaaaaggtaagtcacaaatgcatcctttataagtccagtctggcaagggctgtcttagtgaaatgagaggacctataatccctagaagaaactaatctcaatattactagattgaaagttctaaaatgctttgacacaaaaggctggagtcatcctgctacctgtttccttatttttagtcagcttaaatcactgatagctgaaattattcctctcttagtgggcgtggagagggtgaaggaagatatccttgtgttctagttgctcaattcattcttactgcagctgctgcatctcctcctgtcctagtttctagatgacgtttgtctttatgaactacactgctacctcttgatttataaactaatgatctcttttttaccttagtatctagttacagaatggttgaatgacaaagcagagaagcaagagtgccctgttgagtgccctttacgtatcacaacggatccaactgtactggcaacgaccctaaacatgttaccaggtcttatccattccccgttaatttgcaccacccccaaacactacattcgctttggctcaccctttatccctgagagacgtcgaaggccccttctgcctgatggcacattcagctcctgtaagaaggtatgtctgtgtttttgtgtgtgtgttgtgtttatgtgtgtgtgctttatttttttaagcctaagattcctatcatcatgacataaataaaatgttctctagatagccactctgcccatgtgagtttataatgagttagttgttcagccataaatactgattcatcaagagtctgtgagactgtggtggaatgaatgtactgcatttttagtgctcagatttgtgactggtcactgatgtctcttctgagaacccttgaggttcctgagtgagagcacacagcagtggatgactgggtagagacggatatgttttgtgtgtgctcttgtgatatgggttaacatgtccatttatgattattgtgtgagattaggccctgggtcctctagaacactgttgcataaatgaaaaaaattaaattgttttgaatcaattcaaccg

SEQ ID NO: 13225 - DNA, 1131 bp, Homo sapiens
ttaatcctcatccaaaatcttccaatgaatcttttttattacctcttcacacgtctctagcacggggcagacaacttttaagagatctttatcttccttctaggcgcttattttatatattagttttattctatacgatcacagtctctcctaaataaatgttaagatttcttcctcagtcttgccattttacaccatcccaaatggtatgaaaagttgaatagcagtcattttttattggtttttgtcttttgatgggatctcattatatgtaatccagatttcctcaagtttttcagttaaaaggaattgataggacaatgttccaatatgctgagacacaagacaataaaatgcttgactgtgtaactgaattagtgtgttgaattgtatcactcaccagttgatgtacatttaaaacaggtgcactaaatagttttagataattattgataattctctggttcttttcaattatagcgctggataaaacaagccttagaagaagggatgactcaaacatcatctgtaccccaagagactagaactcagcacctataccaaagcaatgagaatagtagctcttctagtatctgcaaagacaatgcaggtacgtatctaaaacctttctgattatatgaccaatgattgtttcaggtctgcataaaaaatttaagtatgagtatttctgatacaaaaagaaatggcgtgttttctaaatagttactttacatctgtctttacagaggaagagagagatctcaagtcagggatcagttttcccaggacgacaaagaaggactagacagtgtacagataacagcagaaatggttataaaaaaggttagatacatttaaagtagtaagtttaggaaatttatattcatatttataagatggggcaagggcaagaaagtggtggaacactaatattcaggaaagaattaaaattctgagtgattaagttgggtgggacatggttgagggagcaggggatgaatgaaataagtgaaaaattattatcaattgattgttttcaaaggggcttgtataattagcatacaatttttaaaagaacagccgggcgctgtggctcgcacctgtaatcccagcactttgggaagccaaggt

SEQ ID NO: 13226 - DNA, 1120 bp, Homo sapiens
aagcaattttggaaaggccaggattctttagtactctggcccatgtacactgttgctacgtgggacttttacagaatataatggctttatctgctctacttccgtccctcttatctttccctgttcacctgtgtccctctcccctcctttctgccctttgactttttcctttctcccctaccccatgtctccgttgatttttattctttcagctttgtcaccgaaaagacctggatttggcaaaagtaggataccttgactccaacactaacagctgtgctgatagaccttccctactcaactcaggtcattctgacctggctcctcatccctccctcggacccacttctgagactggtttcccaagcagaagtggagatggacatcagaccctcgtgagaaactcagaccaggcatttcggacagagttcaacttgatgtatgcctactcccctttgaatgctatgcctcgagcagatggactgtatcgaggatctcctctagtgggggataggaagcctttacatttggatgggggatattgttcccctgcagaaggattttccagcagatatgaacatggcttaatgaaagacctctctcgtggatccttgtcacctggtggtgaaagggcctgtgaaggagtcccatctgccccccagaacccaccacagaggaaaaaagtaagtgtttcatgttatatcggcgaacttttcaagaatgttaaccaagtagtttagtagatattcataagtttctgctatgtgttccgcactactctcagacaagtgagacatagtctctgccaaatccagtgaaagacaggctgttttagtacaacttggtgaatgttgtaaatattcagcaaatgtaaatgcctgtatgtgccatatacttgctaggcaattgagaggttagaacagtgaaaaagaaattttacctattatttagtgtgtcccaagttcgaggcactgtattaagctctttaaatgtgttttatcctcacagtaagcctataagataggcaattttctattttgcacatgaggaaactaaggcaagttgagtaactttcccgtggtcacacagctagtaaatggaaggaccaggatactaccca

SEQ ID NO: 13227 - DNA, 2253 bp, Homo sapiens
gtctaccaggcctccagggtatctgcggtttccaattcacagcactacccacaccgtgggagtgggggtgtgcaccagtaccgactccagccactgcaagggtcaggagtcaagactcagacgggactttcctagggcttctggatttgggcaaacagaactgaatgagcccatagctgcttccttccagctgcctctggaacctaggccgagcatattgctgaggaacggggggtacaaggtgccagaggattgggtctggtggacaagaaacaagacttgtggtcacaattggcctctggccttggagaaagctgtaaatcttgtctgaagcagagactataaagaagtttctccctgctgtcaagggtacattgttgacaagcaaatggtgtttcggttagtaacggttctaagtgcaatgagttgtgttgaagcctccgtctcccatccttgcctgtagcccgtagtcacttgtgcagtgaggacatctttttaaatttaaaaaaaaaaaaaaaaaaagttttcaaaggaaaaaaagttaaaagagccaatctcaaagccccaagccatctgagtactgttagggttttatgcacttaagaaaaaaggtaggtatgtaaatgttcatcctaagacaaccattccaaaagcaggtatctggccaatgtgtgtccaccaagaatactgtttatctttgtcttaagatcaccaagaaataggcaaggatagtaaagcttggaacctgcaccaactggagggtgcctggctctttgaagaaaagctcatggtcagctcttgattattcgggagcagattatttgagtagattgtctgagcctccaactgttaccatcctactcccccttcccaagctatttcacagctcagtaacccatgaagtaagtagacaagaaaaggaggaatgagacatgatataggccaattgcattgctacttaccagcttttggcaataaatttcattaggaaggataccgagtggtttgggaatgcttcgaattttattttttctactcccaattaatcaggagttgatgatcccatgagcaggaccgcctccatgattggggagcatgcacttgtgactgcagggtaagagtgggaagataggtttgtggagtggcaccgacaggactgtgattgtgtgtgggcctgccccacatttctctgggggatgcttatgtgagagtgggcccagtgaaagagttaccaagccacccacacccctaacactgttctggatgagagatgagagcagaccggcttctccccatcagtgcattgtgcctgttgtacacccctggaggagccctggagccagcccaggtggggtacacaatctttttaaattccatatggttgccagcttatttctttcacttgtttactgtaatatctggcgtgtttttatttatctaattttgtattcagttataaccatggtaggggtagtgaatatatgacaggtgtaatccctggtgctgcagtggaccttcttttcttttggacaagataatactgtgagtttccctccttccttccctctaatttgttttccttttttccccagcctcttgcatccccttcttttctaccctgtcctacaactatcatatgcacagtcttctctctttgtgtgtgactgttacaaaatttcacttttcaaaatcgaaatcaggtgtttgctcaaatgaggggagattttttttttttttttttttttaaatgctgagacctcagcagagtacttttctttttgttgtttcccccacaaacccatcagtctgggagagcattgggagtggaaatcatgttgcctgggatgctggtttctttgtatattatataaaacgtatgtaaatgtctctccatttgggctggggtttgcattctccccttggctatttaaccaaggggagaggccagcgggcaggcggccctcaccctgcctggcacgtgcagagaccccagccactctgtgtgggcagggtgctgtcaagaccagacctcttgggggggtaggggcgggggggtggggggaactcttggaagggaagaagtatcacttctttctcaagtggagtgtttacaccttgctgtaacatttgaactttcacaagagatgtaataattttgataataaaattcttaaccataataatcataaagttgagaacttctttgtccaattttgtggccctgccttgcctggttttcctaatgccattttt

SEQ ID NO: 13228 - DNA, 1161 bp, Homo sapiens
tacaaagccagacgcctgccactcacccctttctgggactaggctggagaagagccatggggaggccactggggaagacagaagctggtggggcctggctccctccaccaggccaagctggtggtacttcctgctcatcggcccatgtctggttctctcctgggcatcctctcctgcggttcctgagtagatgacagcgggctgctggtacactgtatctcaggctgggatcggacccccctcttcatctccctcctgcgcctttccttgtgggctgtgagtatgaatcggcccctaccaagctctgctctttgggtgtgttaggattgtctccagacagagggtggagcaggggatgccatcgctcagagcagatgtgtttaaccctgtccttccgggtgttcttcagcctgcgttgtcactgggtctggttatggttcagctcctggggatgagaagagggctctgtcacatctcctgtggtctcttccaggatgggctcatccacacgtccctgaagcccactgagatcctctacctcactgtggcctatgactggttcctcttcgggtaagcctttgcaggagttgggttttggggccttagtaacagtttctatatgtgagttgtgtggtggctcccttgacaggggctggaggtaaggataattccacccctcgagaaggaccgaagctgctgatcaggccccacctgccacgctggtgccagtgacacagtctgtgtctggtgaccctgtcctcttggccttgtcatcttggtgctgctgactttgcctctctaccctccttttttcaggcacatgttggtagatcggctcagcaaaggggaggaggtgagtataccacctacgacttgtgggcacagctcagcactgaaagaggggcagtgggtagcctgtctgagttccacgtgttaggggcagctccttgccccaggtgtgcagggatgtggccccctgtcatctcctcctgaggcagcgtggcaggacaggcaccagcacagtagctctgtgttctgggcctcgcgggcctgtgctgtggagaggatacaagcccacacgtcggggtgagcagttacatgacagccttggctgcctgtgatcttccctctcacaggccacttgttctctctgctcagctc

SEQ ID NO: 13229 - DNA, 1169 bp, Homo sapiens
tgtgccaagcaagcactggggtaaatttagcacagcacaaaccagacaaagtgcctgccctcagggagctgactttctttctagtagggaagacagacaatcaacaagtaaataaatctacaaactgacgtcaggtgataaaaataaatactgtggagaaaaaccaagcaggaatagggagacggggtgatgccatttcagtagggaggtcagggaagggctcgctgtggaggtgatgaccgagtggtgagggagccagacattggaggtgtggggaaagagtggcataggcagaagcaatggcaagtgcaaaggccctgaggagggcaagatggcggcacatacaaggaacagaaaggataatgtagctagaacaggagtgagcaggcagggctggtagagtttataaagggggaactccttccatggctcctgcctgacccctgagactgccccagtgctccaccccggagccaacggcacccgaaagtggaaatgaggatgagtttctccctgcccaggctctgcggttaccctcccttctatgacgagaatgatgccaaactctttgaacagattttgaaggccgagtacgagtttgactctccttactgggacgacatctctgactctggtatttggggctttgcttttttcccctgggccctgcctctggttcctccctcacctgctttgggggcggtctccctcctgccttccttctgtcggattttccagcaccacacaaagagctgtcttcgagaccagacaccctaccccttcttccttctgcttgggtacttccttctgcttggctcccagagtgagaaactaggcattcatttgttcaatcttcaaacatagtctatttgaaaatacctctcccctattgacaccctaatgtctaaaacaccaccataaacattttcatcctccttttgtgccccctattaagaagcaaacctgtgaagctactatcgtttatcatcagtgtgaatgcactgagattagtcaagaacaacttttttttttttttctttcttttttgagacgcagtctcgctctgttgcccaggctggagtgcagtggcacaatctcggctcactgcaacctctgtctcccgggttcgagcaattctctgcctcagcctcccaagtagctgggattac

SEQ ID NO: 13230 - DNA, 1179 bp, Homo sapiens
atgttacctccaccaaagcactctttcagattccccagcagaaagttagtcagtctctcctttgtgctgccacaacactttgatctctctctttcacttcacttatctgatttcttaaaaatttatctgaaaaagagttcatacagacagcagtaaattcaagcaatacaaaaggtaattccctgtcacccgtgacctgaaggctcctaattctctcgagaggcaattgctgtgacctgagacaatctgtgtacgtattctgcaccttctatcttgggaattatttcagattggcttctgtgtgtgtgtcttagttctttttggacctgtctcccttactagagtgtgaagtacaggttttatcttcgttgtactttcttacctacacctgacactgggcttggccttggactagggacttgagagagatataagataggtaagtgaatgaatgaatgaagcatggctggccagtgcttacccactcagggttgggtgccatcttttccacagatcccacccctggggaagcactactcccagcgctgggcccaggaggacctgctggaggagcagaaggatggggcccgggcagcggctgtggctgacaagaagaaaggcctcatggggccactgaccgaactggacactaaaggtaggcctctcacctccctgccaaccccaggtcaggacttgaattccagaacttcagcccacctcccctcctttcctgtgcccgcttagatgtggatgccctgctgaagaagtctgaggcccagcatgaacagccggaagatggatgcccctttggtgccctgacgcagcgcctcctgcaggccctggtggaggtgagcagcctaacccaaaagaggaaccatatttactttgtgttttaatgtgttatgcttattttttatcggaatttatcatacatttattaggttggtgcaaaaataggttggtgcaaaagtaaaaacctggactaatatatagcaaaagattgggaataatatataacttgtgcacctaatagaaaagtgcacagatcataaatgtacagttttcacaaatgagcttgtattaccagcctggagattacaaaatgaaacattactatatcctagaagcccctctcatgcccctgtttttctccaactttccccaaaggtagccttactc

SEQ ID NO: 13231 - DNA, 1738 bp, Homo sapiens
aacctcagttcaccaggcaggacgctggcagggctttctagcagcctccatgccagggcacaagggagctgtggagaagctctcatggctcttaatttttctgccttatctagtgctaggcttagggccggtgcccataggtcacttctgaaagctggctgaattagagcatgaccacaaggtgtcctgggacccaactctgcccctcacagatatgagcacagtggcagctctcaggttcatgcacctccttagagcagtgccaccaggatgcaataataaccaccatgcactgcctcttggttctcttgacagttttaaaccatctggctggatctcgtggccttccccctcagactacccatgtctccacgaaggcgtcctggagtcactccccgagcagcgcggcggcggcagggagttgggttggggtgggcatttgatgcgggaggtgggtggtgtgcttgctagctgggcaagaaagcagcagtggacctgccccaaggccacacgtgcctggtcaggctggcttctgatgttcagtcccctgggccgggacagattttttttaacgtcttgaaacttaaactctgtgcttgtaggatactgtaacctttttgtctttttttttttttttttttttaaacctccacctccagtggctgtgactggtcccagtgattatacgttattggttgctgtgggtctgggcgggcctggagccagaaggcgacttattttttctctcctatgccaccccaggtggggagggagggaggtttcagactccagtttctcccttgcccttttattcccaagcctccttggccccagtataagtgttgggaactctctgccagcttcctgagttctgcctaaagatggccccccagcactggttggggacaagggccaaattggtgaccaccagtcatgcctaggacctggggcccaaaagccgggcaacctctggctacaggggccattgggtgccctcccagttgagaggggccgctgtttcgccttgtccgtcagtgccagtgcctgtgccagaggtggcgaggtgagtcctccagagcttcctggccgggccctcctcctgcctgttctggctcctctgctcccacgctagctgtcccttttctgattctggtggatcctccctcccctaattaaagtctctttttgcccctttggggctgcatgaggtctatgctgtgtgtgtgtgtgaaaggaggggaggtggggcttcttttccctgagaccagatggctggtaattgtgcctggagctccccactgggtgcagtctcatgattggtcctgccattattcctgccaggggtcccaacccagagactccattcattgcagtccaggcaccattaatttctgaaactgctctgtctgcctatacagagctttggtgcttttcacataaggaacttacttgggctaaaaagtaacctcagagaaacagtgctcccatttggtggataaggaaactgaggttccaaacatgagatgtaatagcttgccccaaatctagccagtgagcaagagagtagacttttgcctgtgccaaaacagtaatcaccatccacaagtggctatttaaattttaattattacaattaaataaagtttaaaatccagttccccagtcccactggcaacttaacagctaccagtgactgtaccatatataacagcatatatagacatacagcatatacaac

SEQ ID NO: 13232 - DNA, 1186 bp, Homo sapiens
cccgccctggtgacactcttactgaggacatttgctttagaattgaggccccttgaaagaaaggtgaatagtagatttcaggctatacagtataaatacagtcattagttgggggaggagggcagtgagcagagtggtccctgcagatgatcccacagcccttggcctggattctgagccctgcaccgccagccttcctcacccctctcctcacagggctctgtggtatatgactgcttcgaggctgccctagggagtgaggtacgaatctggtcctatactcagcccaggtacgagaaggaactcaaccacacacagcagctgcctggtaagtggacccccaagtcctggccccctagcctctgtcccctctggccattccccctcctgatttcaccctcttctagctccatccactctccggcaggggtctgagctgctatcctccccagagtcagtccctcggaccttctctctctgggtgatatggctttccagcccctggggaaggttctttgagcattggatagatgtgggtggtatgtaggggatggggagccattcctaatgcccccctgggagccaaattgcccccacttctttccttggcccccagccccactggaggctcttctgtgatctctcctcagactgcagggggctcgaagtctggaacagcatcccgagctgctggggtaggggctagggccagtgggccgggggtagggaggggcagggtctggagtataagaaacccttggagtccacttcagatatgggctaccacatctcagaagctcacagaacatattcattcattcattcattcattcatttgttcataacacattaattgcagtatctgtgctaagcactggaaatagaaagatgaatcttgggtcaggctcagtggctcatgcctgtaatcccagaactttgggaggccgaggtagaaggatcacttgagctcaaaagttcaagacgagcctgggcaacatggcaaatccccgtctctaccaaaaatacaaaaattaacaggacatggtggtgtgcatttgtggtcccagctactcaggaggctgaggcaggagaatcacttgagcctgggaggcaggggctacagtaagctgagactgcaccattgcacaccagcctgggtgacagagcaagactccgtctcaaaaaa

SEQ ID NO: 13233 - DNA, 2220 bp, Homo sapiens
ggtggcaggaagagggggaggagaggattggggtagcagcatttcccttgtaggattgaatgagcttatacatgcagatagctcactccagcttttggcccagagtaagtggtcactaaaggttagccacagctgtcagtaacaattccctctcttcctgcctgggtgttctcttccattacagacagagtgggaagctttggagctgacggatcaccagtgggcactagatgatgtcgaagaagagctcatggccaaagacctccacttcgaaggcatgttcaaaaaggaattacagacctctattttttgaagaccgagcagggattagctgtgtcaggaacttggagttgcacttaaccttgtaactttgtttggagctggcacctcttgaaataaaaaggaggatgcacgagctggcaggcatgcagcaaggcttgttcttgtctgggctgggttcccctttatgtttgaaactagaggaaataggagtatgctgggcaacttgttatttttaaaatgttgtaaatgttccttctggtgactctagtaatgaaagtcagagaaagggggaaacctcaggctactgataatatataaaatcttggccaggcgcagtggctcacgcctgtaatcccaggattttgggaggctgaggcgggtgggtcacgagatcaggagttcaagatcagcctggccaagatggtgaaaccccatctctactaaaaatacaaaaaaaaattagccgggcgtggtggtgggcacctgtaatcccagctacttgggaggctgaggcagagaactgcttaaacctaggaggcggaggatgcagtgagctgacatcgtgccactgcgctccagcctgggcgacagagcaaaactccatctgaaaaaaaaaaaaaaatatatatatatatatatatatatctatcttagcagaagcccagtcttcgaaggaagcattgttaattatagctaatgattatgtgcagtcagcctgacatctagccacagtaaactcctgttttcttgggatccaaacaccctgtgttttaccattagttttgttagtattgttaactttctttacacaagtaaaccatttccactaccaaaggtttagaaactatggatgaacaaaatgaatctccctgttcattttgagcctacatagacatagagaccaaatatgtcaaaaccttattcaaataaactctcttcagagtgaatacccagggtcaggacagactcagcaaaccttctatatcacttaattctgcccagtgaaaatcagtgaccctgaggcactgccagattctaaagtgcctttgggatcatcagagactgtctataaataatgcaaaatcttgatctggatgtcagtgtatcaaatcttatcaaatccattgacaaatcagtggtgctatactggaaatggctactcctttggatgaaggacctcatttcccagttgcttggaacaaaagagaatttacatattgctgtaagaagggagagacggcagttgttggtagacacacagataagggtgcccaagaataattctgtctggattaaaggtcccagggaagtgacggtgccatttctgtaccaagaggtgaatataatttgcatgttgagtgcagtaattaagaacaaacgactcgactccacaaattaaaccgtcctgttttctcttctttgcctgtgaaagtgttgcctctgtaagtcactaacaaccttctgccagcagttgactgtctatcttggatcagtgcggggagtctaagacgaaagagatgtgaaccttgccctcaactcacaagagagagacacctaagagctttttaaaattttttattatttttttagagacgataccttgctatgttgcccagactggtcttgaacttgtgagctcaagccatcctcctgcctcaccctcccaaagtgctgggattacaggcatgagccactgtgcctggccaaaagagacctttttttgaggtcaccgaatctgagaatctggaatctctgaccctggcctccagagtaacatatgtggacatagatacagacatgtccctctaaaacttattcataatgacccgcagacccaagttaagaaaccctgacctttaacgatagttaaaatggctgcttataccagatagaaaaggaacaagtgttcacaggagagctaacctttgacctgggtct

SEQ ID NO: 13234 - DNA, 1154 bp, Homo sapiens
ctgggattacaggcgcatgctgacacaccctactaatttttatatttttgtagagatgttttcgacatgtggccaggctggtctctaattcctgagctcaggtgatctgcctgtctcagcctagcaaagtgctaggattacaggcataagtcaccatgcccggcctgtgaacccagattttacaaattattttcagtgtattgcctaaggctttaaagagcagataatttatctagggttgtacatattagcgtggtgcttgggtttctcagcatacatgaccccttcaaggccaacattccatcagtggggctgtcttctgccctggctttttccatacaaaggtatggttttctaccaagatgcttgaagagggttgctactaaagcacctgaaaataaggaggattctgattaggccgtcaaacactgaaagggacttgggcacgtcatgtggatttaaatatatctgtgacacataggatactattgcatttgtttgtttttcttgtctccttacagccagagcgtccattacttgcagaatttccatcaaagcattcccagtttccagtgtgctctttatctcatcagacttttgatggttattttggagaaatcaacagcttctgctcagaacaaagaaaaaattggtgatgggcctagatcctttttttttttttttttttaatgaataggactaatatctcacacttacaaactttgggcttcccaggacatttttacatgtaaatccccacataaccttggataggccctcttgctataccaagaaggtcattttcccagaacaacctgactgatttctgctaaaattgcttagtctgagtttggttagacaagctgagtagatagttttctctttggcttaagtttaatcatgttcttccttttcaaaaaaaaaaaatttatctgagacatttgacaaaacgagacataaatcatgaggttaataaagtaggaaataaaggagaaatcagggtcaagtataaaagaaatactggcctcttccctggcctttttctttttttttgagacagagtctcgttctgtcacccaggctggagtgcagtggtgcgatgttggctcactgcaatcctctacctcccaggttcaaacgattctcctgcctca

SEQ ID NO: 13235 - DNA, 1193 bp, Homo sapiens
tgattagaccccagataaattgttgcctgcttctgtgtctctgccagcctgtgatcattttgtgttagagtttgaaatccgctgtttgcctttcttactggtaggatccttttttgttcctctttttttttttttttttttttttttaaagacggggactcgctgtgtttcccaggctggagtgcagtgctgcaatcttggctcactgcaacctccatctcctaggttcaagcgattctcctgcctcagcctcctgagtagctgggacgacaggcacatgccaccatgcccagctaatttttgtatttttagtagatacggggttttaccatgtcggccagatggtctcaatctcctgaactcatgatccacctgcctcagcctcccaaagtgctgggattacaggcatgagccaccgctcccagccatattttgttcttaaagtggggtctttattaacttgtggacatcatggattgtctaacaccatcacagtccctggctcaggattctaatgtagcattatttattggtttggataaacccagctgtgctacactgcagagtaaaatctctgagtcatgattctggactttgggagctagttttgaaactctgatttattgtagaacttaggcttgtaccaattttacaaataaattctgttctaagttctgcctcagttgcctcatttatctttctggatttgcttcattattcaaggattaggtggaattgaattgagatttgtgcagagaaattatggagactggtgctaacatagttctgccgattaaaatcatgtctcctattgtaagaaccaacttcatctgagatgagatatatctgatctttctggaggattgacttgatcttgatcttctttccttttttttttttttttttgaaacggagtctcactctatcgctcaggctggagtgcagtggcacgatctcagctcactgcaacctccacctcccaggttcaaacaattctcctgtctcagccccctgtataggtgggactacaggcacacgccaccatgcctggctaatctttgtattttttagtagagacagggtttcaccatattgaccaggctggtcttgaactcctgacctcgtgatctacccgcctcggcctcccaaagtggtacaattacaggcgtgagccaccatgcccggccaacttc

SEQ ID NO: 13236 - DNA, 1136 bp, Homo sapiens
cagaaagcctagcttcagtgctgctaccaagttctttcttgccaggctgtaagtattgtttaatatcagtatttctacccacttttgtacactctagtggtattagggtgtggttggttagggtttttttcttattttcattgttttggtcgggggaggttttaaagtaatccttgacctatatatatagatttttgacatcccctggtacatagaaatccatacatctttctcctctacaccccttttccccccaattcattgtggttgtaggtgtttatgtgagttcacactaggctcattggtttatatcatttgtttaacggttatcacatggacatgtcaatgctagtttgactctaaatggttcaaccttacaatgggaatgttcttccttgttctctatcattggtccttttttggaggggaagggatgaaaggggctcctgaatcatcactgcttgaaacaaaagcaagatggctgggacaatgtcacagtttcatttacatggacaggtttctgtaagctttaggtacataccaaagggcatggtgtgagtaaatggggatcaaatgaggaccctttacttggagtgctgcaaggcaaaggtgcactttttgtaagttgcatacagcaagaggatagagcgcagcatctgtttgcacatagtgactgtcatctgaatctgaggctccttcagtccaatgggccactggtgctccctgctaatgattttgcaaaaggctgacttgtctgaaactctgaaagtcccggtccactttggtggctgagctgtgataaccctgccaaagacagaatctactccactgaggcggatgggctggggcttcctgaccagtcctttgttgttcatcgtgcgcaactctgatgtgtggcagggtaacttgggactcactccagattccaggaatgggctgtctaggactagagtgacctcttgaaagcacagctgcacttcaaggtcggacggtgtgtgtgggaagcagggggaggccttgaatgggtgcttggaggaaggtgtaggtgtcgtgtgccgcagccattggaaactctcatccagtggggtccatggtgaccagagctggtatcctgccattgacagtcctaaaggagg

SEQ ID NO: 13237 - DNA, 1655 bp, Homo sapiens
tggtgaaaccccatctctactaaaaatacaaaaattagccaggcatggtggctcacacctgttgtcccagctactcgggaggctgaggcaggagaattacttgaacctgggaggtggaggttgcagtgagccgagatcacaccactgcactccagcctgggtggcagagtgagactccatctcaaaaaaacaaaagaagagaaaagttaagcatgttgcctggatttgaaccatgtttctgtgacttcacagctatcttcttttctgctatttctcactgcctaggatctaaagatttttttttagacccctctaatcttttttaatttatctaaatgtcagttttcctttcctttcacaggtgacaaaaggtgagacactcacctagaacagtgccgtgctgctgctgggaagttgctttacacaacacaggccacatgggaaaggccccagcagccttcagctccttcctttctccttaaagagcaacagggcttattcttgtttttcttttttcaaaagtgtggcctttgggctctgccatctggggtgtggtgtggtatgtgggaagaagttcagaggaaccgttggaaacgacgttaggcattttaccttttcagtaacattttatacatctacttgtcaatgtatttgagacattcacagccaaaagcctgggactctttgtgaaggtcctcctcacctctatctttctttctctctctctcaaactttccttaaagttctcattgcctttgcactgcttctgtgaacagtctttgtctcctccccacctttggtgggaagtgcggggcagtcctggtcaagacactcatgccctggcaatgtggctgccagagaatgttgttgctaacccaccagtttcttgttgatttggagaggtcaaggccaggcccccacttggcttgaagggacattttcagacttttctttctgtcacttggagtgtctatgcctctcatatttccctaataaactcctcaactttttatctgactgctgtgattatggtggggagaggagctagagatgggttcacttattgcacagaaatgtaatacatggcgttattattctaacataaaactttcagatgtagctgtttgattcaaagcctaggtggcttaccagcccaagtccccatgtttggactttcagctgactagctcatcttgggaatcatttggtcattcagcacatttaccaagtatttactatgtaggcatgttaaactccaataaaacatacagcattgaatcagacatgatgcttacagtcttttgaaataccagcattcacacaatttagccacaatccaaggaagattattagttttataaggcacaagctaagtgtctactctttgaaaagcagatagccgggttcagtggctcaggcctgtaatcccagcactttgggaggctgaggcgggtggatcacaaggtcaggagatcgagaccatcctggctaacacggtgaaaccccagctctactaaaaaaagatacaaaaaaaattagctgggagtggtggtgggcacctgtagtcccagctactcgggaggctgaggcaggagaatggcctgaacccgggaggcggagcttgcagtgagctgagatcgcgccactgcactcca

SEQ ID NO: 13238 - DNA, 1236 bp, Homo sapiens
ggttctcggttctaaaaacagacttccaactgggaaactttttgggggaaattaactggacacctatctcggaggtttattttcttgcaaccagtgaagtcgtcctcctcccttccctggataactcttcagtttgactgtcactgttctggtgtcaactccagcgtcggcacaggcagaaggacttcagctgctggtctcattggttccactgccattgatatgggggggtgcagaggagcactcattgtccatgatggagatccaggacagactgggggactccgggaagaggctttcttggggaagaggaccccaaaggaggtacttcctcctcactgatgccctcagggctgctgtgtgggtgtgttaagctgataaggttcagtttgcggcggaaactacctgctagtcttgtgtcaggggctgccagcctccttttgtttcacttttgcccccttcttgggaacatttgaccaaaaataatcctcatttcatcttgtgtacagtcctttgtgtaccccgcccaggttgagaggtgaatcagcgtaattctccgaagctctgctgggcagctcagccatgttacattgtctatgcagaataagcaggcctggtgtctgcaaatgtaccagtccttctcccgcatctcctgggtgcccccttggctttgcctctcctgtgtcctgtctttctgcgttttagaagtgagagcctctccttcaccttttgagcaactgagtcatctcaagtcctgagctctgctctgccgcctgctggtgccttgtaaaggtatactcgttacaggccctagaggttctaatggtccagggttaagtgagaggagactgtactttgtttcaaaggatccttcaccctgatctgcagtgaggtggatagatcacctggagtccctcgtctgtggtcttggaggcttaaattgtaaaatacatcccttatggaatcctaaattcctctaggtgtttttggaaggcgcatttgagccttgtgagctaaaatggaatggatttaatatttcctatctggcatttccatcttgcccctggtacacaagtcactggcctggaactcagccttgattcactgtccgtcttcacggattagctgtgctgttatgttgtctgtgctgcagattggcccatgtgggaagtcgggggggacctgatttcctgcttggaagacttgggggactgccgagcatatcaaagtgtttat

SEQ ID NO: 13239 - DNA, 1091 bp, Homo sapiens
tctcaagatgatttctgaacacacaactataagtgcatgagaacttaaatacgtgtgctcttatgctaattatacacaaagtaaaagttttttcacaaggagaatttttttctccagcaaatagctcgctcaccctaggggtacatacaccccactttagagaccctcaagttacagtggtatcattaaacgatccataaaggagtgggtttaagaaagctgatacaggaacatgtttgaaataatacattttctcaagggtgtcctccaaccattttctttgataaattatatttctgcccattgttgacttgaaattgtcctcacccctctaccaagttcacccagtgtattctgaaggaaaatgaatgaatatggaaacctctctcatcctaggcagtagagcgagggaagctgcactggctgagaggctgtggaaccggatgaaaaagcagcccctgagtcctgtggcgttggctgtgagtcggccacgtgcttgctgtgtgctttaggaaagttacttaatttctctgagctttagttttctccctcataagtaggcttgctgtgaaaatgaagtgaaatcacattaatctgcatgagcatttaacacggtgcctggtgtacatcaggggtgtgacagtgagtgctggctgctgtagtaattgaatgcttagctacgtgccgggccctttgccagctacagctcatgtgagacctcatgttcagtcttggcagtaacccagcaaggtaggcattttacatgtgaggagcctgagaaattcagtcttggcctggatcacagagctggtatccaaattcaggtccgaggccaaagcccagatctttgcactacaccttgttgcctggcacaggtgagagtgcccagcccatagtgggtgcgcaatatctgtttctatttgaatgacccaggcaggcggttaataatgcttgtgatttctttgagagagaagtaagttcttgtctttggtgggggaagcatcaggtgaccagcatttgtccagagcctggtacccatcctctcccaagcccaatcagtggtgctttctcaaaaagaaaccatctcctga

SEQ ID NO: 13240 - DNA, 1255 bp, Homo sapiens
gtgcttcatgtcagccttcacacacactccagtcctgagaagcggaggggagagggacagcaggcttgggtctgcagaagcagtgttctcttgcaaggcagagtcaccatgtgtcccatctttacagattggctgcaatgccgtcagctgggcccctgctgttgtacctggaagcctcatagaccacccatcggggcagaaacccaattacatcaagaggtttgcatcaggtggctgtgacaacctcatcaagctgtggaagtaagtagggatgtgtggccttctctttgaggggacacttctaccctttaccctactcaccatgactcagccacactcacaagaaacaaggtcacctttctttctccctcctgccagtaaaatactgttttcaatctgttggaggacatccttgaaaaacaacacaacacctgttcacctaattcccaactgttggagctgactctttggctgtggaagcagagcattttctggagggttttttttacagctggggtgaagggaataaaatgccacaaactccatgaatgaaagaagaaagatggaatcgcttctccaccccaggcagagcctgttgggttggggaggagttgaggtgtgggaacggccccctgctgattctctttctgtccccactgttagggaggaggaggacggccagtggaaggaggagcagaagctagaagcgcacagtgactgggttcgagatgtggcctgggccccctccatcggcctgcccaccagcaccatcgccagctgctcccaggtcagcccagggccatgagtatcccttgtcatttagtctcgagtcaggcccatcagctcttagtctccttagcagaaagtcctctgggaaggtaaagggagagcaacaggcacctttggcccagagcacagggagtcaggtcattgtgtggggaagtcttggtcagaagccacaagtggcctgcctccactgagatgagacagctacaacagaaccggcaccaagaaggaggcggattcgggatgaattttcccttctgacccatgtgagactagggcgccgaggtgcccaggtgcagttccaagtgttcccaagcaacgatggggttggatgggaattatacgcttagctaccaagccacccttcccagacagcaaggacggccaagggtgagccttcagttatacaccaccaccctagagggagccagctaggcctttcacatcatgggaacctgtttggtttggt

SEQ ID NO: 13241 - DNA, 1178 bp, Homo sapiens
cttcgtgaacctacttaaccgcagctttacagaactcagtgtaacaactgctttacattctagacaggcagcctggtggagtgaagttttgtggactcagcattagaaggttaggggatggggctcttttcccaggtctgccttgaactagctctgtgactttggcaagtgctttctcttctctgggcttcttcatttccttagtctgtcgcaggtctctgattgactgtgcccttggtaccctgccctccccgccttcctgtgcactttgtaacctatacagctcggcacatggaggaaactccttattgtccttacttgcctttgcagacttcggggacctggtttttagagagtctagaatctgatgagagaacctgtgcttacttggtgtgtacctcttgaactgctttgcagccatcctcttccactgtctgcctttctgaaatcacaagtcaaactttatacctacagggcttgtgctggaaaagatgaaatggggaaaatggtaagaaatgtctgttccacactgaaacttcttttaagtcctcttttctatcccaagaatttaagagaagagtggttgagcaaagaaaaaaaataacagcttttgttcatttacttattcattcagcaaatagtcgctgagttccttctatttgcaaagcactgtgctggatgatttgaggggatttgaaactgcagatggctcagaccatggctccaaggagctcaccttctagtggggagaagaaacagcataaagtgttgtatgtgttccttgctgaagatatgcaagagagtccagccatttgagggtctgagaatcttcaagaaaggtgatggatggccctttttgagctggacctcaaagaatagataggagggagatgaccatgacaccatgttccagccctacaaactgttcaactctggatcccactacgtgacggaccagggagcagcctcaggaaacactcgaatcaagtctcccagtctgaagtaataaccccgttatgcataaactgcctggaacatcagaggctctgtcatccaggaaaggaacaccagctgtagctcccttggggtctctcctcaaccttaagggtagccaggactgcttgccgtttccccacacacatcaggctctctcagacctctttgtctctactcgtgta

SEQ ID NO: 13242 - DNA, 1211 bp, Homo sapiens
acagccccttggactggcagtggccaaggagagaaacagacagattgagactggtgtggagtccatgcttaggactggacaggtggctatgtgtggtgaggctgaatgagctgttactaggaggcagggttaaagcagtgtcttgggtaatttgtggttattcttgggttttgttttgttttgttttgttttttgtaaaatagacatgaccctcctaggcaaagattattcaaagaattaagaattccacaggcaccaccacatctgcacatcttagtggagctgaagctgctgctcacttgctctgaattggaagtgctagctggagcatgcttagggggaattaaaatgtgcagacctggaagaggtctagttgggaaggagatcctgagacagcctcccccactgccttcttgcccttctgatcaccttagaggtggtcactgctgcatcctgctgcaccgcgtgtttcccgagctcctccccactgtgcatcaccccatcccagcctcaacgtaggcctcctcctccttctgcacacccaacacaggcttctctacctccaggcagcccccttctatccccagaggtccctttccgagggacatatctgaccatttcactttcctgcttaaaatccagtgacatcctctgcagccattaaatagaaggaaacctgaattttaccatctggaaagatgtccctgataaatgcattggacaagagcaagtggcagaatgacctggccagcctcagaaggcagggaacagtggtcaaaacatgggcttggaggctgcaatgagtttgaacccgagctctaccacttagtcactgtatgaccaggagcaagttctgaatttctctgtgcctcagcttcctcatctgtgaaatgggaatgataatagtcctctcccctataaggttgtgaggcctcacccctataaggctaatatgtcaaatgtgctagtccagtgctgctcctagtagcatccaataaacactagttattacattagcatataagtacatgtgaacacatataatcataggtcacatcgatgcctaagattatatgtgttctcatgtatttatatacacctctctctctcttttcacctcattcttcaggactcagaggtattctcttccaggaagtcttccctgaataccccccacccctaaggctggattaggatccttctctggcctt

SEQ ID NO: 13243 - DNA, 1179 bp, Homo sapiens
tggtaaaaactgacatctagacaatattgggggttcctatccatgaacatgctgtcctttaagctacctatatgcctgcttctaacttttccttaattgaaaggaatgggagaataggtatctcattcgtcaaacacctactgtgtgccaaaaatcatttaatgatttcacagcaccataaggatgagattatggctcccacttgacattcgctgaggctcagtgggatgttcatatccatccattaaacagacatgaatgggacctactatgtgataagccctgaaccaggagctggagatgcaacagagaacacaatagaagtgttctctgcactcatggagcttactgtctgtgggagagagagggacacatattaaataatcccatagataaatgatgttaggagagtttattctggggctagggaaggcttcctggagacagtgctgtttgagctgagattggaaggatgagtaggtactaaccaggggtcaggtgttccaagcagagggaatagcacttgaaaagctcacaagacaggaaggagcttagagccttcccaggactcagaagtgtgtatggccagagcatggaagggaggatgaaataagctgacgctcactgaatcaccgaaggggaaggccgggatcagctctgcacaaccttgtaggcctcaaaaagggagggcatggagaaagagaacaaactacgtgttaggtgctttaccaggtgctaacacacacgcgatcacctttgatccctgcagctaccccatagtaaatgttatcaccatctccaatttacaaatgagaaaacagaggctcagaaagggtcagtcctccactggtcagaggcagaggcaggcttcccaaagcttgattccaaatcccatggtctcctcagttcaggagcctggatgtaccaggtgcagtccccgctgggtagcgcctggcccctcctttcccagatgcgaggtttcctgcagggagagcccaaccaggctccctccagccccacgtttttggcttctggcctgtctctgtggcatccttgcttgaaatcagagagagaaacgtggggtctggtaattgtattccattaagcctaattaagatgcaaatttgcacagttaatgaagaaggcaatttggaagcaatttcgccagtgacacaggac

SEQ ID NO: 13244 - DNA, 1198 bp, Homo sapiens
tgacctctggacacatgtctcctgagcagtaagacatcatagaaactatcccaacattttagcagaattcaggcccttcccataaccctaatcttgtggactttcattagttttacaaaggggatttcagctctggactggggaggggaacagttttagggagggactattatcatccttgctttaaaattaaactataaactatattcctcctccttggttggcttgacctacgcccaggcatgagcttggatagccagcctgtgaggctggcagcaagatggagtcagccatgctagacttctctgttataatcttgtgaagacagttgcaacctccccttacataccctaggggctaaatcagtcttggacacttaacctctcaaaagttttggtggagatgtgtgttttcacaagtcaggtgttttgagtggctttggaatcaaggtactgctctggtcaagaattttatctgtttccttatattttatacttgtataagcaataacatggtattttactccgttttgtgccatttcttttttccttcagcttatcaaatatggagttattagcactaacgttctgattgaagatctcctcaactggaataacttatacattgctggacgactccaaaaaccggtgagtgttttataggctgcacagttaaggatgcctttcctctctgagcctaaccttactttgatcattgtgattgcaatgagatggaactctggaaatagaaatgagtttctgactcttcctattccctataaaatttattgccaaataatatccacatattctattgtgatataagaagaaatatgtatttggtttttttccttgggctcctggttcagaggtcctaaaatctttggaatatctgagtgttagggatgagagggtcttttattattcataacaagttcctttcagtcgtacctgagtttatactaataaagtgactcttgatgggcccctagatagattcaggatagggctggttgccagggagccagccgtgtgataagaggctggacctttcaggccccccactcccaccttcacagaggggaaaagggctggagattgggccaatcaccaacggccaatgatttaatcagttgtgcataggcagtggaacctccataaaaaaaagggggttctgagaacttctgggttggtaagca

SEQ ID NO: 13245 - DNA, 1101 bp, Homo sapiens
gatcgtgaggtcaggagatcgagaccatcctggccaatatagtgaaaccccatctctactaaaaatacaaaaattagccaggtgtgttagcagatgcctatagtcccagctacttggaggctgaggcacaagaattgcttgaacccaggaggtggaggttgcagtgaaccaagatcacaccactgcactccagcctggcaacagagcaagactccatctcaaaaaaataaaaaaagaaagaaaagaaaatgcagaaaagtataaagaagaaaaatatttatctataatgcaccattcaataatactgctgtaaacattttggtgtgtcaccttccagtctgttttatgtgctttgttgttttttcaattttgaaattcgagtgctgtttctaacagtatttctgtcttgcaggtatcagcatagtgttgagtgggcagcagagctgatgcgtagacaggggcaggatgagagtacagtgcgcagaatcctcaaggattacacgaaaccgcttgagcatcctcctgtgaaaaggaatgaagaggctcaagtgcatgacaagcttaactctggaatggtttccaacatggaaggcacagcagggggagagagaccttctgtggtaaacggggactctggaaagtcaggtggtgtgggtgatccccgtgagccattaggctgcctgcaggagggctctggctgccacccaacaacagagagctttgagaaaagcgtgcgagaggatgcctcacctctgccccatgtctgttgctgcaaacaagatgctctcatcctccagcgtggccttcatcatgaagacggcagccagcacatcggcctcctgcatcctggggacagagggcctgaccatgagtacgtgctggtcgaggaagcggagtgtgccatgagcgagagggaggctgccccaaatgaggaagtaagtagaagaaaataaatcgcttcctccaaagccatccgttcctggagatgttggctaatagggatgtcttttgcctgcagctggtagctggcctgttgtagggtccaagggaagcagcaggctttgggccacagcagctgtgagggccatttcaactaaaacc

SEQ ID NO: 13246 - DNA, 1480 bp, Homo sapiens
ggattgattgctttaaaaaacaaacctggctcttacctttgatcttttcttccccagaaatagtaaacttgcagctgcccctaatgcagcatatttttcttaccaaaggagtcttcagccctataaaaggattcctctatagtgtatttctctagtgtatttagtgtgtcgtcaaaattttgatttatacagagctttcaagaacacacaatgcaaagtgagcgcagcatagctgttaacaaacatacaacttttttctagggctttaagggtggtcatttttttcaagttctctcaagtgtcccaaatcagggtagcaatcttgttgccacatgtgcagcaaacaaagtggaagtatagatcttcttctcccttagggaggctcttgaaggagcaggaggtacagtactgggtagcagtctggccctcctgtcgtctggttggtgttggggcctccagccagggccctctaggggaaccaagcctctgctctcacctgtgggttcttgcccatcagggtaattgtattgagaactcaaatatacgtgcacttacatgtgtggttcgtactcaagtgatctattatctagctgcaaagcctggctttgatttgaaattttgtaaaaatttcatggcacccaaggtttctgattctgacccagcagtggtcctgaagagagctgatggcaagtcttgtagtcattttgattttaattgaagggtgagcataaccttgtgaaccagcactagcttgttccaagctggaatttatctaatctatttttgtgtttaaaaaagctgtacctaccaaataaataaatagtttataaaatgtattacttaaggtattagctgagtttagagtactttctgcttaattaatttttatacttaactcttcagtagaggtttacaaagagtacaaaggttaaattacaaattcattcccagcctaggctctgggcacatttcctgttcttgaattctgctcctgaagagggtgaacaaatggggcattcaagttgtgagctcagaattactttaaaaggaggtaacagccagccattacacctaaatttaatttattttattaaaataacataattgagggaccatcagataactgtattttgtcaggtgcaataaaaacaaaattaaaacccaaatcatcaagaaaacctgtattcctggcttccttgtatacacatgatgtgactagagaaacaaggctgtttgtttgtttgtttgttagagaaacaaggctggccctgcggccccgccccataggggcagctcctggaagacaaaattcagcatgatggaagactgctccctgagagggctgagatgcggattggccgagtgccttgcctggaaaaccatcccaatgcactggacaccttagaagctgtgaaaggaggacgtgtcccctaagaaaagttccatagtaccaaagcaggctccttcgggcggccagagt

SEQ ID NO: 13247 - DNA, 1550 bp, Homo sapiens
tgaagaaagtaaaggaagagaggcctctttttccccaggtaaggctcagggctgctagaatgtgattaaagcatgggttggttcgtaaagatggcaatataaggtgggagtgttttgttttgttttatagggaggggacccaggtcctctacaagatggtggggggcagggtacatcctgtgtctttgagacacagctaatgagagcattcttgggctttgtttcagatcctgtcttccattgagctgctccaacactctctaccgaagatcaaccggagcgcttccgagccatccttgcatcgggcagcccacactgaggatatcaatgcttgcacgctgaccacgtccccgaggctgcctgtcttctagttgactttgcacctgtcttcaggctgccaggggaggaggagaagccagcaggcaccacttttctgctccctttctccagaggcagaacacatgttttcagagaagctgctgctaaggaccttctagactgctcacagggccttaacttcatgttgccttcttttctatccctttgggccctgggagaaggaagccatttgcagtgctggtgtgtcctgctccctccccacattccccatgctcaaggcccagccttctgtagatgcgcaagtggatgttgatggtagtacaaaaagcaggggcccagccccagctgttggctacatgagtatttagaggaagtaaggtagcaggcagtccagccctgatgtggagacacatgggattttggaaatcagcttctggaggaatgcatgtcacaggcgggactttcttcagagagtggtgcagcgccagacattttgcacataaggcaccaaacagcccaggactgccgagactctggccgcccgaaggagcctgctttggtactatggaacttttcttaggggacacgtcctcctttcacagcttctaaggtgtccagtgcattgggatggttttccaggcaaggcactcggccaatccgcatctcagccctctcagggagcagtcttccatcatgctgaattttgtcttccaggagctgcccctatggggcggggccgcagggccagccttgtttctctaacaaacaaacaaacaaacagccttgtttctctagtcacatcatgtgtatacaaggaagccaggaatacaggttttcttgatgatttgggttttaattttgtttttattgcacctgacaaaatacagttatctgatggtccctcaattatgttattttaataaaataaattaaatttaggtgtaatggctggctgttacctccttttaaagtaattctgagctcacaacttgaatgccccatttgttcaccctcttcaggagcagaattcaagaacaggaaatgtgcccagagcctaggctgggaatgaatttgtaatttaacctttgtactctttgtaaacctctactgaagagttaagtataaaaattaattaagcagaaagtactctaaactcagctaataccttaagtaatacattttataaactatttatttatttggtaggtaca

SEQ ID NO: 13248 - DNA, 1633 bp, Homo sapiens
tagtgttacaaattccaatttaacgtatattgactttattgtgagattttatatatcattgtttaaagaaaactttattctggccagacatggtggttcacacctgtaatcccagcactttgggaggctgaggcaggaggaccgcttgaggccagggattcaagaccagcctgggcaacacagcaagactctctctctaccaaaaaacatttttttaagtaaataaagagaaaactttattctgagaacatgggctttggagttcaacagacctagattccaacataggcccttaaacttgctgtgtggccttgagcaaattaccttcttagagtcccagttttcttatttttcagatagaaataatacctacttcataggtttgttgtatgaattaaataaattattgttgtatggattaaataaagttgtgtttatatggcatgtgataaatggtagctgttgttatttctattgaactttgatcttgtttaaacatttcatgttttttttaaatcctttctagtaaaaaagcacgcttagattggaatactgatgctgcgtctttgattggagaagaacttcaagtagatttcctggatcatgttcccctcacaacacacaactttgtaagttgcagatctcttctctttctggcatgttgagggctttgccaggcataacagagatttctcaggtaatatgcgtatgtatatatatatatagttggattgtttaaagttctttatgctgttgtttacagtaaggcaatttagatttcattagtcagagatatactctaatttgtgattatgaattctgtacatgctggaagtatgattcattttgtaaaaacttttttggaggccaagaaatgaagttgtcttttgtcatcttttatttattcagcataatttacacctgtgttcttgttgtaggctcggaagacgttcctgaagcttgccttctgtgacatctgtcagaaattcctgctcaatggatttcgatgtcagacttgtggctacaaatttcatgagcactgtagcaccaaagtacctactatgtgtgtggactggagtaacatcagacaactcttgtaaggcattgttcttttatccaaggaagatagggatgaggagtatacatactttaaagggtatttgttgtagattttgactgacaggtctggattctagactcatttaatgaattgtgatccagaaactactttagaaacagtgataattctgaaactagctaggtttggtggcattcatactccagaatgagcaggtaggagtaggacttgttatctgtcaaattgagattgacatactgtgactgtgattcagtaaggaaaggagcaaaaggatatgaaaacaagaagattttttgcttttcgctcttaatagtattatctactggggttgctagtagacactgctctgtattttgttgaatatgctgaatgagcctttgacattgagaaggagcagaaagcaccgttgatgctattttcttcacttcaaactggagaaaacttagttgtttggacttaaaattgtttgaatataaaatcttgaaagattcttgtttctttcaggagacaatatatttcatatagataaaatgt

SEQ ID NO: 13249 - DNA, 1198 bp, Homo sapiens
ggctggagtgcaatggtgcgatctcagctcactgcaacctctccctcctgggttccagcaattctcctacctcagcctcccaagtagctgagattacaggcgtccaccaccatgcccggctaatttttgtatttttagtagagacggggtttcaccatgttggccaggctggtctcgtactcctgacctcaggtgatccacccgcctcggcttcccaaagtgctgagattacaggcgtgagccaccgtgcctggcctcttcacctttaaaataatcttactctattattctgaaggatattttcccccaattaatatatcatggactcctctccatccaggtcattataagtaatataatagctgcataatgtgacataatacagatgtctcacactccattcaagtactttcctattgctggacattcaggttgtttcgtatatgtgtgtgtgcgtgggccatcacaagcaatacagactggtgcatttatttctgtgcccacctttccaaggggtgctgcagcctgtgttggtcctaaaggtggtcctttgtttgtaggtcaatgtgcgaaatggaatgagcttgcatgactgccttatgaaagcactcaaggtgaggggcctgcaaccagagtgctgtgcagtgttcagacttctccacgaacacaaagggtaagagctcaaaagtcaattgacttcttcagactagtaaggatcttctagcttcaaatagctatgtttgtattaaattgtactagcttcctatagaatattgtatatttctatacctttctttataaagagataattcagaaaaataggtattaagaaattgaaattattgcttggacattctcttgaaaagttaaatacacgttaagctgggcctgatgaccaatacctgtaatttttttttctttttgaggtggagtcttgctctgtcgcccaggctggagtgcagtggcgcgatctcggctcaccgcaagctccgcctcccgggttcacgccattttcctgcctcagcctccggagtagctgggactacaggcgcccaccaccgcgcccggctaattttttgtatttttagtagagacggggtttcaccgtgttagccaggatggtaatacccgtaattttaacactgggaaactgaggcaagagggttgcttgaggccaagagttcaagaccagcctggg

SEQ ID NO: 13250 - DNA, 1300 bp, Homo sapiens
cccaggctggagtgcggtggcatgatctccgctcactgcaagctccgcctcccaggttcccgccattctcctgcctcagcctcccgagtagctgggactacaggcgcccgccaccacgcccggctaattttttgtatttttagtagagatggggtttcaccgtgttagccaggatggtctccatctcctgacctcgtgatgcacccacctcggcctcccaaagtgctgggattacaggcgtgagccaccgtgccccgcagttgcttgctaaatcttttaactgctggtcccattttcctcatctatgaaatatttaatggaagtgtactattaaagaaacttttctttgctgatgaatgcaggaggtatcattaaaaacccacatagtgctattttcataattactctttatgtattgtgttcttgggttgaatacttttgttctagagttacaattatttgtgtttcttaccaggtttaagaattgtttaagctgcatcaatggagcacatacagggagcttggaagacgatcagcaatggttttggattcaaagatgccgtgtttgatggctccagctgcatctctcctacaatagttcagcagtttggctatcagcgccgggcatcagatgatggcaaactcacagatccttctaagacaagcaacactatccgtgttttcttgccgaacaagcaaagaacagtggtatgtgaacattctacttaggaaatttagctatttatctgcctgtggagcacattaaggatcatgttcaacttaaagacaggcaaaatattcattgtcatttagggtctttatttttttttttctaactgcagatttatttttttatattgctgttccttccacaccccctattttttcctacctcttggccttccttctgttactcttgcctggaatgtcttcctttgtgccacttcatccaaacaaatagtacattcttatgggtatatttcaaagacttttctttgagaagtctctaggcctttccaactacttattttagaagacattttatttcttctattaaaatattcacctaaagctttttgactattacaatcaagtataaagaagaaagtaaagttacatagaaaagattatttttgtatatttcataggcccaggaccagtctggaggcagcttagaaatcatagaatcttctttttcagggcactgacaccagccacttagttctgcgtagtttattttttcagtgccagtgacaggttcatattggcatcatggcaggacactgccactaggttttct

SEQ ID NO: 13251 - DNA, 1145 bp, Homo sapiens
tgattgcggggcagggacttgagtatggggaggaggctgctagaagaccatcgcagtgatccattcattcagtctagtcatatggtgctaagagctggttttaagcacagcaaatataggctggatccctgcagtctgtaggaggtaagtatgggaacacagtacttgccactgtcaattaacaaaaagcgagcacttcagattggctgctcagaggcccctcaggctgtactcaagctgatttgaatggcaaagaacctctgtggggaaactagccagtgcaaaagcccagaggtggagttaggaaatagctggtgagacagaagcctcaggagacctcgcagcagggatttatgttggggaagatgatggggcagagaggaagccaaagaccagtgaggaggcagtggtgtgggccaggctcaataaaggatggctgcttctgctgtttcctactttaggtcaaagctggttctgtgaagcaggagtttgaaaagcaagatgaactgaagcgctctgcaatgagggcagtggctgccctgctgaccatccccgaggtggggaaaagccccatcatggccgacttctcttcccaaatcagatccaaccctgaacttgctgccctctttgaaagcatccagaaggattccgcttcagcccccagcacagactcaatggagctcagctagtcccctcagcaccaaggtgggccctcgcttaagagaaaggagcccacccaagtccgaggcctccccatcccaccatcgcaggtctctacttttgcccttccaccatctcactgggggccctgtcgctcctggtcagggcttacagtgccttctccagggacccaactcaaaggcccccagcccaagctgtgaggctgccaacagttgggccccttccttaactcaggacagtcatccaaagaaatagggtgaggaagttttccagtgacttcacactgtacccctccatagtctgtctggttccttcagagggtgtctctgcctcacaaactagtagtatttagaaataggctgtgctgtcagctgtaaaagatcaggaggcagcagacaccactctggtttcttcactgcattcagcaatgcctgaagttagtgctcaggccgggcatctcaaaa

SEQ ID NO: 13252 - DNA, 2737 bp, Homo sapiens
gcacaccaaacccggggcacttctgttgccatctctcccctctgcccctcacggcccaaccggagccccaggagcccacagggctggtgttgtgtggaacaaaggcccagatttcatttcttgttggcaccctgggctctgctcacctcagtctgagggatgggtgggcctcagacaccatcagccttgaaacggtgagccagccaagtagtgttgaactgcctcccccactccagctctcagctccctgtgccctaatgtacatgcatatgaaaacccaacctagaaaacgaagaaatgagatacaaaaacagacaaaacaaaccccaaaacttgctgcattattgctcttttattgacaatgggcaaaaaaataagtagacctgatatggttgatgaaaatacgtaagtaaactttatataaatatataaatatataaatatatatatatatatactgtataggtagtacttgtgtgtgaaaggcaggcgtttcagtccacattagcaatacccaccttacaaggagctccacttacctaataggaagacagtaccttagctgggtgtgtgagacaatagaccaaaccctaaatgctaggaacaaattcagatacttcatattttcatacaaagaagtccctctaggactggctaaaatctttacacaatcattactaactgtgccaagtaacatagcatctaactgtttaaaaagtccagtattgctttgtataaatccttattttattaacagaatactatcataaatagtattataatgctgttatttcaggtaagcaaatagctaaactgcagtacactctacagtagcaactcaggacagctggttacaagctggttgtcttaggacattggttacacggattcttagacactttaatggctgcgataactgtgactctccatgatccatgtttcttttatgcgcatatgatttgacgcacactcattcagagtcctccgagaggggcacccatacacggcagaagtgttcatctccaacatgaaagtgaccagctctcatcctcgtctccccaacaccataacgtcctcatcccgcctccaacccacaccaggccgaagccctcagagagtgttttcatcaggaaccactctcgaacctgaaggttgactttagcgtttagcaacccagggcggtgtgtgtgtttcccgttttgttttctgagtggtagcagtgatcaccgtaattccatgtagccatgtgctagcagaacccctgtgtcctcaccgtggcccgtgtgaccccagccgacgagtgcccggcggagcccccgctgccttcccatggtccagtgagctgccagggcatcacatgactctcagctgtgctcttgtcgcttctgtgttgtggtgacaccatgcgctccccagggccagacctgcacgcggcaggtctgtgcccgagtcacccacgggccatactttgtagtttcagcctttcgagccactgcagccgtcagtgctgtgctcctaagccatgggacccgaggactgccccccggcgcctgcccaggcggaggccctttcagaaagggcgaagctcacgcctgactctgcgggccgcggggccgcgttcccagtggacagcgtggtgagccgtggccggacggcaggaggagaggggagccccctctggctgtgtgtcaccttggctggctggctggccagggttttgccgatttccctcctcacatccctcccaccctcggtcatatcattgagatcaccgtaccagcaaatctgcaaaccaagcactttgttaatctccagagagagcaaatacagcaatctagagtttagcctttttaaaaatgtgactttaacccgcccacctgtgtcctcccattggcgtggcatttctttggtgtctgctcagaaagaaacagcatgggaccgtgtgattgggtccaggctgggctgtcagggaagcgccctggtgtctccgactcatcaattctcgggtcttttttaaaagccaggctccccaaagcactctgtctcgcaattttgaggaggctgttccgacctggaagcgttaaactgctgcatgtcatctggcgtcagctgtgaggctgcgctctgcgtgttgtgcgtttgcaaaatgtattggcgtgactgtaaacacatcgttgaagtaaagcgattacatattgagtatgtcagcttttctcaccctcttctgtgctgggaggagagtctaactgtaacctttaggttgttccagaaaagattcaggccgtttggcacagaattgctctttctgaagggtagcagtaatgaataggaacagacagaaaaccccaggaggggctttcaggaaactctccctctccatcgccatcctgcaagctccacagcctcgggctgccagcctgtggcactgtcctcggtgtgtcctggagctgtgctgggcagcagggcctcgcgtaaggaactgctggaacccactgagcccttcccggggtttcccgccgcactcagtgtgttccttcaggctagtgaggtttcattctgttttatttgcaagcttatcaaaagtttgtggaagatacattgttgggttccagaggctggagtcatgctgcccacatcttgtttgggaaagcaaaagctcccagtgagctggtgtccccgtgtgtctttcatgggactgtcccctttagagatcccacctgtcagagccacagcttcg

SEQ ID NO: 13253 - DNA, 1220 bp, Homo sapiens
cccctgaaactgcctacattcctgggagtggggcaccgggagcagcaaggctcaggggcttttgccagcagctgtggcccaggctctcccttgtggggcaggagagaaaagaggcactggccgaccggtgggtgccggctcgtgccgctgcaggctgtgttgctgctcaaggagtgtacgggagggtatcgtagccgccctccgccgaacagtctgtccaccagtcagcgagcttctcccaggaggggccccggggactgcctggggctgcagtggcccagcttgtcccacgcaggtctgccccaggagcctggtgtgcctgttttgggaagacccccccattcctggggttgcctgccccacctgccccaccttaggactccctcccgcacctgcccgtcagcagccttgcctcccctcagcttagtccctctcaggccctttggagtctgccctttaagttggattttttcctttgttttcgttttgtcattattattattatttgccatggtaaaaaaatcagaaattcattgccagttgccagcatgagggttgaacccagggcttctcaacctcggcttgattgacattttgggccaagtgactccttgctgggggaccgtcccgggcttggcaagatgtttactcgcattcctggcctctactactggttgccagtaatatcttccctgtcatgacagtcactgatgtctccagaaattgccaggtatcccctgggggacagaatcatccctggttgagaaccactggtttccccagtggccttgtgaaacacagctaaatgtcactggactgctttgggcctctgcaggctgtgggctagagcctccgtttgagtttgtgcagtgtgacaggccctgccctctcccttcccttagcccctctcaggcagcagcagttctgccagaaccgaggcccttgagcgccatccgccccagggcccagcagtcaggacctcagctgtccaccctctgccagagcttgggggttggacagccacgtgccggccccaggttcgtgtgaggggtgggcccacggccagctgctttcatgtagtgtgacgattgctgttgtcatttgggaattctgagctcagacggacaatagggactgagaccccaccctgggcctgccattgaaacaaaaggaggaacagatctcagggacccccctgtaccccgaaaggtttgggggtg

SEQ ID NO: 13254 - DNA, 1227 bp, Homo sapiens
tagtaacatagcaagggcccggtagatgttagttgtgatcattgttgtccttattctggctgcccttaagctcaaaggtctcccatcctgagagaggaaacctttcagaaaggcctgtccagaactggccctgattgaccgttggtcgtctgcctccctagagccctggcgtcagtcacccatctcatcccatccctccctgggcctcagtttccacatctgtgagaagaagaatgagcctcttgatccttgtagtcatttgcagatgcaggatgtttagcccaatggttagggaggcagattctgtagtcagactacctgtaactctaactccaactctaaagccagctctgctcctcattgtccctatgatcttgggcaccttccttagcctttctgtgcctcagtttccccattggtaaaagatggatgacaggaggaggccatggagttgttgtgaggattaaatgaatgaatccatgtgagtgcttcaacagtgcatagtcagcaccagaaacatggcatcctttagctgatgttttaggcccgagaagtttgactgtgtggaactggaccgtattacttgtttggggagatgtgttcctagatgggagtggattgtttatctttttggcacacagacaggaccagggttaaaagagaggggtgcagagagatagtggtgaggggaagaagttaaagggctaaagggctgcaggctgttggtggtatgacagatggcagacacagtaagaagtgactaagcccatggactttagcttgtgcttgtagcgtgctgtccaaacagcccacaaagaagtggatggttaagggtattaagaaaatcgctttgcctgtggattggggaaattgcaaagtaaggcagcttgcagttgggctgggatgaagatttctttagataggaatgggcaaatggcctgcaccatgtgtgagacaccctgaggtgttaggacatcaaggtagaggcccccagccctgtgtcagatggagcagagctgtggtgcgtctggagccctcagctggtggcctgtgctgagcttctgaggctttgggcaggtctggcttcctggtggtacctggggctgcttctggagcctaataaggcccaaagctgcagagcctggcctcaggggcagtggccttcagtccctggttctgctgctctgtcctcttcagctggtctgtctgcctgggaggggaggcagc

SEQ ID NO: 13255 - DNA, 1311 bp, Homo sapiens
gatggggaagaggatgcgggctggtctcacccggctcctgaccccatggcggactcgaggctcaccaagctgctgcagaggggacaggcagcaggaggcgggtcctccacagctagctcttccgggtgtcctttgtcagcctggcattagcatgtatatatgagagagagatttcacagctaattctacaatcatacttcacaattctttatgataaagaataattttaatggtaattttttatctagctttgtctatgtttctaacatgtttatttacatggtttacaattcaaaagatacaaaagggtatatggtgaaaagttccccctgttgtttctacttggggagtgaaagggaacgggggaattgtgacgaaacaacactagtcccccagcagccggttctcccccccagagatgtctcgtgttattagtttcttgtgtccgattccagagtttcacatatacataagcaaatgcctagaaacaaatgttatccccccatttttaaacacaaatgtggcaatgccatacacacagtctgacaccttgtatagctaactttatcaatgacttagccctacaaggtagatattactatcctcatctatagggaaggaatttgaagttcagagtttctgtgatttgcccaaagcaacacagctaggaagtggcagagccaggattcaaacccaggtctggctggctcctgctccccctaagcacgaccccgccaagcctcacccctctgctgcccttggagtggctgctgtggggcctcgttcatccatcagatgaggcgagcttccatcctgcattgatctctcaggacacttgggttgcagttgacagaaactcacctgaacactgcttagaggaagggagaattgattggctcctctcaccaaagtgcagagggaaggagtataatggagcagggtccctcctgaggtcaagaggcaggatcggctaagacagccatggttgtcacgctgctcacagtgctcctcccaggaaggagcatccacgcagccctacttgggtccctgcaggcagggctggacagtgagaggctcaccaggtccaaatgcctggaggaccagacgaggcccaaaacaggagagaacagaagggctcttaggaagaggaaagggcctcgaggaagtgaggaacacaggcaaggtcccatcccagcccctccctcctgatctcccctccccgtgcatggcagggcattgaatgtggaattatccttaaccagggtagtaattactgaagatgtagctggcatgttgaacaaattgttgtgt

SEQ ID NO: 13256 - DNA, 1133 bp, Homo sapiens
tacatgagctgggcatattcatttcatccacaaatatttatccagcagctagttgtgccaggcgccgtgctgaggctgggcataagtggggtatgtcggacaaccttattcttatcctcacggagctgtccagaggggagagggaaagggaaattgtcctctgaacagcatcgcccaggtgctgggaggaattgcccagcgtggcctgtgaggtcagcccaggcgtccctgaaggagctgagccaagaaggtggaatcggggctgagtgggctccaggggctggctcagcaccccctctgggcaccctgctcaaggctggggcatcacttcatcctggccgctctgtctcggggctaggaaggccaggctgcagttctccagcagggtgacaggtggtgggtgggctggacctgccaagaccaacccagtgagaggtggggctggggattgctttggtcaggccaggagtgagccatgcttcctcctgctcctcacccgcccccaagccagcacccagactgcagttgtcaccacgccacctttcatcccctccgaggactgctctaccagctgtgccctgagctgtcgttttaatctgatctaaatttgccaccatgcccaacctggggaaggttgggtgaaacccctgtttgcagaggatggggcttaggtgctggagctggagcacccagttcagatctggattatgcagctggggccagcggaatgctggccataaagtccctgtctcataggaggggcaggtgcaagtgagttacagtggggaaggccctcaggagcccccagtgagcaatagcactcctcaccctccatcccacgcacaagcacccagagagggcagacagctgtaccttgctgaaggttgattaccacggccagggcctccctctgcagcctcaggacagggttacctgggcccgcaccttgccactgtctcttgcaagctgggaacgtttggactagtgatttctcaaacagcctcggtttcctccagtgcctggtgcatggcaggcacacagcagatgggggctgatgctgttttgtttcctgaagtgaccaacaacagccccaccacaggcaggcagctctttcctgtcagtactaggggctg

SEQ ID NO: 13257 - DNA, 1189 bp, Homo sapiens
gcaggtgccagatgacatgagctgctcacaaaagggcagatccatacgatccccttataaagagtgtcctggagtagtcacatttgtagagacagaaagtggaaggatggacgccaggggctgaggggagggggattggtgagttcgtgtttaatgggggcagagtttcaatttgggaggatgaaaaagtcctggagatggatggtagtgatggctgcacagcactatgaatgtacttagtccactgaactgtacacttgaaaatgagtaagatgatacgttttgtgttgtgtgtagtttaccacaataaaaaatcggggaaaaacagtatgtggggcatagtgagcactgggctctgggtttgctctgctgctgctactgttgtacttattaagctttcagctacatgaggtcagaaactcatttctttggctttgtagtctcagcactcagcacccaggaggtacctttgtggaacctcctgcctggcctctaattctggcatgggtatgtgcttgtcactcaatcctcctagctggctcagctgccttggctcggtccctcctgtcaggagtcttcttttggacattgactgtctcattagaatattgttgaatggaacagagtctcataccccaggtagcgggcagtgacctctgcatggtgcagtccttgtcagaacctttgtaccccttggccaggctccagctctgagctggcatatttcagtcttttggatgccactgtgtaaatactgtggtttccttctgggtcctcttctcaaggttttcctctgcatcttgctggtcgggaattgcagcaacacttaaaatattcctgagtgtgaaggttctttcagcaaacactattcatttatttattcaataaatatttattgagcttctactctatgagccagaactgttccagttgctgagcagttaccacagtgcacaatacaaggaaattcctgtcttcagggttctcatttcagtgaggaaagccagacaataatggtggtaaatagaggttatatgtagtgtgtttgattggaaatgtgcttaggagaaagatcgagctggggtgggtaggtggtgttggcatgttagatggaatggaagcaatggcctaaaggaagtgggcaagtgagctgtgtacacatctgggaagagccagcctggcccagggc

SEQ ID NO: 13258 - DNA, 1107 bp, Homo sapiens
gagtgtcggtgtcgaaacccggagcagcctcaccgtgtggaccttcgggcgcccatctggggcaggacaagggggctgggaggcttcggtgtctctggggcggggtttctgctgctctgtgccctctgcctgcccctctgcctctctgtcttcgggatcacccggggcccactatggcttggcctggggaagactagaaatcactgtgtggttgggggagtggccgtggtcagggcttcaggacagtcttcctgctgggcggcccttccagggtggaaatgggggaggagttagctgtggccccagaaggtggggtggttcctgattcccaggagtcccagtactgtcatggaaacccgagtttcccaccccaggggggctgcagcgactgtggccatgggacaggccctgtctgctgccctgcctggagggtgtgctggctctgggcggtgcgggtggggctggggggctctttggaggaggagcattgtgaggatggggtcgggctgtgggtgaacacatacatggctctgtgcgtggcaggcgtgggtgtcaggctcttgctctctgtgaatggagaaggaggagcgggacgtgtgtatagctcctaactggtgtcactgggaggaagcagagaccccgcccactgcctgtctgggccccactcctggccctccggagtctctgagactcccttcactcttcagtcctgccacagcagctgtgggtctcccggagctggtctcacaggggcccgggccctttctcccacaccaggaccaaaagagaagctggggctgcccaaggaaagtcctcagcagcttggggaggcggcaccagggcaggtcccaagtccctgctttcatgggaagcagtgacacgttggtcagcacatgcctcacaacaccaccctggggaatggcttcctttttcccttcagcgtcacccctggtgaccacgcaggggacaggaggatgctgagagggagcacgtcgtccttccgtggggcatccccctgggttgcatccaggcagccgccttggccgggaagccgggatgggaaggctgggattttgtttcagaagtccctggttctgtgtccacctg

SEQ ID NO: 13259 - DNA, 1570 bp, Homo sapiens
tttgagcagttagaagtgctctttagaagttgtctgtgggtgatgttactgtagtggtctcagggaaaggattgtccagttactttagggggtttttggtggggtttttccccctgtgaaaacttactttgcccctagtctggctgctgctaggacttctgaggagcaatgggacatgagtgtccctgtatctgcgccactgccgcaagggaagcctcaggaaccagcacctggaggccaggatagccaagccctgggtgagcgagaggctggagaacacaggagctcacccagggctgctgcccaaccatgggccactgtgaacagacttcagtcctctgtttttgtttcataagccgttgagacatctgatggacttggcttaggccctgctgggacatcccacgtgtgatccctttcactccatcaggacaccaggactgtccttaggaaaatgtccttgagatggcagcaggagtcatattttctgtgtgtgtgtttcggaaagccgctgtgtcctgcctcagcacaaagacccagtgtcatttgctcctcctgttcctgtgccactccagaacctcagcagatctgagccaccgcctgccagtgtgagaggcggccactttcatggcagctcatcaggcgcagggccccagacagcttcccagcaggccctagagcccggcctgggccaatgatggagggcggccgccagcccagggcctgcccatccagaagggactccccagggcctgggggaggagacccttggaaaagtcctctcttcccagctcctgattctggatctgagattctcagatcacaggcccctgtgctccaggccgaggctgggctaccctcagggagatccagagactcatgcccatggccatccatgcgtggacgctgtgtggagagtccaggatgacgggatcccgcacaagctcccttcagtccttcagggctgggccatgtggttgatttttctaaagctggagaaaggaagaattgtgccttgcatattacttgagcttaaactgacaacctggatgtaaataggagcctttctactggtttatttaataaagttctatgtgattttttaagagggtgtgatcgttgctgagatttctgtctgatggtgatgatttcttccctttacccatctatgatactctggggcctggcagagctggaggtctgagctttattctccccaaagggtgagcatcattttcaagcacattcaggttggcaaatgcaagtgcatctggacgcagccagatcttgccagcaagtgagtgtgcccaagaaggcacattgacaaaaccaggtgatgccacacagttcagctttctgctcccaagctaaccaagcaactctctgtctctaatggttgccagaaaaggcttttagcaccatttagcactaaaaatatagtacatcatatagattgttttttctctagaattcttaagtctggccaaaagtgaactctcgttctctgtttctctgtgtgtctttgtgcatgcttacatgtgcattcctgcatcctggaaatgtttttttg

SEQ ID NO: 13260 - DNA, 1099 bp, Homo sapiens
gtgattggcttttaactcagatgtgtatgtggtgaaagctctgagcctcacacctgctgtctgttgctaaaaaggaattgataaggcaacgaagggatggggaggggctgtgctttggggaaggagctacagagggcagggcctggcagcagcaccagaccattcctgggcaggagtcagctaaagcttcatgccaggatggtcaggagattccaggcagggagttgtgggtcagggagagcaggtgctaggggccacagccctgtagagggcgggtgcagcagggtaggagagctgatggctccaggtggctggagtcaggagcatgaccggcactggggcaggcagcgtggctgtctcctgaggctgctgagtgagcccccatgggggtagcggcagccagcgaggaagctggcctgtcatccaggtgagctgggctttgactggagtgtccagctatggaaagggggctgacacctgtgcttcctctccaggcctctcaggaacctggagctcctcggccaacagcatcctccacatcgaccccaagacgggtgtggctgtggcccgggccgtgggatccgtgacggtttactatgaggtcgctgggcacctgaggacctacaaggaggtgggctctaagcagccggaggcacatgtggctcagtggcctgtgaggcgggcctgaccttctgggaggattatgaagacttttccttttagggaaaagccgtctgaggggttgggtctgggagtcatgagtctgggactggccacttgctgactctgacatggggacaagctcccttttttttccaggcttcagtctccccatgttcaagagggtgtgatgaggacaggcagccttgtagggtggattccagctcccatgggcttgggtctggcaaccccggagtgggcacttcctgggagccggtgcttccctgtcacctgcaaggctaagactccctgtgcaagtcaccctttgagtctggaggcgacaaaacctgctgtctcttccattcatctccagttgagaatgaatcagtggggcaagtctggctgagatccaaatgcatctcatttttagaggcagcat

SEQ ID NO: 13261 - DNA, 1121 bp, Homo sapiens
agacacacactcacttaaatctttagactctgcctgggtcacagacctctttcattaattcacatcattttgtttcaaaatgggtgcctggcagcaaatcccccgctctagtttttggtgagtgaaagtgactgactgctcatcctatttcaacaaatatgtactgagcactagctgtataccagacactgcaccactgaactttgttaaagaaattcagacctttggagcactagcttttgagcgaggatagattttcacctggactcagagaaacaagggctgctgtttatggagctcgggttcttgggctccagaaatccccatttccctccttcccctggtggcctgcagggcatgctgtggcctgcttagcgctgcccctgcgatcgaggaggatttcgtttctttaaatgccccaagagccaggttctctgaagaaactggacatttgcagcccagggggccctcttgcaatgtaaatagtgatctcatttattcaagtcatggattgggacactcctgggtgggttttctcatagagaggccagtctgctgtgttgggaagtaagaaccttgtcactaggttgggacactctggggagtgtggcctttactcctctcaggacccctaagtccagccctgcattgttcctgaggtggatcctgctgggggcaggtgtcccctccttgggaggtgggttttcctggaggccagtccctggcactgaatcctcatcatacctgtatgttgtcccttaggtatcccctgtttcctacctgagggtttccatgagccctgtcctgcacacccagaacaaggaggccctggtggccgtgcctttgggaatgaccgtgaccttcactgtccacttccacgacaactctggagatgtcttccatgctcacagttcggtcctcaactttgccactaacaggtaggatgtgggcaagggtcatttctcctatgaagtcctgtctggtacctggtagagacaactggggataacacagaaagtctgctgctgttgaaggaagatgtgtattacttcagtttccaagagatgtgggcatgctgcaccatgcagggccacgaggaaacaccactgcccttgggggat

SEQ ID NO: 13262 - DNA, 1196 bp, Homo sapiens
ccagtggctgggagacagcccccagcattggcccaggaccctgggccctctggtcactgctcagagagaagtgatgtccatgtcccaggttttcctctcatgaaacatgtagtgtgtgagttatgcttggcgccatgggcttggggcacagtagtcctttctctcctgtgtctctcaacaggtctttcccccgttcaggctgatgcccaggaaggtgacactgcttatcggggccacgatgcaggtgagagccaagaggccacgtcctgctccagccccagtgcaggccaccacctggttccaggcacgccgcctctggccctgcgtgcagtgactgggagaagaaggcagaagctgcctgcactggggccctggctctctgagtgggaggtgcgggctgcctggcatgacgggcactgacacgccgctgtttcctccccgctcaggtcacctccgagggcggcccccagcctcagtccaacatccttttctccatcagcaatgagagcgttgcgctggtgagcgctgctgggctggtacagggcctcgccatcgggaacggcactgtgtctgggctcgtgcaggcagtggatgcagagaccggcaaggtggtcatcatctctcaggtaacaggcgtgctattggagactgggcagctgtgcctgggacagaagcctctttactgtgtttgagttctacctctgaggaccacccctctccaagggtgctgcttctgccccctgggtctgcagtcactgcaggggccctggtgcaggacagccctgccaatatgggagcacccagacccccattggttgttcttctccaagctgagtctcccagtccttccagctgctccttatgggacagggtgttcagcaactcccggccccaaagggcccttccagtggaggatgatggcaatcatggtgaaggcagatgctgctctgagcactttgccttcatctccttgaatcctctcaaggctcagggctaaaatcagggcctttgcattctccctgacctccttcgccagcagtgacttgcagaagcatctcggaaggctgctttggggttccactcacagctgcgccagaaacctggtctgtaagaagagccttctgtgatgtgtaatgcaactgtggacagaaacctgtttcagagtcagtcataccattcctcatgagaactaggtc

SEQ ID NO: 13263 - DNA, 1172 bp, Homo sapiens
ttgcgaagttgcccacgggttttcctgaggaggcaggaggtcacaggtcgggggtgaaaggcgggcaggggaaggggtcaaggaatagcagccaaggctcatcacagcatatgcctctcctgctttttatgttggcctggggcttctcaagttccctggaccttgggcttttgtgtggagagaacttgagctcccggtggccatagcatccctagagttcaccctggctctcctcttttactccagtttaatcatggtttcacatagagataaaccatgcacaatgggcagtcagtgtgagggctcagtctgggtaatgccctttttctgggtgcctgctatacttatggagctcccctgggacctctgggttctgaaagtgaggatttgggaatgatatcttgtttctttcctcttaacttccctattcccatgtttaaaacatctctttctcttgctcacaccaccacttccccattccctgtccgcacctcactttgtctgccttttctttatgccaagaatgtacgccctgcagaagtcaggctgctgattttggaaaacatccttctgaacccggcctatgacgtctacctgatggtgggaacctccattcactacaaggtgcagaagatcaggcaagggaaaattacaggtgtgtcattggctctgccatcatgacagatgcttccttcctcctttttttattgtggttacatacatgtaacaaaatttaccatcttaaccatttttaagtgctccatcaggtagcatcaagtacattcacactcttctgcagccatcaccatcatccatccacagaactcgttcatcttcccaaactgaagctctgcattgttaaacactaactccccttcaccctctcccagcccttggcactcatcactctatttcctgtctctgtgaatgtgactactctggttacctcatgtacgtggaatcatatagtatttatttttttgtaactggcttatatcacttttttcctagcctgatgtcttcaagtttcatccatgttgtagcaagggttggaattcccttcccttttaaggctgaatagtgctccattgtgtggatggatagaccacattctgtttacccattcatctacccattcatccatcagcagacacttgggttgcttccacttt

SEQ ID NO: 13264 - DNA, 1218 bp, Homo sapiens
gctgctgttttcgtatctcttgccctgtcttagcatcttaggttgggttccttagaagcagagcctgagttggggggtcttgtgcatgtgttggttcatttggggagacctctcaggagaaactctgaggagtgagggatgagaggtggacaaagctgtggcccacgtgaggtctgaccctgtgggagctctagagtgtgagtggcccccatagaactggctgctttgagagtgggggctgagctctggccccatgttaacctgttatgggctgggctcctcccagcccccatagggaggactccacctcgcagacagttcaccaaagacagttgtgttgtgagctgttagcgaccagcatgcacagcagcaggggtggatgagtttgcctgcccagtaaaggagacctggacaggcccctgcatatctgctggacttggtgacttatgaatggtgactctgcctcatgttgctatccacaggctccaccaaggacctgatcgagacttgctgcgcagccggacagcagtgggccattgacaatgacgagtgcctggagatccctgagagtggcactgaggacaacgtctgcaggtagggtgggctccctggagcaggcggagctgcccatttgccttctccagaaccctgcttgcctaggaccccaggctccaggcagcccggagagagtgcaccttcacatgcctctggggcatgagggtgattgggtgtggctgccgtgcgccatctggccaggctttctccaggggtggaaagtccaagactggtcctaggaacaaaccagccacataaattggtagctggcctagtgagcaagatccgaggaatgtacaatttgaaacaagttttaaaggagtgctgtcccctaggaatagtcgggtgctcccctcaccacattctgcagttgctgccgcactcatgccactcaggctttctctcctctgccctcttcctttctctgctttgctacccttgggtcttcaggaggctggcctctcactgtgctcccttgctgctgtgctggttgtttcttctgactctgataccacagcaaagcaatcctttatccccatgccttcccttttccaggcccaggagagctcttggtcagctgctcatgctttgtttttttccagggaccccgtctaacctactcatttttccaaataagaaagattaagttcagagaggcagtgt

SEQ ID NO: 13265 - DNA, 1223 bp, Homo sapiens
cctgctggttcagtgctgggcacataaatcattagtaacagcctgctgcatgaatgaaccaacacctctaggaatggctgagaggcccaaataggcaccttcaggaggctccacccacagcctcttgtatgagtgtgcaggacccaggttatttctagcattacaggcaaatgtctttatactggcctcagactactctccacataaagtattaaagtttacaaagcactgctacatcctctcccctggatcagggtagagtgggtggcttaggcaatgtgcccaaccacgcagctcatagcagaggctcctgtgctcccttagctttcagaacgaagctccttgccttccacccactgatcctctcccctcctcatgcatgtagcaacatgggcccatcctcatctagggacaggagagatctgctgagctggtgaggtgtagagcaggtggcacctcatcacctttctcctttccacagtggactggtttcctgttttccgagacctggtcaacattggcctgaaagcctttgccttctgtgtggccacctcgctgaccctgctgaccgtggcggctggctggctcttctaccgacccctgtgggccctcctcattgccggcctggcccttgtgcccatccttgttgctcggacacgggtgccagccaaaaagttggagtgaaaagaccctggcacccgcccgacacctgcgtgagccctaggatccaggtcctctctcacctctgacccagctccatgccagagcaggagccccggtcaattttggactctgcactccctctcctcttcaggggccagacttggcagcatgtgcaccaggttggtgttcaccagctcatgtcttccccacatctcttcttgccagtaagcagctttggtgggcagcagcagctcatgaatggcaagctgacagcttctcctgctgtttccttcctctcttggactgagtgggtacggccagccactcagcccattggcagctgacaacgcagacacgctctacggaggcctgctgataaagggctcagccttgccgtgtgctgcttctcatcactgcacacaagtgccatgctttgccaccaccaccaagcacatctgtgatcctgaagggcggccgttagtcattactgctgagtcctgggtcaccagcagacacactgggcatggacccctcaaagcaggcacacccaaaacacaagt

SEQ ID NO: 13266 - DNA, 1106 bp, Homo sapiens
tatactgggcttcacacttatcttatggcttggcagaatctttgtagtgtgtgggatctctgaaggccctatttaagtttttcttcgttactttgctgcttcatgtgtactttcctaccccaagaggaagttttctgaaataagatttaaaaacaaaacaaaaaaaacacttaatatttcagactgttacaggaaacaccctttagtctgtcagttgaattcagagcactgaaaggtgttaaattggggtatgtggtttgattgataaaaagttacctctcagtattttgtgtcactgagaagctttacaatggatgcttttgaaacaagtatcagcaaaaggatttgttttcactctgggaggagagggtggagaaagcacttgctttcatcctctggcatcggaaactcccctatgcacttgaagatggtttaaaagattaaagaaacgattaagagaaaaggttggaagctttatactaaatgggctccttcatggtgacgccccgtcaaccacaatcaagaactgaggcctgaggctggttgtacaatgcccacgcctgcctggctgctttcacctgggagtgctttcgatgtgggcacctgggcttcctagggctgcttctgagtggttctttcacgtgttgtgtccatagctttagtcttcctaaataagatccacccacacctaagtcacagaatttctaagttccccaactactctcacacccttttaaagataaagtatgttgtaaccaggatgtcttaaatgattctttgtgtaccttttctgtcatattcagaaaccgttttgtgcctgctgggagtaattcctttagcaattaagtatttggtagctgaataaggggtcagaacttctgaaaccagagatctgtaatcatctctattggcctggggtgcctgtgctataaatgagtttcttcacatgaaaaacacagccagcccaagatgacttatctgggtttaggattcaatagtattcactaactgcttattacatgagcaatttcatcaaatctccaaactcttaaaggatgctttcggaaaacacgctgtatacctagatgatgactaaatgcaaaatc

SEQ ID NO: 13267 - DNA, 1420 bp, Homo sapiens
tatgtgtgaccacagtagcacccagaagtaacacataatggctcagcaaagtagaagttgatctcttgcccatatgacagccctggtggggtttagatctgcacaatagctttcttccaggtggcaagtcaaggacccaggcttcacctatcagtggctctgccatcccctgagctctcgccattatcttagttcatttagtgttagaggaacgactgcagaggggcattctgggtcagtctggatatagtcctgtcatttctgtttacttgccattggttaaagcaatccgatggctacatctggttgcaaggaagaataagaaacatagtccagctgtgtgcccaggaggagaagagtgagttttaatgggtagctccagtctctgccacaattgtcgaaaggaagcagttgatggattggttcttggtgctaccaagggaagtgatcaggttttttaatccaatttttttgtgtcatgatgaatccattttttaacatttctgtcacaaacaataagcagtaatacacagttgtacaaatatgttctgtttttttttctcttctagtcaacgaaacggaatattccaatgctctttgtccggggagatggcgttgtcctggttgcccctccactgagagttggctgaaacaaagaatttgtcctgtatggaaaacgggagactttgtacagtggcctctctaaaagtacaaaacattcataagagaaacctgcatacattttgatattaagaaataattccggggattcttccactcctgaaatgagttgatttgcagataactcacaacttcttaagctaaatggtattttcatttttctcaagctctccaataaatatgaccaccaagatgcagaactctttcaggacttcttttgctccattattctcacagatacttactgatttttcttttctttaaattggtgtttccttgtagatttttttaagtgcggtcttctgtcttgtgaattatttaaagtaagcatgtcttaccttcacttagcacacatttgcagtgcacctactgtgtttgaggcaccaggtttgagtgctgggaaccagagttttatcaaaatgctttctgggccagacatggtggctcatgcctgtaatcccagcactttgggaggccaaggtgggtggatcacctgaggtcaggcgtttgagaccagcctggccaacatggtgaaaccctttctctactgaaaatataaaaattagccaggcgtggtggcgcatacttgtaatcccagctactcaggaggctgaggcagtagacgcttgaacccaggaggcagaggttgcagtgagccaagatcacaccattgcacttcaacctggtcaacagagcgagactccgtgtcaaaaaaaaaaaaaaaaaagttttctgccct

SEQ ID NO: 13268 - DNA, 1221 bp, Homo sapiens
cgtttgtgtctgcatgaatctgtgtgtggggggctgcgtcttccaggccctggctaggtgcacgtgcgtgtccctgagtgtggttgtgtctccaggtccctggttgtgggcactcgtgtgtcctcggctgtacccaagagggtgtccctggtgcctagagggtccaatggccagagctggttctccagggccggcgctgagtggggagaggtgatagggcagcgtggctccataggtgcatgcactccataggtggtgtgcaggtggcagcgccagcgtccagcagtcctgagtggtgggaccaaggcccggaggggcagccaaggggtagtggacagccggcagggccagcaggacacttccccctccagactatttctcttccttctgtgggttcctcttttgagtaggagattctcgtccccctcccactagggaagccacacagagagaattccagggacctcctcctacagcctcaaagcttcagcctggacttcagcctggactggagaggagacctgtgggcagctctcccaggcagggaggtgtgtgccgggtagggccaccggcctggctattttggtcactgttgggcctctgccagatcccggcatccccaggaccagccccaaaagcttgggaggcagcctgggcccccgtttcctgtctggggaaataaatcagctcagtaattgcccagacacttgaatggagggtcttcgggctgaggtttactggcgcatggctccatttggacttcactaaattggcccccgctttggcacagctgacgttcaagtaaatgtcactgaggagatctttttaaaatttctttttaattttttgttggctagaagggaggggatcttgtccagagtctcctagccagaaggagtttatttttatgagagagagagcgggtgagtgcttagcaaccacctgcctccctctcgaccagggagtcacccagggattgtggggtgggcatgaggaggtggggtgggggaggaatttcatcaagatggtgttggagaggatccaaagggggcctagcacggctaagaacccccaacagggtgggactggtagaatggtgggaggtgttaggcctggctcagcccccagttgaccttgggcaaccctttttctgcctcagtttccttacctgtaaaatgggtggggcagactggttatagagtaaaccagggaccagaggta

SEQ ID NO: 13269 - DNA, 1117 bp, Homo sapiens
atctacccaaccttctaacctaccaccatccatacatccatctaacaaactgattatctatgcaacaaatggatatctatccatcaatccaacattcttcaatttagctgtttatccattcatctggccattcattcaatcatccaactatccatctgttcattcatccatctatttatctcatctattcagctatccatccatccatccatccatccatccatccatccatccatccaaacatccaaccatccaaccatccaatcaaccatcctctttattatctatcttttcatccatccatctatttatccatccatccattgttctatcccccctgccccctgccatccatcccatttatctaaccatctgttgtttcacctttccattcaaccagccatccattcaccctataaatatttggtggtcactgttgaaaggcctcttgtggcctggggcctggggataccatggccttccagttgagtatgtggccgtggtgggtctggcctccctcagatgtttactcatctcatttgcccaacctgcaggtatcggctatgcctccgttgtaattgtgtccctcctgaatgtctactacatcgtcatcctggcctgggccacatactacctgttccagtccttccagaaggagctgccctgggcacactgcaaccacagctggaacacacctcactgcatggaggacaccatgcgcaagaacaagagtgtctggatcaccatcagctccaccaacttcacctcccctgtcatcgagttctgggagtaaggccacctcattgaagcaaggaggaggacatgggtggggcagagaggatggcccacttccttatctcctcccctgggatacaggagccactgtcttcgggggagtgggaggagggtgcagatctggagataaatttatgcctttggccatagacaggactggaatcccagttctgccacttactggctgtttgaccttaggcaagccactcctcctttctgagcctcagtttctttacctgtaagataaaaagaatgaatcattactaccctgtgaggcaggtatgcatacttatgttgtctaaaaatgatacagttttcttaa

SEQ ID NO: 13270 - DNA, 1169 bp, Homo sapiens
agggacaatattgggggagggcaacactttatagacgaggagccagaggtctgggaaagttggctaacttcgttctgtcagtgacggaacaaacagtagagctgagaattgaacctagtgtttggcccacggttggcactgaagaaggttctgctgaagtcccaacagaaaatcagtgcccatttcacagatgaggaaactgaggctcaggggttccttaacttgcctgaggccagactaagttgaacctgggtttgcctgaatctggagtctgagtctatccttttcttttctttccaacaactctgtctcaagacaaatggggattcctgggtttggaaaggtgaggtgacttatgtaaatgcagcgcctcaggtgggatttgacccccagcctgttaatgtccgagccttggctctctctactccagggccaggcccctcactgactcctggctctgtgtttgcttcaaggcgcaacgtgctgagcttgtcccctggaatcgaccacccaggctctctgaaatgggacctcgctctctgccttcttttagtctggctagtgtgtttcttctgcatctggaagggcgtcaggtccactgggaaggtaagttggacttctgtccgtcccctgcctcctggagagctgtgccaggctggccctctcccccacttcccgcctgcaattagccacgccccaagagggaggtggccagtggtggcgtgctggtaagcccgccctctggaaaaaagtaaaactcaggtttgttgtagcgtttgtccatttcatggtgtcagtgctcccaccatgtttgctttcaagctgtccacagtttaatgaccagctcacagaattcctgaatattgaagagccaggctctcaggagcctacacgagctagccccatccaccacagctttctcatctcaaggtattggcagtcagtgcagatggtagcagataactaatgttgggcttctaataaataggttagctggtaacaggaggttagccagcaaccgtggtaagagccattagccacagcatggaccctcgctttgcagagggggccacaagcattcccatcagcattgcagggagcttcgtgggcctgccccaaacctacaaactccaaggctgcgttgtaacattatccccagataatccaag

SEQ ID NO: 13271 - DNA, 1173 bp, Homo sapiens
ttcctcaagccccatggctgagaggctgcctgctcgctggccatggcttccagccctggccacagaccaggtttgtggctgacgtgggggctgggcccacaggcagcagatggacctcatcctgccaaggccctgctctcgtgtctagtccagcaaggaggagttggagggtaatggagggagagccccagcctgagaggctcaggatctgagttcaagtcactttgcctctctaggttgcagtttccttttttgtaattttcactattccaggaagttgaaactaggctgccattaatccattcaacaaatagtgataacggtggcgaaagcgcagtagcctgtgagtgccgggcagcattctcagtgctgctaggtagctcattgaatcctcctcatggtttggagtatgtgcagttattagtcccattttacagatggggaaattcaggttcaaggaggctcattaccttgcccagcatcccacagcttgtcagtggctgtgctgggatttggacccaggcggccccactcccgacctgggtgccccacactcttccgcctcttgtgcccacccccgtgccagcctgaggatgcagtaagtagggcgtgtggcaggcatgtccctgctgtcacagagtggggtctgggaagggggcagagatccagacactcacacaggaagtgcaagccctgcagacgcacaggggaggaggccccggagtgagcatggacattcactgaggctggggctcttcgctgttggcctccggagcagctctttttgcctggttaaaaacaaagcagggggtagtcagagccaggtccttttagctctggatcccccagactgcatgactttgaacaaggccctttcactttctcagcctcaccttccccttatgtgaaatgagttagtgaagcccctcaccaacagccagggcgctgaggatccttagggcctgcctaggatctctgggatcaatggcgagccctgctgcccaggcccttacctcccaaaggatgcctggctccccctgctgctgctgctgcccagacacttacctcccaaaggatgcccggctccccctgctgctcagccaccctcttttctactgcccagaggggatggagaaaagttgtccttgtgagtttcctggacagttgggccac

SEQ ID NO: 13272 - DNA, 2153 bp, Homo sapiens
ctgcttagtgaagattctggagagcagctttgcctgcatagttccttgggacctccttctgcattctaactcgggggtctgcaaacagtaacaacaatggtggtgacagcagccttgacttacgggcttgccatgtaactggcactgggctgaatcgccactctttgaacctgggaaatagctctatggggtagggcaaaggagcccattttatagatgtgaaaactatctataaactgcaggagtgatatttacttgcccactgtcattccagggttggaatccagatccatctgcttctgaatcctcttaaccctgatgctaggtcgctgggaggtggggtgtttgatttctggggctccttgcagctcagtactgccttgaaaggcaccttggattcgagcataaatgttccatttgcatgtgcaaggtcccgtccccaggccatcgccaggtggacataaccctcgctgcctcctccaggaagccagctctgacagccctcctctctttccttgccacctccctccccctcataggtgtggattgacgctgggactcagatattcttctcttatgccatctgcctgggggctatgacctcgctggggagctacaacaagtacaagtataactcgtacaggcaagtgttgcgccggcgggcctggtggactttagaaatgatgatgatgatgtttaaagaaaaagagaagtagggagcgtggcttccttgtgttgtgaattaacttgctccctgacatatgtgtaacttagggactgtatgctgctgggatgcctgaacagtggtaccagttttgtgtctggcttcgcaattttttccatcctgggcttcatggcacaagagcaaggggtggacattgctgatgtggctgagtcaggtacggtggtatcggtggcagtggtggtgggcactgccacctagtgtgtaagccaagtactgcaggcatgaagccagaccccagggggctttgaggggggacgagcctggtttctaaaatggaccccccccccgccaccaagatatcccccaaatttcaaagagtacaaagccaaattttaaacatttgtattgcaatttggccctgatgggtggcaaaagcatggggggtggttaagttggggaatttttagctaccttagtgtggtcttccccgcccccccgtccttccccagcaaactcctggtttccacaatagaaaccactttcctaactcaggcccaagtcagccaccaatcggcattccatcaccaccttctcagccttggtttctgtattttgcactttgctcccagcgtgctccctctaagcagacgcattcatccatcccaccgatttctcgtgaatgagtcccaactctgtgtcaggcaccaccgtaggcactgggtgcagtgtgtggggggagggcgtagatgaggggacgacctactgggacggtggcagatccaactgggggtgggttgtaagcacagtgtcgcccctcggggtgtgggccctgttgaccaggcactcttcctcgggctacctggagtcacaggcatggaggatgccagtggcttagaatcacggactctgcacagacggggaacttaggaatctgggatcccagagttccagcaaggtgcttctggaacctgagaatcatggggccttcagttgctagaatctgcaatctctcaggtgcctcgattctgggacttggccatggctgcttgaggtcctgggtctgtagctttaattgcagtggcttgggttatgggattccctcaggctcccaggatcctcaaagtccacctttccgacctctccacccttccccggccctgcacagtttacttggagggtggtcatcagttggttttgttattttacatgctgagcccccagccccaccccgtccatgtcctaatttcatacaacttccctggggctacctggaggtggcaaggtcctgggctgaggctccttccaagccgaagggagagcgtgggggttattaacttcagggaccaccatagactagggccagacacagccggaggccctgccattccactgcccttgacctcctgtgccatctgtatttggaacatgaggcgatgtcccagtccctgagtcctagagccctagcact

SEQ ID NO: 13273 - DNA, 1188 bp, Homo sapiens
gctagagatccaagaaggctggcaggagtgaggctcacaactcagcctcgcaagaggtggcagaggcacaggaggccacagtccttcctggggcattccaggcagagaaggagcagaggctctcccggcaggagctggggtctcagggctcagatgagtctgttgcatttgaatggggtcatagcaggttctggtcattccccaagcaacatctcagcatctcttaaagttgcctgcaggaatgaagcatgacatacctgttgagggactaggggagtggtggggaggtgagtggaccaaaggatataggccccaggcatgcagatgggcccggtgtcggggaggggtgctttctttcctcatctccccactccccactctcagcctgggagactcctgccaagccctcattaaagatgccaccctgggctgccctggcacctagcaaggcacaccaagaacagcttttgagtctgtatcctccactgggggaagtgctcccagttcagaacaagggcagcccgtggtgctgacctaggatataacaaagctcttcacttcaaaacccctgcaatagctgggtttacagacatttaccacctgcggacccaaaagagaaggcctaggagagttttctagaaggttgggattgtcagggtcctggcccctcagaactggcttgatcaagggccttatgtggagcagaggttgtctctgaaccaggagagaaggtactatacctttcaaatccccagggcagacacacccccacccagcccctatttggacctaaactgtgccatttgaacagtcacttccaagctcagtctaaatgaaaccgaaacgtgaccacgcacaaaggcagtcactgcctcgaggggtgcagaccgcagaattttcacagcaggggctcttggaaccctggaaacccccttcttaaatttgggaggaggagtatgcctttggtgtccccctcccaaggggcaattctgaaccccatctttggcaggcatacatatttcactgtttccaaagctatctactctgccaaacaacacccagtcctattccaaactctcaacgattctatcttgttcctgtttttctatgtatttatggttgccgtttgtgtctgatttgattttactgttttttccctgattttatggagtagcattgtgacctgtt

SEQ ID NO: 13274 - DNA, 1161 bp, Homo sapiens
tttattacgtttttgagttgtgtgtgtatgtgtgtctgtgtgtgtgtgactgtgtttgtgtgtgatccacacttcccaagcactgggcaccttgaacttctgttatctgagggattgggggtaacttgaagctaaggacaggcttttatttttctgattgtgcagagaccagctggagctgacacacacacacacacaaacacacacacacacacacacacacacagagagagagagagagagagagacttgtgcttcaatgaccctcccccttgacattttctttcttttattgcagcaaatgcttccagaggacccctttccaactccccctccccaggctctggctggcctctgtgcacaatcagaaaaataaaagccagtccttagcctcaagttgcccccaatccctcagataacaaaagttcaaggtgcccagtgcttagggagtgtggagttgagggcggcagcaaattcctatcagggagactgctcagaggaggaaggcgctgcgacccagttgagaaggtcagatttccaccagcagattcttcctgtggtgtggcctgattaatttccctccttatgctggccctttctgtctctaatagacccttggaatgttagccagaagtgttatagaagtcatcagatccaacccttattagagagatgggggaaacatagatgcagcaagaaggaaacaacttttcattcatgcaacaaatatttactgggccttgttctgggtattgggggataaaactgtgaacaagaaaaagaccctgtgaaacagagtttacattctagagggggagacaaagaacaagtgaacaaataaatgtgaatggagagtttcagagagtcatcagtgatatgaagacaacacaggaatacagggtgatgtagaagagagtcccgcgggagggtgcttctatagcaggatggcctaggatgatcagggaggcatccctggaaggtgactttgagctggcactaaagagtgagaaggcccagccacaccaagagcagaaggaaaagcaaggcaggcggagggaacagcaaatataaagaaaagccctggtcttcagggggttgtgtggggaggacagtttgacctgttggaggaagagaaagaagaatagaggaagggagagaatg

SEQ ID NO: 13275 - DNA, 1150 bp, Homo sapiens
ctccagcctggcgacagagcaagactccgtctcaaaaaatatatatatataaaattgtgctagtgaagatagtttttcaaactacatctagacacaacccactgttccttggagcctcttattctagtgggacatctcctaattgataaccattttctggtggtactttttcaaagatgtatgaccttctcactgtgtgatctttctgtctctaggaccgcctatggctgcggtagcagtgagagaagctctcaggtgagagtcttataccctgatgttaccttttttgtctgggtgcattttggttaaatgtccacgctgccccacttccttacattacttgaagattctgttttacttcttacattgtgatatcctggaagaaaaagcctttgtcttccttttttatatgagaataggctatatggtttgtgacttattttcaaaagtaatagaaaatattttttgaaactacttctctcctcctctgactggatttaagtctttattgaaagcacttgctttaacatagtttctctttcaatttctctctcactcttagtctcatttttttgtctctgcttgtttttccagaaggtgcacattcctccttgttcatttttaagcagcttccaaagctgctgttgatgatgcctgatgctgctttgaaggcagaaaaccaacagtgagatcaagaattgtaagaattcaagtgtataaagaaaggttgctgctcaattcaagtgtataaagagaggcgtttaagatgatccaggaagttggtgtgggagaacaaggtggggggcacttgtcctatcagagagcaagacttacgctaacactgcagtaaaaagatagtggtggtgaccaagagaaagacacagagaacttagtggaatagaatagagaacctacagttatatccacatatataggaaaaacagatatggcagagatggcatttcagatcagtggggaaaaggatagattttccccatatagataatccattttccagaactatttcttgaatagaaaatggtaaatggattatctacatgggaaaaaaattagttggatccttacttctcatcagattcaagaatcaatttgcagatggattgaggagttacatatgaggggaaaactg

SEQ ID NO: 13276 - DNA, 1113 bp, Homo sapiens
tgatttatgaaggggtcagaaattctcctagccttgaattcagattatgtcctgcaatttaggcatcattcatacggaagacaattattttatgattcaagattggggcatttctgcagtacacacaaaaggcccaaggtgagataaggtctcagtgctacagttaatttgtatattctttttaatataatctattgaacttactttaaaaggaacggaaagaggggaaaacaagcaatccaaaatgtatcagagagagagctggagttgaggatgccttgctgattttctgaaaatcaagttaacttttctaggcagaatggccacagtctgcagtcatcctggaaagccctgggggatgcatctgcatttcatcctgtctcaagctgtaaacctgactttatgtatatctcattgcagagagacaggggtgggggttctgcttagtcactaagcggctgagtctacttagagcttttctactattcagacagcttcacaaatgtggaaggacaggtaaatgcagcatgatcatactgtgcataaaatgttggaagctactctgagtttctttatgtcttaaatagacaaacaggtcttcttgatccagggatgcttgtgaacatccagcagcctttgatacgtgaggatggtacagttctcctggccacggattctaaggtgacgttctctactcatgctctctctcatcctttatgttgacattgcaggctgcttctctaactgtgtgcaccactttcttcctggccttcagagaccacatcaaaagcatgacctatgtctcggtctccttattgttgtgatagctatcttgtgatttgttttagagatgctgatggcttctcagatcagagctggctggtcataatcactgtaacatgtcagtctagatgtcaatttggtggacattcagtggttctcttttctgttatagttttctttttctcttatacacattggcaaactactagccaaggaaagaaatacttatcagatggcctttttgcaaaagccccgggttcctttttattagatgatcttcaggaggaagctcagccaggaatctatcagttccaaaactttgctagagca

SEQ ID NO: 13277 - DNA, 1873 bp, Homo sapiens
actcccttttatagattggcccggatcctcgttcgcctgccggcactcaggctgatgagctccaacataacagaagaacttttttttactggtctcattggcaatgtttcgatagacagcataatcccctacatcctcaagatggagacagcagagtataatggccagatcaccggagccagtctatagcgcaaaccacacacctgccaaggagcaacagaatccttccaggaccgttcacatacaaagaaaagtagtggtattttggtatgtgcaaatatttccatatgttagccatttcctgtctggtttctccttatctgttaatcccagacaatagcaattaaaagactagtaggatcctttcctgacataagaaatgttttaatgccttttgatgaagcagcagattttggaacaatcttttaactcaatttgtatttagaaattctcaaagggcaaaaaacaaaaaaaaaggttttataatgtcagagactagtattaaagaaaactgaaagaacctgagagaatagtatgtgtgtatatatatatataaaaaagtccttggaattatagatactaattaccagggtaataatattagcactttctaagcacttatcaatgtgtaacgttagcaacatcttgcctgtgggcagggcaaatggaaaactgtgtatgtcttttgccgaaatgctaatgatttctgtgaaaactcactagggtacaggagacaatcatttatgtttaagaaaagaaggcatcattcctaattgtgtgcacatgttgtggagttgagctgaattctgtgaatggaaacgtggctcatttgcatcatgcagtaagtgggagtgtggtagcacagtcggtggtgacccagttcagaagcttctagccatagagcagacacttgtcaggttccctgactacttggtcctggtctctgatgggcatctgcagactcctctagaacctggggttctcctttgatgactggttatctgaattggattgcaactagtcagacattaactgccaaatgagatgtacagttcctccagcaagtgaaaacatccccaagtcacatccgccgctcgtggcagatggagccttgtgaccaaaaagtgcaaggtgggcattttgagctcttgacagtacttccaatacaattgggggtgcttgtgtgtttgtccagatggaggagtgtggccttggagtgtgagcgttaccttcccagggctttccactccaaatgcccccttgaaaagggctcgtgtttctgcagctccatcataactgtgaggctggattggggctgggcaggagcctgctgccgcctggcgagagtggttagggcctggtaaagctggatggaaggtttcaggacaatttcttcctgttgaccttaaataccagagattttaaaaatgtgtatagactcagcatctctgttggcaagtctgttaatgttaccagcacactgtgcactttggttcccccaggtgtgtgccagccgaccaccccggagcattttaaatgcaggctgcttgctccttaaaaacaaccctcaatttccagggtgatagtctttctcctcataaattgtagcaaccagagtttacagcaagaacagtatgcgcttaaaaggaagttatgtctaacttcaaacacccgtaaattcccacggatgtgaatatatagcaagcttttcctgtttgagaacagtggcatgtggaagacccggtcaattgctttgtcttttgctttttaaatagtccagattaagaaaatacaccctgttgggttaaatttgcctctcttgatttgttaatcagatgatatccaaaaagatccctggacactcccctgactc

SEQ ID NO: 13278 - DNA, 2162 bp, Homo sapiens
aaaaaaccagctgagacaatggaattagggcaggtttgtttcatttctgcttgtgaaggcttttagtagcaggcatcctgcagctcagtggtgcctctaacacagattgttgcctgccttccgtcgttttgatccttgagagtgaccatgagggccatgttgcagttccctgggaatacaagcataacagctttcagatcccagttcttggtgttggtgaaaaggtctccaccagcccctcctctcattcccaggtcattcagtggcagccagtaggctgcttagactcaggctggataaggaagtgttgggctgtggtgaaacaaccttgcagaaaacgtgattttgcttggaaaggtgctgattctaacctggtcctgctctttaagtccccttgctggtgatggctgattccagggactgttttgggctttgaacacctcttggttggtttctgagatcctcttggccttactttgaagtggccttttctttaaggatcatgtccacgtaacctgtattcttgctgctttaactcatttcaagcctctgactgcaggtccatttcatctcctgtcaggttggttaagtaaagtcagcccaaagtcaagaattacttaaagagatgcaaaccaaatatttgggctccaactttcacagggcttatagcccttattagcagtttgtgaaactttgggtttcatgaagtgagacctgtcctctggctactgaactccatggagccacgttcatgctccctcttctactggcctggctgctcctccctcaatgaggagaggcagctggctcagagaggtgggacagacacatgctgtcatcagttaagtgagctcttttccagaagtatctcagataatgttgggttaagacagatagatgttgaaaatggtggagatcattacacattagcataaaacaggacaggaagagattttttgaaagaccaaattagttgagcaagtaatacttttcaagttactcctggaaggtgtttttaaggaagtgtgttacctaccatactctcctaatttgacatttctgtgtcctgaggagttacatttattgtctaacccttgccataaggctgtggtttgaggttcttttgctgttctgggctttatatttaatttcaggtgtagtcacttctaagatgtgtaattgccctcaagagggactgatttttagcttgtcattgtcagtattgaatgtggactcttctgaggcagttaggacaccagccatggtgttaacagtggatgcgttaggctccttaatctcaaggcaatatccacgctacacacatacttattagctgtcttacttgtttgggggatagttacggcaaggagcaaaaaattctaaggactctagctgtttctagtgcttttactttcatagtcctttgaggacatttcctgcagagcactcttgctcacagcccgccctctgcagggcttccagcccctggccgcaatcagcagttcatgccacatgtgtacatccatgttctgggacctgatctcattggagtccagaagcttgttgcccactttccagtgtaaatgactttatgtgcaatggggtcataggtaacattttaactcttttcttagtccaggtcataggaagtctcatcatctgacagccacttttctcccagggaaggcggtgcccactgggccctgggaatgcctgagccagcagagcagatgccccacgtgcttcctttatccagcttccattctctcagttatgaggctctttgaaaatgtcttaactttgatgtaaatttttaaagccaacccctcatcaagacagggttggtttgggtcttttgtacacagggtctggaccttctcattgtgtgcctcccaccagcgtgcacttcgtatgtccagccctgggtcccttcagcagcattgtgcgtgtacaggtttctaggctgtaagactgaatgaatgtacatgtgtttatatcctctccatatgtacagtgtatatagtgtgtgtatgtgtacatagatgtatattatgtatacagacatgtatccaaactttcctttaaagagagtttttcataaagttgctaatgtaaactgatatgggtgttccaaggtccctcggcagggaagatttgctggt

SEQ ID NO: 13279 - DNA, 1170 bp, Homo sapiens
ctaggttcggacaagagccaggaagctggaagacagtttatcttaatatccaaaactaagtgggaatttttaaccttttcatgcacctattcatggccctacctggaaggaacttggcagttgggttgagccatcagccttcccagctattcagctctgttgagtagcccagagacaggcgtcacggtcagagattcagaacggtctgtgtcagtgaggcctgactcccaaagatggtagcaatttcccaggcttgcgctgtgctcagtcagcaagatgtggggcactgtcctatgactgaataaatagtaattcccatctttctatcgccagttaaaaataaacaacctaccaagtattattctttaaaactaagcatggatgttgatggctaacttctgcggcatataagctacagatctcaagttacttctctaactgtaagcatgtaaatgactttaactcctttctataagttatgattttaaattttcagataagaattgcattttaatatggatatgtgtgcccttaaaagctacagataccaaattttcctcgtccaggtctactcggacgaattttcccccttaatctggccttaaactgagactcggcccttgagagccagggcctggcccagcagtagttgctcatagacctgggaagcaggggcctgctggaaggaatcactagattgctgcaaaaactcacataatccacagtttcctctttttctttttaaaataagttatcaaaatgttttaaaaacactttatgagaccatagtactcagtgccttttgtgagacagtgggtcatttagccttcagcttccctgtttttgatgtagagaaagcttctatttcactggcctcatcccacaagattgtgcgacctttccccgtcatagcctgtcgtgacaatcacgctattgaaagtggctttctagttaaaatgcaattggaaacttgacagtctctaaatgaattaaaagtttcctttggggctatttagcttaacagcagtctacaaataattaaagtgtgagcttaagaaaagtatctttgcggggagaaaaatgtcagatatttttaatgcccagctataaataattttggtgtcttgatatttatacatgcaaaatagaaaaaaaatgttcaacatttat

SEQ ID NO: 13280 - DNA, 1138 bp, Homo sapiens
attgcatgtgagagctgtgggctccacctgtggcagcagataggctgaccgcactgtgtaggcttgctgctgtggtgtgaggggacaacagcaggccttctttcagcgctctcctcaggggccagcagggagacagcgataggctttgacagtgaggatcaggttagaaggcaggagatccaggtgtccctggtggatggtggggttgtctcggctgagaaactgccctgtgcctgccactcaaagttgccaatgcttggttgccgtctgtgctctttggcagggaaaccctcagggaagaggaggaggagaaaaagcagctttctcacccagccaacttcggccctcgaaagtactgcctgcgggagtgcatctgtgaagtggaagggcaggtgccctgccccagcctggtgccattacccaaggagatgagggggaagtacaaagccgctctgaaagccgatgcccaggactaaggcccacggtcactgtgggctggggtgatggtgtctgaccagtggggagattggaatgggattactttggcccagggaagcccctggttctgtccctggagactctggaaatccttttgcattaaaaggactttacacacctgtgtaaaaggatgtgggagaggagggtctgaagctgagctgctaaatgaatatccctgctctgctggtcaataaaacgcttcctaatagcagcttggcgtgtatctggtcctagtgaagaggaaggcctgtgtagcagaaaggctttgggcctgagaggttaaggccacagcctgttgacacctgttttggtcctgcgaccctttactggtctccgctggctttgaatcttcctctgggctctactctggagaacataagggctgctgtggttgagtctggctagcactgtctgtggttggcagtgtgtacacccctccgttcagttccttgggggtatttttcagaaatccaaaggcaacccttcgtgcagtgctcacttttttaagtacagttgattacccttgcctgctggggggcctagccatgggccagagatggaggagccccagtggctgacaggccagcctcactcaggcacgtacctgctgaccagtcagccactgccaacccatggccca

SEQ ID NO: 13281 - DNA, 1162 bp, Homo sapiens
attcttttgattaagtttatccatggctgtattcttctatgaattcttccatttaattcttccacgattatcttctcctgtaaatacatcacaggagttagaattctctacccatcagctgtaccatgtcgcagaattcatgcaggcacaaagttggagttacagagatgggttgacagcaggcaaacttggcctatgtattataaccacaacttcaagttcttacctcatgtgaatattcaccctttctttagtcttccaaggcaaacagccccgtctcatcaccagatgagcaaggtcttgatatggcatagcagatctccctagacacagatcatgagaaaagatggaagagacttagggattcaggcatcagatgaagttggcttttcccttttatgccttgtttgtatttaccctgtctaatacactaaggatacttactcattgtacttgcagctcaatatgtctttgctgttcagatactaaaatgtacctctgagtcattgtgagctgtgtggtaggttggacattggcatagttggtgatgggactcaaaatgaaaaggtggtctctttaccaggtcacagactgtagcagattgtgcttgttatctgacaatgactgtcactttgagggtcgttgatttgcatgcactactctggggccttgtattggagccttttttaaaaaaaataaaatctgagatagaggttgggggtgtgtgtgtctgtgtgcacatgtgttacaagtgagaatcatcagatgacatcccttctcctttcttgatgacaaccatctgagtatcagaatagttccagcacctgtgttgtttgtctggttaaggcctctggaaaaaatgaaggtcactgggttctgaacaggggatagatacgggttccagttctgcccttattcccagttattcctgcagtgctggttaaatgaacagttttacagaagtatagtgcagatcccttaatgatcctatcatcccagtttcacactggaagaaactgaggctcagagattgaggaaccttgtgactgccatctgtgccagtcaccacctctgcatgaccacatttccctccattagcactaccagcatgcctgtgaggtagttactcagctgttcatctgaccccagacgtagaaaagtt

SEQ ID NO: 13282 - DNA, 2297 bp, Homo sapiens
tgaaggggagagtttagacccaggagagcccagcacctctttttaaggtggggtgatgggaatatttcaccagggtctattttctcagtttaagttcttttttgtctctttcaggaagttaagctcccagtgcagggtatcaatgtgaatctggtcctgagctttttagaaaataagagtggtggccgggcgcgctggctcacgcctgtaatcgcaacactttgggaggccgaggcaggcagatcacaaggtcaggagatcgagaccaccctggctaacacagtgaaatcccgtctctactaaaaatacaaaaaattagccaggcgtggtggtgggtgcctgtagtcccagctactttggaggctgaggcaggagaatgctgtgaacccgggaggcagagcttgcagtgagccgagatcgcaccactgcactccagcctgggcagtgagagtgagactccgtctcaaaaaaaaataagagtggttaactttttggttgatattagtattatttgtgagaagagtttccccacccttcttctgatagaacaattgtctgtcactggagaaatctccctccagagctttggcaaagttactctgatctgggtctgtttaaaaggccgggtctctaatttaggaatcggtgatttggaagcttttgcagaacatcaccagaagaagggaagcttcccagagtcagaagctaaattaaaataatttccaaggctatttgatcagccttcttcctttttggttcattgtgtcctgacttggggcactgatgagattttttattttttttgagacagagtttcactttgttgcccaggctggagtgtagtggcatgatctcagctcactgcaacctccacctccctggttcaagtgatatttgtgcctcagccccctgaatagctaggattacaggcgtgggccaccacgcctggttaatctctgtatttttagtagaggtagagtttcaccattttggccaggctggtttcgaactcctggcctcaagtgatctgccaccttggcctcccaaagtgctgggaatacaggcgtgagccactgtgcccgccctgatgagatattttattaccaatgttagtattgagaaactgaaatgtttgaagaagcacaacccaggatcgtgctggtagcaccacagtacttaaactgttggtcaattaaggccagaaagggaaattgttaatttagctctggtgctttggtttacaggaacataactcttaactgacatctgacatcatgatagccatatgtgctcagctctgggtagagtttctgcagttactcatctgaactaatgaacaataactgaccactagtcactttatgccgtgtaactagctctaggccatactttcactggttactggtgtgaaagctgaaattcattttgttacattctggtgaagacccctcttgataatgggaatgttttaactctcttgatgaaaaaataatctgtatttgtgttgatgttcacatttctgtagcacatttcttatccttttggttgaatgaaaagatcttgtataggggtgtggagatggggagtgggtagaagtgtgtgaaggacgctttgcatttgggatctgttcacaaacagccatatgagtgtgttaatgaatgtcagccagttaccaaccctgctggttgttatgggttgttttgagaagttggcaaccaggcatctaagatgttgcctggtacaggcctcttttcttccctgaggcccatgacatttctctgttactctagagggtttctcagatggccagtaggctcctccctgcttagggtctcatttctctgaaaagaggatgaactgaaaagcaggtagttccagaagctaattgctgctttccatcataattatttttcttgtgagaacatttctcttttaattagctagtgattttgattaagactaattcactaaacatacccttccctcaaatcacctcaggtagcaatctgtaagtaactaaaagcattgaaaaacacacaagaaacatttttaaaaactatttttaaaggcctggccgggtgcagtggctcactcctgtaatcccagcactttgggaggccgagacgggtggatcacctgaggtcaggaatttgagactagcatggccaacatggtgaaaccccgtgtctactaaaaatacaaaaattagctgggcgtggtggcagacgcctgtaatcccagctactcagggaggctgaggcacgagaatcgcttgaacctgggaggcggaggttgca

SEQ ID NO: 13283 - DNA, 1494 bp, Homo sapiens
tactctaggagatcctggtccccatggctttctgaggaaatctagtggtgactataggtaatgttggcatttttattgtatctattttatactttactttttgtggcatcatcttctataaaccttattctcattttctctaaatataggtgtgggttttgctacctggaattagaaaatataccttctgggatcttcaatatcattcctagtacctttttgcctaaacaagaaggaccttttttcttggactttaatagtattatccccatcaagatcacacaacttcagtgatggagaaatctcaagttactggcttttatacttaccaaacatcagttcttcaaataaggacgcaaatcttcaggacagtaagcagaacaatcagaatggaattaaatctctaaaaacgtgttacagtggaatctggtgcttgtcagggtgtttggtaagaactgtatatagtcagaattacctaaatcacctagaggtaccgtttacatggttttgtgtatatagagttggcttgcattttaggggccattttgtataaaaagtgcatatgattaaaattagactcagtcatcactgtgagatgcctttgctaagaggataaaggaactgagaccagatgagaaaaagaaaggatatagattccttgagtggaatagtgggctagattaatataccgaaatatttccattgtttcccttttttgcagagcatgtggaagttaaacctgcttgattctactatacatcttgggcaactagttaccaaatgaattgtgccaccataactgattttaattttgcattatttatgattttaaaatatttgttgcccaggtgttatgaaagaataaagcttttaagtatagactaccttagcatgaagatgctcatgcctaagaatgaaaattgttgaggttatctcccattcaatcatgtagcaagaacttaaagaaattcactactgcagtttttatttttaaaaaacagtaattgagatattgaagacattacaatttagtttgtgtggtctttttttaaattgctgtatcgttcagtctcttgtggcaatagcactttgaagaaaatagagaatttaatatatggtgattgggatatgtagcattcaaaaaaagtgaattgccaagatactggtgtcatgtaaattcccactttacataaaaacccatcaggacagaatgatgctcaatattttaaaattctaaaaatagggtgggatttttcattgtctctactttataattatcaaaacttattttgtattgctactaccttaaattgaaataaaatgtttatacttacggatattgcatagtttaagttagatttattgaaagatttcatctgtcgtgtttcatgtaaatgagaacagattatttgcatgaaaatatatacttcaacaaaaatctgttctttaacagagtagtggtagattattacactaatgagatttcactttggt

SEQ ID NO: 13284 - DNA, 2491 bp, Homo sapiens
catttgtaggaatcaagagattcctatacatgggacttttagatgtacattggcacttggattagattccaaaagacaaaagtgttgggtgcttctagcttgaattcagtccctaaatacatgaggctgggtgagcagatgaaaccggtagccactgtgctgatgcatgtgactccattcagttggggattttggttccatgtggatccatactaagtattcttcagtcagtggattttagcaaggggaggtaggagtggaagagaggtgtgaagaaacctctccgaacaaatgaaccagcagtaagtttctaaaaatcagaatctagatagaagttctgcaatatgaaatgagcacattctttgataaggcgtatctattcatgcttttgtaccactgttttgtacctgactccctgaccgatttgtattttttatatacaactagaaggaagtcacaagattgccttctacagtgtgccatttccaaatggatctgttgttggaggaaactggttgctagtcaatgttctatatttaatgaatgtgtgataaatcatcctgtaatcagtatggagtaacctgtttttgtagtttggatgaatatgtcctgagaaatttccatccactttggttcagcggacatcaaggtagtaataataatttttcctccacaggtccctccactcatatggcctctccctccccagctagtggaggggaagcagtctggacttagaaaggaaataggtggtctgtcataggggctttcattagagttaaacttcatagagtcaactgtttcatcatcatagtgagcccagagagccactgcccagcagcatgctcacaccacctaccctagtgtaggtaataggtctacgctaggaccccgtgctgggctctcagcccatcatgagattttggtggatttaatggcaggtaggaacttatttatagtggattgataattgctttataattccttggtaatgacagctcagggaaggtttcacaaggtcatgatcaggagacttgaattgttactggatgtaggaattgtttcactgctcttaacttgctcaaactggggcaggttccaggaacttgaactaaaaatatctatttaagcctctctctctttctctcctccccaacttttttctgaaagccttgatttctgtagacagaactatggtttttggcatgttgggtcaagacgtgtttctataggaaatgcttgcacgtggcactggcttggtgagtcaagcttcctgagcttcagaccgtttgtcctgtcatctgtcctgcccaacactgtatggtttttctctagcacggcttcaattttgttctctgcacaaagcctttggtggttctgccctctgccctccagctttacccaccagagtaagcaatcttttctttttagaaatcaagaatttggcttcacagatggcttctcacagatgccctcctgccagccaaaccggacttgttcttcctgcctctgtgccttctctcattctccttctctccctccataccccacttttgaggttctgtgggtaccatctttgtggactcttgtcttttttttcaacccacatggagtgccctgtgtgtacatactgaccttttttttttttttttttttttgcttgaactctggtcggtatgagctccttaaaagcaggtactgggctggctgtggtgactcatgcctgtaatcccagcactttgggaggctgaggtgggaggattgcttgagtccaggagtttgagaccagcctgggcaacatggcgagaccctgtttctacaaaaagaaaaagggaaaaaaaaagcagggactgtcattctcatctcctccctggggtatccacaggaatggacattcaaatggttgtagcctggtggggtagaaggcagagaagactacccagccagtgaagtgcagaggatagacataggaaaacattccaggcatttggagacagctgaaagtatccatgctgactttcatgatttagaagtctttaactgaattattaaaattgccttttttttgtgctgtacaatgtctactgtactgtgggtcatttagatgagatgaaaaacttaattaaatctgaagtgtcagaggcgcttagtaagccttagtaaagttgtgattgaagaaacttaatacaaatgaactagaggtttgtaatcatgccactcactaacgattttatttctgtagcagaatcattttttctatgtaaggtgttaatgtgtgtgtatgtgctttggttgtaggaaaacttgaaaattccaaaatccttattttcctatttgagaggctggttcagcagggtgtgtgtgtgtgtgtgtgtgtgtgtgtatgaatggtatatttattacattattttgaaagagaattagtgtgttatgtggataatgttatatacagccaaagtggatgtttctatttggcaaggaaggtaggatt

SEQ ID NO: 13285 - DNA, 2465 bp, Homo sapiens
tgcagctaagtggtcctggggcatggagtcttcaacctctctatgaatggcacaccttagtcacttatgttacttttgtgtccccaccatgggttgggggattttttgtttattctgatctatgagttttgaaaaagtgaataatcaaaaggaaaataattccttgttgttcataaattaagcatcactaaagtctcttgaaaggcatttctgtattgggcaagatttaaaatactaaagccttaggtcctattcatatttaaagtagcatgtttgtaacctgttactatttggagagagaagcagttgcctgccaaattgaagactacctttcaaatagcaaaagagagagagaaggctgatatttcggcttttaaataaagatttgtgtggttctgcttttactgtaactgtcactttcccagtgaaaatgatttcatatacattgagggtcttacaggtatgggtaaagttctataaattgcaacaaaatgatacccaatttcattttatcctttttgtattgtgaaactggaaactttatgacattgtaaattatcagctggtttttctgaatataaagtgtgaaaacacagaacagtattttgatctatttgataattttgtgggttttttgaagaattaatgagcatgtacatagaaatagtgactgcttgaatactgtatttacttgcactctttcagtacatcaagattcctgtatattttagagtataataaaacacagatgtgagttgtatttaatgaataatgtatttgtatctgtgcatattatctacaaatctataaagtttctagggcattgactactagattttaagcattttttctaaaatatttacagaaattataaatctaatcccccatcttttctttataatataaagaagtcataatgaacccttcctaattattagtagtaggaaggtgaatatgcattttaatgacagtggactacattttctattgtaccttttgaaaaaaaaaaaaatcaagcagattctaaaagtatacatatgtgtgctttctctttccttttaggaattctcttctgaattccctgagggaattttctagaatctcagaattgaaagagacctgaggttcatccagtctctaacctcttaacaaatgcaggagtcccttctacaagggtgatctttccaccttgaacacttccaagtgactctacctcaccaagcagtccattcagttgttgagcagctctaactgttagaaaggtcttccttagatggagttgaagcctccctcccggtaacttctgtctttgggcctgggtctgtcctccaagagaaccctgagaatgttggaaggatgaatctcgcacattctgccatgtcttctcttttacaggctgtttgacttctctgctgaagtgatttccagaaggactcatttgacacactattagatttaccacatctaatgaaatccaaggtgtagctataaagtgacaagctgtttttaatttatcacatacaccagaacttctatcctgcatcacttatatgtaaatgatgctgttaccaaaaacattaaggtagttcttgcgaatgccaccccactaagaaaactatttcattacttttgtaatccatctgtgagagtctgccccccagcttaaccacttcctttggtctgcacccaatgaagggaaaccccaaagtactgtctcaaatggtatttgaactacgccagtattgttggaataagtacattaattacttgaatgaatgaacacagcaccgtagaaatttcctttatggttacaccttgtatgtctaaagcattcaggccctgttctgtagtgtttcttatcctcacacagagtagaaaagcctgtttgctttatttaacttatacataaaagatgacatctgaaatatctgatgtgtattataataccagcttctgctctagaactactttgggtgaaatggtggtaatagcaaatgacctcctttaacaagacactcatctcaaacaatgccatttagttcaggagatctctaagtgtagctgtaaattttggggttaatttggcttatattggaccttttaaaagaaataaagttttttaatgcaataaatcaagtgtctgtctcttttacatgcaaacttcttttcccttaaactgtctagcattgaattgacaagttttttttccttttctaataaaaaaatgactttttagcaaagttgttttagacttaaatgaacctatctatatgggattttcaaatatatttattcaacaaatactgcttgcctgctgtatacttgggagtgggaatgggcagaaaaccaagaaattgtgatcttgtcctttaggagcttacaattaatttcattgtggaaaggtataagtagaaagtaataaaagtgtaattgaggtagagattaattgataaaaggtacagaat

SEQ ID NO: 13286 - DNA, 1186 bp, Homo sapiens
attaccagagttttctttgagagatattgcagtgatttcttaaatttatgtattactgaaatgagtatgttctacatattcaaaaagcgtatagattgaatattttaaacttttcataggcagtttcttaaatcaacacgtccccatgggtaaataattgctgattagtaagtaactgaatatattattagtgaatgcatttgaaaagtttgtgtgtgtatatgtgtgtgtgtgtgtttgtgtttaagatttatgagaatgacttgttgctaggaattctaagaaacaaacaccactttttaagtctcttctgggaagccaattctgtttaatatataaagaaagcctttaaaaaatgttttgttgcccagattagtattttttttcttgatagaaggataaaagtaaattctgaattaataaaatccaaagtaagtttttgaatattatccaataattcaatgttttgttaaggtactagttatttataaataacatagcccttaatttctaggatcagcgtattctttcttttgatatctgttttctgctacaggcctgtgattggaattgaaacagtacaactgcctccaccagaggaaaatagtatgggaattcctattatggtaggttattttctagtagtctcttgcagtaatataggcagctcttgtaatttgttagtttgttgctgtttaagcctccttgtaacttagctttcatacataactgtatgtgagtaaatagttagtgtcagccaaaaagtcctttattgtagaaacatttatagtagtggaccctgtgttagtggaagacttagtatagccgttttataattcaagtaaattttcagtggagggggcttataaatctaagatctctgtcttggagaagaaaatgttaaacagctgaaaataatggtatcgcaactagttttatttattttgttctgaaatactaaattactaaaggttttcaaactttggtttagatgtatgcatccttttgctcatagctcattctcttacatgttaaatgattgtgctgcacactttaaacattaacagtcattcagtaatcactggggaacctcaattatttgagtgactcctatgttttcatgaaagtagtttttaaaaaatctcacaacctccaggtgtgttggactgcaggcactagtgaagat

SEQ ID NO: 13287 - DNA, 1227 bp, Homo sapiens
ctttctgctcctcagattgggtaatctcaagtgacctatcttcaagtttgctgattccttctgctgttgagcccttctagtgaaattttcttttaagttattatacttctcaactccagaatttctgtttggctccctttaaaaagtcattttgatctatttgttgatcttctctgtttggtaagacatcattctcatgatttcctttagttctttgtgcacgattccctttagctctttgagtgtatttaacatggttgattaaaaatctttgattagtacatccaatgtgtgggtttcctcaggcagtttttactagttgccttttttcctgtgtatgggcaatacttcatccctttgcataccatgtagttttgttgaaaactgtaatttttaatattataatgtggcaactctggaaatgagatttcccccactccccagggtttgttgctgcttattgtagttgttgtttttgatttggttagtgacatttctatactaattttataaagtctatattctttatcatatatgtccattgaagcttctgttccattagcttagcagtcagttagtgattgacagaaatttcctcaaacacctgggacaaaataccagaaacaactctagtctttgtacttggcttctgtgtatatgtcgaaacatattttaatactgaaccagcagtttacaactctgtcttagccttcacttcctatttgcacagaccctggaggtcagccagaggtgagagtttaggggtatctcaggtctttcctgagcatgcactcggccctagcaagttaaccttttctatatcctacagtcactctctgttggactataccagttaaaggtcattggcagagaaaatgcagagtgatagatttctcctttcactctataagggccactgccctgtttccagcagcaccatggagggtagtttaccagcattgttcagtataagtcagtgattgcaaataaccacgatagtcttaaagcaatgatttttactaggtattagagtatacctctaggtcaggattttagattttattcagcttgattccatgtgtatggaatttaaatctacagaatacaagtttgtttgttttttttttgagatggagtctcgctctgtcacccaggctggagtgcagtggcacaatctcggctcactgcaacctctgcctcacgggttcacaccattctcctgcctca

SEQ ID NO: 13288 - DNA, 1208 bp, Homo sapiens
ttgagtgaatcggtatagagaattacataaagcactagttaggcttaagttttaattgtatctacaaccagtccccatctaccgttcccccaacacaattaccccagaaatcaaactccctaagacagcaaccaatattttggcattcaatactcagtaaacatttgaaaagaatgaacatatggttatatgatactttgggggtaacctaactggaaagaaaaattatagataagcaggtgaaactgatattaatatgagtattcaaatattctatttatttgatcattttctttcagctaaaaaattgccaaagaatgaaccacaaaatccaggagcaaattctgccagaggaagaggagtagaccttaccgaacccacacaaccaaccaggaatcagtgttgtagtaactaaacctctagtttgaactagctggaatagtcttctgcttcctaaatgttaataacaatggaattggagcatttaaccagcccagtatgacttccaaaagaagagacttatgatagagtcaagtttctaatacagaattattttaagtgttttgaacttaatttttaataacatgcatgggtccctctcactaatgtttcaacaatagggaaaaatgagaactatgtggacacttgtttcattggaaggttagggggaataatttctcatcactaggaatatagacaaatgactgtctgggcccacacagttaaccagcccatttctccacactggtacagtagtcacctgtgaaaaaaaaattggaacttactaatttgggcttttcaaaaacattctttgtttagaaggagattctaaagttatttatgatgcttagccatagtattcaggcaaatgttcatttctcctggtacctgtatttaaaatgtacattccacattttaataaattaaccacaagaaaataatcccacatatacaaggtcaggggtggggaagagtattaatggtatcttaattatacccagtctggttttttttttttaaatggggtaaaaatcaaatgcaaccccatcttgttttaggaattttgagaactaataaatgcaccttaatggtcagtgttcctttcaaacatgtgagttctttaacaaaaatgaaataaaccaggtgtctgtgatttctaattaatcaccgctggccattacacaggttttgttgtttggggtggggag

SEQ ID NO: 13289 - DNA, 1127 bp, Homo sapiens
tttacactgtcatgatattctttggtgaatgagctctccacaggacttagagctatacctttagggagcttggttttctgcatctctgaaccaccaacttacaagtcctgcattcatgactaggaccatagagaaccctcttgacatggtggagaatttgcttatatggaaacctaagaagttgaccctattaggaccagtcttgatgctaccagtactgattcttaaaatatacattatttgcatacattagccaccagcccatttttaacgttgggtggggaggctaaggctcaagaacatggtagtctcttaattataggtagattttgtgagaagacttcagtcctacaggagttcagaaattttctcttattaccagtgaacttaaaggattgatggtaagactgatgaaagaggaccttccacttaaaaatggggaatgtttggtttccaattgaggtcttacatatgtttctttgatcttatcataagctgctcatgtttcccacctggagaatgtgtcagaggaagaaatgaacagactcctgggaatagtattggatgtggaatatctctttacctgtgtccacaaggaagaagatgcagataccaaacaagtttatttctatctatttaaggtgagattttaacattttaaaaacattttctctcattattcaaatgtacccagtctccatatgccaggtcgtggctgtgaaggctttcagctcctggtacattttgccctcagagtttgctgaacaatacgtttcttcatgactgattctctaaaatggcccaccatagtttgaacacatcattctctttgaggcttttacacttgtatgcaaagttgagtatcttggtttgcatatgcaaatagattttttccatccacccaacaaatatttattgcacatctgttctgcatgtggcactaacgtaggcatgagggatagaacagtggacaaaacagagttcttcccctcatgcaatatatatttcagcagaagagacagtcaacaagtaaataatacctttgcaggtggtgataagtgttggccgaagagaaacaaagtaggataagtggaatcagaatggcagggatggtggcgagttgggga

SEQ ID NO: 13290 - DNA, 2433 bp, Homo sapiens
gataaaaatgtaatcaaaccaacaacatagattcctttcccagtcccagttttgtcagctggtgtttaaagggagtcaaagattgctaatatttttttttcctgtgcagatctgaaaaccatgagtgaacgcctcaagaataggtactacgtgtctaagaaattattcatggcagacttacagcgagtctttaccaattgcaaagagtacaacccccctgagagtgaatactacaaatgtgccaatatcctggagaaattcttcttcagtaaaattaaggaagctggattaattgacaagtgattttttttcccctctgcttcttagaaactcaccaagcagtgtgcctaaagcaaggtggtttagttttttacaaagaattggacatgatgtattgaagagacttgtaaatgtaataattagcacttttgaaaaaacaaaaaacctccttttagcttttcagatatgtatttaaattgaagtcataggacatttttattttatggaatagattttaatctatttactactattaaggtaaattttctatggcatgtccattagctatttcatgatagatgattaggggtttcctcaaaacctgtgtgtgaggaaattgcacacagtagcaaaatttggggaaatccataacattttcagaccatgaatgaatgtttccatttttttctaatggaatgtgagagtttacttttattttattctgaaggactttaaggaagggatacatgattttaaaaaagcctgtaagaggtgaaatatgtgatgtttgaagtctctttatagactttttatatatattttttaaaacactcatctagatgaggtgctttgagcagttctgaaaaatgcagttccaggaaagcaactgctttggttcctaaggaagaaattctaaataatgcaaacttttaaaataagcatctaggtttttgataattctgtctacttacaacaaacttgttagtacataaccactattttaataattattttctctacacaaatgtgtaatatcatatttgactttgcttatgcaggccataagttccaaaagataatttccctgcccacaaaggcataaacttgaaaacacatgagattgaatcaacatgctttaataggaaaagatgtatggtctatatatgtatcaatctggtgaatcctcgttctaataaaggttctttttcttttctatgatacacacagccacgctgataatatgcaaatgaacattttcctttatgtctctccagataatgtttattgtctgaggtaaattaaattcccaccagggtttgctgtcagtattttaacacccacattagtatatgcgtccagggtcataaccccctaaaatccatcatgcaaccttattaatctgtcttgggattccagtttagtgcttggatttatttcctgattacactacatagaaaagtgagacatctgccattcccaactctgggaaaaccaactaatatacaaccatataaatgaaggccatcttgatggtctcaacactaatttttatgatgcaaatttatacactgatttttgtaaaggacaaagttttaaaagcgtatttaacttgatgttttctatcagcataaataaaatggtcatgaatagtcattaaaaacagttgccagtgataatctgcatgaaggaaaaagaaccctgcaaatggctattgagttggaagtattgtttttgatatgtaagagatattcagaatgctcacactgaaaatgcctcaactttttaaagtgtaagaaaccaccatgagtggtgtctagatttctaatgaagaatcatgatacagtttggattaagtatcttggactggttttaaacagtgctttgtaccggatctgctgaagcatctgtccagctggtatcctgtgaaagtttgttattttctgagtagacattcttatagagtattgtctttaaaatcagattgtctcttctatattgaaagcatttttatgttttctaatttaaaaattaatattttcttatagatattgtgcaataaagctgaagtagaatgtgtggtttttgcaaatgctttaacagctgataaaaattttacatttgtaaaattaatatattgtactggtacaaaatagttttaaattatattttaaaaagcttccaatcttgtggtgtgttttattcattcagtaggctgaggttaacagaacaaattatgatctggttgataaccatcaattgaatccttaaaccttagatcttaagcattctgttgcatttgggggaggtttcataaaaaatccataggtcatcagtaagagattttcaggagagacacttactctgtcttttgagttatccactgcatcttacccactcacccgctaaacaataacaaaaaagattcattgaaag

SEQ ID NO: 13291 - DNA, 1186 bp, Homo sapiens
cagcttaccgcaacctccgcctcccaggttcaagcgattctcctgcctcagactcccgagtagctgggactacaggcatgtgccactacgcccggctaattttgtatttttagtagagacagggtttctccatgttggtcaggttgctctcaaactcccaacctcaggtgatctgcccacctcggcctcccaaagtgctgggattactgagccactgtgcccagcccaaaatgtatcttatacaaacattgtagaaatgaataatgattactcaaataagatcttttaattataagcttctggcatctctatttttcccttaagtaggggatactaaagtgaatgattttctaagaggatcttttgaaactctttagtacaatatttgagtaaaataaattattgtggatcttttgaaactctgtgtagtattcgagtaaaataaatatttgacatttacagtagggtacaccctaagttgtttatgaattccttataccactgttatatttaatttttcagataaaatatgtatgggaaaatgactagagaaattgattcttttttaggctcagggacaagataagtgactaattgtgaaccccaagctctaattgtatgttcagagtgatgtctccataaaattacaaatgtcatgtactttcagggtagctccttatttagtcagaaatctcagagattaaatgtgtgaatatttagggtttttgcatatttttgaccaaccaatgaaagcgaattagttcagtttagaaagtttgatgtctatacttgtatatacctctttaaattttagaactttgtaggttattcatttttaaagagcaataaagtttgtataagatagtgattgctttccttctattctttaaatatcaaaaatagagtatctctctgtcttcactattctcatccttggacatttcctctcccctccccttggtattctcttttttgaggggggggtgttctaggtgagttaatccttagtattttcagtagtcattgctataaaactctcagcttcccctccatactttcaacctaacacttctctctcccaacttatctctgtgtaatctcccagttcatgattaacaaattataattttattgagggactgttctaatcctgatatctcagattttcttggctgttatctcccta

SEQ ID NO: 13292 - DNA, 1123 bp, Homo sapiens
catatcgagctaaaggaaagcctgatgcagcaaaaaagggagttgtcaaggctgaaaaaagcaagaaaaagaaggaagaggaggaagatgaggaagatgaagaggatgaggaggaggaggaagatgaagaagatgaagaagaagatgatgatgatgaataagttggttgtagcgcagttttttttcttgtctataaagcatttaacccccctgtacacaattcactctttttaaagaaaaaaattgaaatgtaaggcggtgtaagatttgtttttaaactgtacagtgtctttttttgtatagttaacacactaccgaatgtgtctttagatagccctgtcctggtggtattttcaatagccactaactttgcctggtacagtatgggggttgtaaattggcatggaaatttaaagcaggttcttgttggtgcacagcacaaattagttatatatggggatggtagttttttcatcttcagttgtctctgatgcagcttatacgaaataattgttgttctgttaactgaataccactctgtaattgcaaaaaaaaaaagttgcagctgttttgttgacattctgaatgcttctaagtaaatacaatttttttattaaaaaaaaaaaagaagctcttgggaacgtagaagagggggagtagcttctagacaggcaatcaatactgtgtgctccaggtagattaggcatcatgggttttcaaaataagtgatgataaacacccatactgcaaggaagatctttgccctacatttagaaattggtgaatgaatgtacactcatatgtatcaagttaaacataaaaatgcttcagttatatattctttgctttaaattttactcaccttctgatcctgatcacatcagataaggaatttcctactatacttactgcttcattgtatttttaaaagtagacagcacaaggttccacacagagtatgtagtcaataggtgttaatagcagtgatgattatagatatttggtacaacagggacccaatcaatgtttattgatttactatacataggggttaagagaagatgacaaattgagagtgttgtatatgactattaagtgtcttgcccctatctgggaaatcata

SEQ ID NO: 13293 - DNA, 1230 bp, Homo sapiens
ttatttagtctctgagtgtattttttttttttttttgagacggagtctcgctctgtcaccaggctggagtgcaatggcatgatctcggctcaccagaacctctgcctcccgcgtacaagcgattctcctgcctcagcctcctgagtagctgggattacaggtgcccgccaccaagcctggctaatttttgtattttcagtaggacggggtttctccatattggtcaggctggtctcaaactctcaacctcaggtgatctgtctgccttggcctcccaaagtgctgggattacaggtgtgaggtattattttttaagtaggagtatttggacctaaacaggcagaattcttcaacaaagtacaatgaaaggcatttctttgacagtagcctgaatttggaggctcatttgcaaaggcactttccactgccactctaccccagaaattgcttatgaaataattctggcatttactccttcttcctcccctcccccttttattaaagagactagcttgtacaaagtcatttgcaaattcatttgtggttctccattttgattcagatagcaactctaaagactgagttataaaagtctttagactttgcagtttaaaagaacgataatattaccatgtaaaaattctgattagcataaagctttagaaagtccgttgcgtataccaagccaagtgcatttttgtctccaattcccaattctaatcaatttcgtcctcatttttcactattgcaaaagtgtagatcatgatgcccatcttttttgtagtcgagtacattttttcttccatcaaaaaagcaattagtgtcctgatgtacttcagcttcacacatttctgtagatgatttgatcaggttgttgtcttcacgacagacatctgattgtttttgaatgtgggaacactccttagacaacatggccagaattaacccacatcctcactggtgttccacaccttctcatatgtaggagaggaatttctctgtcatttccctgagactgcaccttaattctctactataatccttgactgaaggaaaagttaggcgatcaggtggaatttttaaattgttccacaaaaaactgagttctgctagctaagtggaatgttgagaatttagaacattcagcacaataaaatataaacattaaatttgtatggcattagaaccgcctttagaatttttagtggaagcgttagatcacatgcattt

SEQ ID NO: 13294 - DNA, 1380 bp, Homo sapiens
aatgaactaagataaagacagaccagtacactaaagcctaagcattccctcttcccccaacgttatgtttttttgaaattttgatggaaaaatatccagcatggtggagtggtgtttcgaagatgggtttgatcacacatactttgtcgtacgtatctacccaagctgtcactattcgctaaagtttaaaatgttcttttcctttctccaaagtaatctacattcttttcttccagccgaccccttggtgggaagtattgccactcagtatatgaccaacagagcagaacatgacagaatggccagacagtggaccaagagatacgctacataaattggggtttcacaattcttacattatttgtctgtcacagaagagagctgcttatgattttgaaggggtcagggagggtgggagttggtaaagagtagggtatttctataacagatattattcagtcttatttcctaagattttgttgtaacttaaggtatcttgctacagtagacagaattggtaatagcaacttttaaaattgtcattagttctgcaatattagctgaaatgtagtacagaaaagaatgtacatttagacatttgggttcagttgcttgtagtctgtaaatttaaaacagcttaatttggtacaggttacacatatggccatttatgtaaagtccctctaagactacatactttttgtttaaaacaaaattggaatttgttttcccttcttggaagggaacattgatatttaacagagtttttagagattgtcatctcatatatataaaatggacacgtggctataaaacaccatataagagatgagtagtgcgttttattttatatgccaatctactttgtttaaaaaaggtctgaatcaggacttgtgaaaacctgtagtgaaataccttaagctgttaactaactgtaaggcgtggaataggagttgctcagtggattggttctatgttgtggactacttaagtctgcatttgttactgtgctaataaacaatattaaaaaccacctaataaacactgctgtgttcatttacttttcttttgccttttggttgccattcgcagattcttctgaaatcgataggtatctgcttctaaaacaagctaaaaataatgcatatttagtaggtattagttagttacctatattaggatctgtactttacacagctgtagatgaggtatcctagaaaaggttaaataatctaccccatttaggcttcaaagacgaaccctactgcatctttttaaaagcattttctgacttgcagatgctgtagtagcaagtacatgagaaatgggttccgtcatggataaattggtaccctgccttagggggcattttggcagtac

SEQ ID NO: 13295 - DNA, 1316 bp, Homo sapiens
tctggtggtgaactagagttgagaattaaaattctttctgacttgctgctataggcaatgtgggagattgaccttgggccttttttcctattctaggagcgagctggacgccactgtggggctctgagagtcctgaattcttactgggttggtgaagattccacatacaaattttttgaggttatcctcattgatccattccataaagctatcagaagaaatcctgacacccagtggatcaccaaaccagtccacaagcacagggagatgcgtgggctgacatctgcaggccgaaagagccgtggccttggaaagggccacaagttccaccacactattggtggctctcgccgggcagcttggagaaggcgcaatactctccagctccaccgttaccgctaatataagtaaagtttgtaaaattcatacttaataaacaatttaggacagtcatgtctgcttacaggtgttatttgtctgttaaaactagtctgcagatgtttcttgaatgctttgtcaaattaagaaagttaaagtgcaataatgtttgaagacaataagtggtggtgtatcttgtttctaataagataaacttttttgtctttgctttatcttattagggagttgtatgtcagtgtataaaacatactgtgtggtataacaggcttaataaattctttaaaaggagagaactgaaactagccctgtagatttgtctggtgcatgtgatgaaacctgcagctttatcggagtgatggcaatgctctgctggtttattttcaagtggctgcgttttttttagtttggcaggtgtagactttttaagttgggctttagaaaatctgggttagcctgaagaaaattgcctcagcctccacagtaccattttaaattcacataaaaggtgaaagctcctggttcagtgccatggcttcatggcattcagtgattagtggtaatggtaaacactggtgtgttttgaagttgaatgtgcgataaaattattagccttaagattggtaagctagcaatgaatgctagggtgggaagctggtgagccagtggccattagataaatacctttcaagtgtgagcttagacgtcaaccctaaaatacttaaccgtaatgctaattgtgatcattatgaatcccttcagtcacattagggggaaagtagttggctataagtacgtcattcttagtccagtcagtcttaaaaacatcttgggttacccactctgtccactcccataggctacagaaaaagtcacaagcgcatggtttccaaccatatgtgttttctgcagttatttct

SEQ ID NO: 13296 - DNA, 1180 bp, Homo sapiens
ggactacaggcgcccgccatcacacctggctagtttttgtttttttagtagagacggggtttcaccatattggctagtctggtttcgaattcctgacctcaggtggtccacctgcctcagcctcccaaagtgctgtgattagaagcatgagctactgcacccatccgaatttcctatttcttttcttagactttgcttataaaatacctaggaggtagatgtccttaactttgttgtggggggaaaatagaaaattttctctccctctcctacttcctttggtgcatcaagaccagcaagtttagaaaaatgtggaccagagacatgtagactcattctttatatgtatgactagaggccataactgttggataattttgtgttattcttttatacaaaacaggtcttatttagaatatagacgttaaatatctttttcttcaatagctgttcggtttggtcgtattcctaagcgtgaaaaacagaggatgctaattgaaatgcaaagtgcaatgaagaccatgatgaacagccagttcagtggtcacttgcaaaatgacacattagtagaacatcatgaacagacagccttgccagcccaggaacagctgcgacccaagccccaactggagcaagaaaacatcaaaagctcttctcctccatcttctgattttgcaaaggaagaagtgattggcatggtgaccagagctcacaaggatacctttatgtataatcaagagcagcaagaaaactcagctgagagcatgcagccccagagaggagaacggattcccaagaacatggagcaatataatttaaatcatgatcattgcggcaatgggcttagcagccattttccctgtagtgagagccagcagcatctcaatggacagttcaaagggaggaatataatgcattacccaaatggtcatgccatttgtattgcaaatggacattgtatgaacttctccaatgcttatactcaaagagtatgtgatagagttccgatagatggattttctcagaatgagaacaagaatagttacctgtgcaacactggaggaagaatgcatctggtatagtgaaatcgattttttgcttacattgtatcagggaaagctttgaaaattttcttttattcgggagatatgctaacttggggggatggtgtcaggaaacc

SEQ ID NO: 13297 - DNA, 1199 bp, Homo sapiens
tgtagtacaatataaaccataattgtgatttaccttaagtaggtataactcttatgggatatacagtatagtttttgtgaatctttacatgatagcattatctttttataattttttttcctaagataaacaaatgcatagttttcttctatgggtgatagaaacagctttttgaagtaatgaaaacctcaaaagatcatgttgattcttaatttttgccttttgcataagcctctttataacatgtatctttaaaacaattaagtctttaggaatgtgtaaccagaactatgttagtattgcttataaaactttagttaggttcaatatatacatatatacatctctatataggtatatagatttgcattttgtcttgtaaaattttatttgaataaattcttcctgtaggtaatgggaaacaaaattaatagttcatatgtcactcatagcatttctatatttgaaagtagcccaatataaaacttttgattctaaaattaaaccagcagcctattacaagcacattctttgattgagtcattggttataaacttactaaatgcagagaaagcagccaatttaggaaacttctgagttggtgggacactgttgattaataatgtactgtatgaattaagtgatgctttaactttgattttacattttaaagttaaaatgtgggcattatgtcagcaaacttaagggcattatgtcagcaagctaaaacattttttttcctgtgcttttaatgtatctctttacatgatctgagagaggattcaagttgatagaaatagctgaggggaaaagggggaacatcttgggatgaagcttgtccttatggtgatggtttaattacagattaaaaaattagaaggaaatttcagtggattaagtgtatagctttcatatctacatttcaagaaattaccattgtaacttgataagagatgatttattttatgtaaacatctttgcaaagcaaggtgtagcagctcagctagatttattactgtgcacgaaagtaaatacctatctcaattattctttttcttttccaatataaagtttgctgaatgtacaagaagagtttatcacttaggatatagaatttttttaggggttgggggaggggatctgttaggaaactgttacctataaacaaagattgactggattcgatccaaaagataaaa

SEQ ID NO: 13298 - DNA, 1101 bp, Homo sapiens
gcgtatacacagaatatatgggggaggaaaaacttgaacatttttaaacttagcaatagaatatgtatgttttcagtttggggaaaaatcatttttgtaggtggttttatggttactttaagagccctttttttaaggcctatttttgtctttcaatattattcctaaatacttttgttgtgagaattgaatttattggcttgcagtcaccaaagaaatatttacagaaatgtgcttaatagtcttagttctgtttaatggtttttaggggtagtctgtgttcacacacatgcattatggttatatattatggttattttaagtattgtagatgttatataagttaaaataccagtacagatctatatgatctgcaaagtatatgtgttttgcttaggtactttttgatcatatgggatgtctgaagaaatatgaaactgtgcaagacattctgaaagaattctttgatttacgattaagttattacggtttacgtaaggagtggcttgtgggaatgttgggagcagaatctacaaagcttaacaatcaagcccgtttcattttagagaagatacaagggaaaattactataggtaagatacaacctttaaaaatttgaacattagttaaaatggaaaaaaaactttattaatagaagacatttttatcagtagaatataagcaaatacaaattgaatctcttatcttgatcctaactttatttttccctcacatagagaataggtcaaagaaagatttgattcaaatgttagtccagagaggttatgaatctgacccagtgaaagcctggaaagaagcacaagaaaaggtaatcatttgcagaaaaagacattcagagaagcttttaaaagcaacttccaaaacaaacaaaaattcaacccctaaattttaaatttagtactactaaaggtgctgagttgtctatttagagactaaagtcttctgtttatccacagaacagataaagtacaggaatttatagtacacacccaccacaaagcacttggccagtgtgactcaaccagagcctggagaaatgactccaggtgtgagaaggtagctcagtctccttgacctttt

SEQ ID NO: 13299 - DNA, 1186 bp, Homo sapiens
tatagctgtggagagatgtgattatctggttattctacttagaaggtgaatgttccaaattatttgaccacaaatagaatgaagtctgttgaccttaatttttatgaattgttggtgaaatcagtcctagtgaattaaggatgtttttctcaccaactttactctttaggctgaagatgggttatgtactttatttagagtaataggaaattctttaaaagttatcaatattaaatcaggtaggtaagtacataagtaaaataggactattttattctgggcttgtaactgagagaaagatgcatttgaataatacagttaggcaaattttattattaagcggatgtaatcaaaattattaaaaatgcattctcttcaaaagatttgtttttgcagtgtgaagtttttaattatgtataaagttttctttcccaaagccatgacattttttcatttgcttctttttgttttcattagcactttagcaaggctactttttcctgctgtggatgacaacctccttaagttcctttatgatgataatcaacgtgtagagcctgagtggtatattcctataattcccatggttttaataaatggtgctgagggcattggtactggatgggcttgtaaactacccaactatgatgctagggaaattgtgaacaatgtcagacgaatgctagatggcctggatcctcatcccatggtaattatttggaacttattatttatttaacaaatgataatgtgtaaactacaaattcccgtcattttagaaaagtaatggaacatttttattttagaacatattgtagaccgtaaagacctaattagggtataatttgatatgtgcctacagtaaaaagtataaactttggaatgagttttggaggtaagtttcatggggagaaactgtttatttaaatttagaaacacctcatattccaggttttcaaacctctaaaccctatattattagaaaacaatccttttctgataaaattatgtgtaaccttgtttctgttctcaaactaccgcttaatagtttgtaaggatgcttaaaaacacattgtattcattagtgtaccatttgtaaaaagacagaaaacaaactaccttgtatatattttaatatatccccaaggctgggcgtggtggctcacacctgtaattccagcacttt

SEQ ID NO: 13300 - DNA, 4328 bp, Homo sapiens
tgtgagtgtgaaaataagttttgaagatgaaccaagaaagaaatacgtggatgctgaaacttcattatagaattgaaccaagaggcattatacatatagatatatacatatgtaatgtgtgcgtatcatgtcactatatataagaatattgtatgtcatgctgtttatgtgtgactaccgggtttttaaaagtagtgtctggagtttgtaatgagcaccgtggagactatgtatttaatgaaatgctctctttgaagtgaggtacatggttcttaactattcaaatatttattctgttagaaaaaaaaattttctgttttgcaatagaaggatgtggagaaatgctttcagtctacttttcttaaatctctgttcatcagtggcaattcgtaaaaaccttaagtgatactttgtttatatgtttataatttttaggtgtttcctgaaattttcacatattatttcacttttgttagtgctttatgggaagaatagggagtctataccagtgctgtgggaaaaatggtaacatttcagggcttctctatttgtgtttcatttctgtagatgtccatcgtgtttcactaactggcgttttcttagccatagagatgactgtagaacaatagaaactttaataatgatagtttttaacttttatgtttaaattttttttaaatcttaaaaccttcatatctaggtatccattgtgacagacaagtaaaattgcaggtgatttgataattaagcacccataccatttataacttctgaatttaaaaagttatacaatgccagtttgcaatagttgattttgatgcctttgtagaatattttttctgaatccttatgctcttttaaagccaatgattcccactctgttctctgccttgtctctctttgtcttaaaatgctttagtttccatcaggttcaagttcttgactattattctcttataagtagtaggcgtaaataatcaggagttagaattctctcagaagggtctatgatcagtattactttattaagaattacctttcattttctctttatgttattctttcacttttgtagattacatttaatagcttgttacctgtgattttattttaaaatatttattttgatatgatgcttaaatattatataaacatttggaaaagtaacaaatagagtaaattgttaatgtaaatagttggtgcttactttcatttatgtttattatcttaaagcaattgatagattttacatctttgatataaagcactgccatatttatattttaaaaggaaattagacattttatatgtagctcagattaatgacatttttattttgtgtattagtttttgcttttctgagctttttaaagtctaacaaatctttttagtcatcttttatatacttttagttccacatgaaataaatgttgttaagcctgtaggactggatgaatggggttgtgaaactgatttgacaagagaataatttacaaaaatcaaatgagtattgagaagccacagaaatatcaaaaatggtgacatcactattaggatgaaaattttatgaaattccaatgctccctttaaccatataattaaattacaaaggtatacataattaatctaataaaggatcatgaggaatgccaaaagctgaaattttagcaagtctggtgttttaaattcattataaactatttattaactaatgtaatgtcctcctctaagaccatattgtaagagtcttgttaaaatgatggattcaacttctgcctcggatgagaggttggaaatgtagctgcttttctttagaaaatatgtagctgtcatcatttggtactgcctaaaaagagttagactctattggcaattgatagagtattacccacggtgcttattattgtttatgagcttccattgtaatgattcctttttatttgtagcagcataattatttccaaagaccccagtatttgctgctatttttaaaactcccctgatgtacctgaacaagaggatttcctcacatcatttccttgtgtctggacatcaggggtaacaactgtacttactttacaggaagaaattttaaaactgaaaactacctgggatcatagtgtttctgtgattttatttaattgtgtatagtaattatccagtgccagaaaaaccgtcacttgcaaaatactttgcactcaaaatgtttttacaatgcttctaaatgttactggtttctgctttcttttgactacttgactgacaaaatgatctgactactccatttaagagcaaaggtaactcatgtttaggtaattaactgcttgttttaagtgattatatttcttccactgtttttgaaaaataatcaaagatagcattcattgagagacagtgacagatataatttactacatatattgatttttaaataaagttgccttaaataagtgtatgtaagcagtagtagttgctatgtactgatttacctcaaggtgcaaaataattaaacctgtacatattccatttacaaaataaattcagccctgcactttctttagatgccttgatttccagaatggagcttagtgctactgaataccctggccacagagccacctcaggatattcttttctccaccctagtttatttatttatagatatctgtttacaaagtctgtagtaaatcctgatgctgaccatctgaaatgtactttttttctgaatgctgtttcaatctaaaatagcagcttttgagaaaacaatgatgtaaattccttatgataaaaggatgattctatatattctttaatgatattaaatatgccgaagccaagcacacagtctttctaaagtgtgtgtatgtttgtgtgaatgtgaatgatactgatcttatatctgttaaaagttgttttaaaaagctgtggcatcccattgttcatatttgccaagtcttctgtaaagatgtctaggacgaaatattttatgtgctaatgcatgtatttgtaaaccagatttgtttaccactcaaaattaacttgttttcttcatccaaaaaagtttatttcttccacgtacttaaattttctgtgtgggtataatatagctttctaatttttttctttcacaaaggcaggttcaaaattctgttgaaagaaaaatgctttctgaaactgaggtataacaccagagcttgctgtttaaaggattatatgatgtacatcagttctataaatgtgctcagcagtttaacatgtgaatcctgttttaaagtgctcagatttcaactgtgtaagccattgatataacgctgtaattaaaaatgtttatatgaaataacttaatgttttaaatttatttatgtagatcacatcatttttatcgtatgcagtgcaaatatgtgaaatgtcttttggtttattccaacaattatttattttagaaagtaagtttaaagactttaaggacattcaaagtttaaaatagtgttcaaattgcaaaatttggcaatcttcatataaattggtttcttttctaacttttcaaaaactaacattaaatgtcaattataggaaaacatagttggaaatgtaatcatccaaagatcatttttaaaatgaaatttaattagcacatattgaacatttgacttaattgttaaaccccagttttgttttgtttttttaatcagatttttgcacactgattagtttttgtgttgtggcttttgttgctttattattcaaggttttttttttttttcttccccatgggggagattgtcttccaatgtttaactacgtttaaataaataaaaattgaattttattgttcatttatataaaatctgataccttgatgtaatttcacaatacagttccaatttttatggcttttataattacaatgatattttcttctataataaaatccaaagtaaacatttaaattgtagaactgatatttttcatttatatgaagtataagcctctactgggtctatattgtgaatcatcctgcctttcaaatttgtttcataattgttagatgaaaactatttttttggagatgttactgaagttgattgagcaataaaagtctacttaattagttgttggctattgtctttactttgtactctgattattagaagagccacatctctctctcagcttgagatgggataggagaggaaggaaaatgagtgatgtctgtttccggcctcctaatattcctaggcttcagtaggagagagaaaagaggaaacactgagaaaaaaataaaatagtgtttgtttcacaaaggtgtttgatagttaagaaataat

SEQ ID NO: 13301 - DNA, 1192 bp, Homo sapiens
gtcaagtaatatgttatatggcttttatttatggtattaaccattaagaaaaagaatgctactttgcttgatacaactgccagtagaagagaatatttcttgccttggttccttgagtgagaatgttgagtaaatgcagtaaatgcaagttggattgattccaaagaatacataacattttttaaacctgagagaaaattttaggcaagtgaatattaagcaccattaaaatgaaaattttaagaaaatttatcctattttcaccacttttaaatacatttacactgattgttggaaaactgggtattttacttaaatcttaatacttgtgtaattttgctttatgaaaagcagtgacttttgatatatatgattataaaaccaccaatgacaagcaatttcagattccagatgtcagccgttatatgtattggtttgaaattatgctattctattctttacaattattacttacataatataatttctttctgttcatctgcttttaattttgtgattttgaggtttgtggaccctcttccttcctgaactctgccaccctagcttgccaatccatgcataaatgtttatacaggtgctgtaattagccaatgcaccaactcagtagagtcctttcagtaatattttgtctttatttttgttttgttcataattattcccaaatgaccttaattataaaatgtccaagaggaacttccttatccatttttgcatatgccattagcagtatcctcgggataagattttgttataagcctgtttgtatctggggaagttggtcatttgttaggaataagggattcattcagtctaaaattggccttcatttggcctttcattttatcttattgagctattttattcagtaataggaaattcagtaaataatcatacactctaatcctcattttcaaaacaaggtaaaatttggaggtggcttaacctagatgtaacaagtacatgtttgggtttcagatatacctgggttccctatttctaatatgccacttaggtggctttgggcaactgacagctttgaatctcatttttctcatgtgcaaattggaattactctattaaacttatctcgtagggctcgtcttaggatcaggtagaatactgtgtataaaatgctaaatgtgcctcttggaaacttgctattaataatcag

SEQ ID NO: 13302 - DNA, 1193 bp, Homo sapiens
cgggggcggcccccgcgcaggcaaaggcttggggggccagggcgcggcagtgcagctctcgccggagcccagccgagcccagccgagcgtccgccgctgcctccgcgccgccgctgcctccgcgccgccgctgcctccgcgccgccgctgcctccgcgccgccgctgcctccgcgccatggccggcctcagctacctggaggcagtgaaacgccagatctaggccctgcagcagcaggcggacgaggcgtaagaccgcgcagggcctgcagcgggagctgggcggtgagtgtgagcggcgcgagaaagctaaaggtgatgtggccgccctcaaccgacgcatccagctcgttgaggagaagttggacagggctcaggaaagactggccacggccccgcagaagctggaggaggcagaaaaagctgcagatgagagtgagagaggaatgaaggtgatagaaaaccgggccatgaaggatgaggagaagatggaaattcaggagctgcagctcaaagaggccaagcacattgcggaagaggctgaccgcaaatactgggaggtagctcgtaagctggtcttcctggagggtgagctggagagggcagaggagcgtgtggaggtgtctgaactaaaatgtggtgaccttgaagaagaactcaagaatgttactaacaatctgaaatctctggaggctgcgtctgaaaagtattctgaaaaggaggacaaatgtgaagaagaaattaaacttctgtgtgacaaactgaaagaggctgagacccgtgctgaatttgcagagagaacggttgcaaaactggaaaagacaattgatgacctggaagagaaacttgcccaggccaaagaagagaacgtgggcttacatcagacactggatcagacactaaacgagcttaactgtatataagcaaaacagaagagtcttgttccaacagaaactccggagctccgtgggtctttctcttctcttgtaagaagttccttttgttattgccatcttcgctttgctggaaatgtcaagcaaattatgaatacatgaccaaatattttgtattggagaagctttgagcacgagttaaatctcatgccttccctttttttgtcaaatggcaccaactttttcagctctcttattttttccttaagttgcatttattcctaaggtaggcagggtattt

SEQ ID NO: 13303 - DNA, 1249 bp, Homo sapiens
aggcaggaggatcgcttgaacccaggaagtggagattgcagtgagcggagatcgcaccactgcactccagcctggtcgacagagtgagactcaatctcaaggaaaattaaaataaagttgttctctgaagagcaaatgtctcattccagtaatgacccactcaccaggaatatggtggagttcagtccaattcagatcagccatatccaaaagactacaagtcattactaagttgagcaaaagagtttttatctattagcagaaagggcctctctggcagcagagattaaaaattggcccgacttcatttccatacttcagggaatagcaaattgaagatttacttatctaggacttgaattccttctttgggaccaagttaataaaagaccaagaaactcctgattaaactgggtaatgaaggattctgtagacagggctgcacgtatcggctttgtttgacttctcttttctcagttaacatctcagagctggaacattccacattccccagcagcgtgtgggggccgactaaagtttgcaattccgactaaaaatcaccctgcttctggcttatctgaatcccttacccaccccacctcaccaccccactcctatttattcagcaccacactacccaggaaatacactagcaaattgtgcaatggaataaaatccacactttactttagattcttgcaactgtatcatatgtaatagtatcactttttctacattttggtcaaataaatttttacataaactacaaaaaaaaaaaaagaaaatgatactaggctttggggttggagtgtattgccttcagatcagatacttggctctgattcccataatgtctttaagaatttctatcactactctctctttttcccctcctttctgtgctaagtataaccaagaaaaggggcttttgaccatttccagatgagggttttaaagtggcagcagagagagaatcccttgggactggtatcatattggcagcacagatcatgactaaaaaaagactgcacagagaatggggaatttgggagaaggtttgccaggtttgcttttttggtagaccttttccagcagagtcaactagtcaatgcttccctactaaacccttggagtgccttgagcctgtgtgcctctaagtggacatggatccattctaaaacaatcagaagagtacttagaaaacatttatcttgtggccaggcatggtggctcacacctgtgatcccag

SEQ ID NO: 13304 - DNA, 1217 bp, Homo sapiens
gtaaagttagattcttgagggttgagaattctatgtgcatttttaaaaggggagatgttgttagcattttttgacactatcagtgtggaacactgccattgggcagagccacttcatccaagccccagcacattaatggttgcctctggctgacactgtagtgcctgggctgacataactgggcccactgagataaaaacagcaacagaagtagaaaatattaatggatacctatgacaagttctggggcttcctagactcctcctctaaaccatctgatataccaggtcactgggattctaatagagtgctctctattaattaattaatactgcattaatacactgtgcaatgcctaagagtaagatgagcacctcacaccatcctctgcattcctaatgtagacccatctcaacccagcagctgctcttggatgctatcaccaaagcattaagtaagtccttctcactctggatttcctaaaagggaatcagactccagtacacagtctgctttcactttttaaagtgtaagccaagcaccagtccccagtatgtcacagttcaaggatttccaaggagtccttctgaagacccattattatgcctggggtttaacagaaacaactctcctctaatttccccccaaagcagcatggtgggggcaggggactcagaactacaagccttctatccaaacaatcctcttaaccagtgttctggttacactgttccaccgaagtgcccctcactggacttgaggtgaataggtacaggcctgccccctcctccccaaataggctcttggcagagaggtgcacacagggctcacagcagaattttccagtggtagccactttcctcttatctgtgctggtaaattctaaagtgagactctaaagtaagaaattgtgccgtgctgccctaaccaaaacatagttaaggacaggcagacactgaccagagattactggccttgcatgctccatagctaaactctcgaggttttccggagaaaccctaaacagctaaaattgtgtcttttgatacttccgtggggcttattctaatacaaaatgtccattctaacctctcagctagctgtcagctcattagtttacccaaatatgttcaaacaagatgacctgtttttatactctactggctcttctttcctctcttttctttctctaaaatcacgtttttgcctttgatctt

SEQ ID NO: 13305 - DNA, 1099 bp, Homo sapiens
acacaagtatgggcaaaattggagtatgttagaactccaaactcaaggataagctagactaagaccctgttttgataaaaaaaaaaaaaaaaaaaaaaaaaaagttagtgggatcagtaaaaaagttacctacagttaacattgttaaacattttgaattttaatcattcttgtttcatattctccctgatctttttatgtattcctccagatatgagctagttctttgtatgcaacacaaaaaggtgtgggtttttttttgtagtttataaagaaggcaaattgttttgagatgttgctttcaaacttatgtaaggtaaacaaaatgtaatgatgaagagtacatacattaatatttttgtgtctcattttatatgtaattaaattttccatttttttcttcctaggtttacccagggttgatgataaccgctggccttattcattggattttaaatacattgaacataactgttcacataagagacgtatgtgtgttccttgcaccaacttttagcggccttacatctatatctactttcctgcttacaagagaactttggaaccaaggagcaggacttttagctgcttgttttattgctattgtaccaggctacatatctcggtcagtagctggatcctttgataatgaaggcattgctatttttgcacttcagttcacatactatttatgggtaagtgacatttaatgttttgctgccattattactcgtgacctttctcctgaaacactttaggctgtacgcagatttgtcttttacaaattatgtagttgcgtacagagatctgtattactgttcataatcaatttaataatggataacattttaaaatatgttaggcatctctcaagttatgtgtaaatatcctttttaaataagtcagaactccaaaagaagagctatcataaaacaatctgttgatatttttgtttctttgttttggggagataggtaagaaatagttacccaggaaagttgaagcatggtttgatggctaagaattttaaattgtttctgaaactagcattatttattttgctgctgccaggctatttaaacttaatgattttttcccc

SEQ ID NO: 13306 - DNA, 1175 bp, Homo sapiens
gtttcaaaaattttttttaagtttcttggcagtaactttgcaggttcctcctttgattaataacttacgttcttctcatcccgtttttgttttaaagcaggttttatgccagatattggcactggctttttatagattttaaatctataaatttattttgcctggagatgtcatgcacaaatatgtttttatctgccagctatgggttttttatgatgttattgacaaatagtgaattaagtctaattcttcataactaattaaatttgaatcatatacatttttctaaactgtggatgtgtaggttttatttagtgaacactagttataatttctaaatgtggctaattaatcagttgttcagtagtatcaatttagaaacaattagatcgtttgtgagacatttatataattccaggttggttttatagttttaagtatctagttcagtttcctgggaactttttccctccaacatattgtaagagaatttgtctttgcagttgctctatatgcaatcagtgctgtctactttgctggagtgatggtgcgactgatgttgactttgactccagtcgtgtgtatgctgtctgcaattgccttttcaaatgtttttgagcactatttgggggatgacatgaaaagggaaaatccacctgtggaggacagcagtgatgaggatgacaaaagaaaccaaggaaatttgtatgataaggtggggaatctaaagtaaggcctttaaattgtctatgtcctttcttaatttttccaccacagtaagaactatacatatcaagaaatgttattaaatgatgatttggacaaactgtgacttttctagttggtctccactgtttgcctcaaaatatgaatcctggtcagtcctttagctcagagttagaaaatagaatgtaatcagagaaggaattcctctttttggtaatttgttatctaaatacttaagatatatacccttgttaatatacccttccatttttgagagcaaaaactttatgctgtactaaattacataacatttggcactgtaaacccctctgaaaccatgtggacagacaggtgcttatccttgaggtccatactcagtgcatactttcaaaatattttggaagtgacatttgattggttgaacagtaaaatgaagggagcaaaatgcc

SEQ ID NO: 13307 - DNA, 2071 bp, Homo sapiens
taatactatgtgttttgtttttttatagactaccaaaaggaagcgtggctacattaaaaataagctggtttttaagaaaggcaagaaaatatctaagaagactgtttaaatgcactgttctggttcctaacttgaagcagttgtccttgtgagaaccggtctttgcctttagctcatgtcgtgtttcacagcaaagagggtacagaaccatcactggtccaggttaatgtacaaaattttctggcaatgcctgattaaaaaaataaaattggcttgttgagaacagctgttttcgatttctaatgtgaagcaagacagagcactgctgtaaatgtctagcagcagattttttttttattggtacatattatccttcaaatctgagaatttggactaactgcaccaaagaaccctctaatttggtccctggcacatgcatacttgtcaatgtttttattcttttacaagacctgcattttatttgaattacccgaatagcaatatgtaaaatacaagtgacaaaatgtgatgagagcttcttgaaccggtaaactagtacaggtctgagaaagacatattagaagaatcattatacttccttgaattatatttattttcatgtttctctaatgcaaagaatgtttcatcaaatgtatattttctgttgcttactgtttgctctgagaagaagctgctgtttcaaagatggacctctgagtagctaattgattcaagtagtttttttatgttgacacattattactgctgttagcagtcgttttcaccaggtacttacagagcagatttcatacatcattcattcaagggctaaatttatattttttggaaatcatggcaactacacaggatgttgcttaccaggacggagttttggtatcttagtactgaagttagcactatgtttacatgcaaaagattaaggaaaaaacccttaaagtggacaggtatccaaagttcattttctgtgactcatcaaagtgacaaaagacttgtaacaactttgcctggacttttttcattttacaacagttcatccattcacaatgattttgttctctgctccatattttttaatcccttaagcatttgatgaaacactctttagtgctatatgcattttcttacttttgttaaaaatgtgacagttgtcaaaaaatgcactaaaatgtaaatggagattgaacaagttcactttccagcttataggcaactttatacagacttgaacattttctccagttgtttagtaaaagtgaaagagaaagggtttttcctgccacaggatataacttttttttatataacaagcataacacaccactgcttttggtggaaaagtgcagaatagtatgtaccttttatgaagaaaaatgtaatttacaatattcagtgagaatgttactgctgattttcttttccaaggtgtagaatattctttgatttatagaattcatttttgacccagatgatggttcctttacagaacaataaaatggctgaacattttcacaaatagagtgtaacgaagtctggatttctgataccttgtcatttgggggattttattttactttgttgctttaaaattcaatgcagagaagttgttgactgtaggggaaataaagttaattcaaattttgtgttaagtgttgttttttacaaatcttttggttttgaaaggaattggtactgaacacatacctccttcttccttgttgactttcacaaaggttttaaagaaaatgtgtggaaaaaaatacgttagattatttcatcttagaccaagctattttatttggccttcttttaccctggaatgaaaatctcaggtttttttgtttttgtttttgtttttgttttttgttttttgttttgtttttggaagggatttggggagggggaacacctagccaactaggaattttatctctgtttaataaggatagggacctaacaaaaccatccatgaagttctggtaatgaaatgtcaagtctcagtatagaattttctcattagaaaaatcccaaaggaaagacccctcacctttct

SEQ ID NO: 13308 - DNA, 1440 bp, Homo sapiens
ctgcaatctgttaggacagaaaacctaacttattctctgaggtaaatccagtggcctaactttgtcttttcacatttcctcccaactaggtttccattgtttactgcagtgtatcagatctgctacgaaagcagaccagttcaagagatgttgtcttgtcttcagagccatccagagcatacataaagtgaatcatgcaacgtgttgggggaagttctgcctttctgatcaatcttttgggttcacgtggaaaccaggacttggcaacatgatgtttgactgtaatctcatcacggatatgtatgaatttttacaggttcgtttttgaattgtgagaggcagttcattagcaaagatgtactgggcagtaactaaacacacatgcaaacatgtgaatggtggtttattcctcattctgtggatgtttctatgagccaaaatttgatgtctttttttcaaaattgcttatgaaatttccacacaatcgtagcttataagattggaacgatctcagccaaatattttaggtgtaattcatatgtatttgagtggaggattttttttctcatttttctagtgttaaattttaaccagcattaacatggtagagtggaggagtgagtgtgttcaaagatcaacatatttaacttttaaacactatctcaaagccagcataattaactactttgattgtgggctgacctttgtttttttaacaatcaggcatttttaattagataatccactcatgtatttccccctcactgcagttgtctgcatttttagcctcttttctcttcgttagttgtcagaatatgccttcgtcaaggctcagaggtaacaagacagaaaattcatctgggattttcctgctgtggctggcacattcttctgattaacagacacttgtatgatgctttaggctagttagtgcattttttagcaaacatttatcttaaacatcacagatccactggggggtgcaaggggctactgttagtcctcttgttagatgcagtcactcctcctggtcacctagtgagcagggacagagccaggagtcaagtgcagtgccaaggtgcatgaccctctgagaagtcactgggctgatttgacctccgactcattggttgtgcaaatgccatgtgcagcctttcctgaggccataggagggcttcctgcagctgagatctatgcaggccatcctctcaacaagtgccactccaagggcggtcctcggtgcagcagcatcagcttcacttgtgggggggtgggggaaggggcggtctcagaaatgcaggttcccaggtcccaccctggacttctgaaggggtgtggcatctgtgtttctgatgcttactacaatatgtgaaccactactttagaaaatctgctttaacttggtattcctctaattgtgttccctaggaaatgactgtc

SEQ ID NO: 13309 - DNA, 1737 bp, Homo sapiens
tgaacttttacagttcaggcctgctgtgaatctttgatgaagctttaaggtgacactgttgtacaagatgtcagctttgctgaaacgcacattacctggaataagtgctttaattgtagaattagaatgggatttactgtactgttttaaatgagattggcttcagaatccattacagttaccttacatagcacttgatacgtgttaaatgaacatatgaatgtaatttatatattcctagaatttaagttactttgtgagatttgggcctgtccctcaatgccagtttaggatttctttttttctataccttgaaatgattataaaatagattttcatgggaattttaaaaactctatccaaaacatttttggagcattttaaagccccatacacagaagtatacgaaagcacacaaaacactccaagtttcagcagttttagcgccaccattaacccactttgcttgtctcatgaaaaatctttgttaaagtttgtacacaggtaacaaaaagttactttaaaagatatataaagggctgtaagctaattgtggtgtctagtaagtagcataatgagatgtgaggagttggaactttgcgtgttttgcgtattttcatctgcattcagcttcttactctgggtttgtactcgagtgttatttctttacaaatgcccttgtaattaccactctgaagtctgctgactgtgtctcttgaacatacttaggatattctgcacattatggaaaaaggtaaattttagaagtttctgctctactaactgtagatatttatgactctgcgagttatctatttttataaccacctgtggtccattgttcattttaattcacatttcttatgaagtatggtaacagggagggagacacctagattagcagctcaatttgtactacttcagccaatctgtgaatgtaaaaactacactgttgccttgctaggatccaccctcctataatatggaacaaatatctgaatgaaatccaccctaggagacggagtcaaactaaacttgtggtttttcatttaacttttgactacagcatggccccatggcatccacaccaagagggtgttgtgatgaggtgccggtgtgcaaagggaactttagtttttccactggttcttatctgctagccttttacatacatgtgtactatatttgtttatagactgtaggtggatatataatttaaaagcttgatttaataaacatttaaccccctaaacttgcaccgtggatcctgtttttctttttatcagcttaggtaatcattttatttgtcggctttttcttttttcctgaactgtgtttcattaccaatatcaaaaacagttttcaacagaagggcttcatctctaatcccaggccttaaatgcatctgtttttattgtttactgatatttttatacaattgcagtttaggatggagaccttctagtgaatttgaaatccccttctccccactccatgtatacctttaaaagctgggaaaatataaccagtgctgatctcgtaaaaatgtaagggagctctccctctacctctacctctacctctctacctctctacctctctacctctctacctctctacctctctacctctacctctacctctccgtctccctctctttccacggtctccctctgatgctgagccgaagctggactgtactgctgccatctcggctcactgcaacctccctgcctg

SEQ ID NO: 13310 - DNA, 1261 bp, Homo sapiens
gagccaagtgtgatagtaatagtatttaagctgtaatcatatttttggtgtctgatgatttagaaaaggaacagtgacagacagactagaaaattcaaaaatgcttttaaatgctcttgtatttaagtgatggccacagtatctgcatatatttgaagaatggaagttccactcttgcggaaggccttacctattcaggctgcagagcttaaggcttttgtaatcaccggcaagaattcccatccaggacacctcaaataaccacttacagcccgactgggaatcactggcccgagtgaggcgatagggatggaaataccagcccaaagtcctccaggctgcaggcagccagggcgtaagtgggtagaggaggggttcggggtcggtgtgagccccataggttttctggcactgcaggggccctagagaccccggccccgcaagcacgccaggaccctggaatcctaggggattccctgtgtgggccggtgtatttatttaaattcccgttgcagcgaaggccgcccttctgtcttcctgccagccctggcgcttcctgtgcagcgccactggacagccatctgtttcctcccctctgccatctgcctcgcgccgggcccagcgtgcggccctggaagcctggctcggccgccgcccgcgcacgctggccttctttgttactactttggctcagtggtttcctgggctcgctgctcattccctggcagggctcgcggcgtccgcggcgactcctgggatcggcaggggcctggcttccagcccagcgccggcagcagcccgggggctgcggagcggaaagggggctgggacgcggtcactgctccagccacccggcgctcctgggcggaaatcgcgagcagagcccttctcagcctcctgcagaaaacgcgcctcacctgacttgtgtttaaatcagcaagggcagtgacgcggctcttccttttcctggggcagtcactctcctccctctgctgagcccgctctctttagtttactttaagcaaaggttttgtttgtttatttgtttgtttggttttggtttttttgagacggagtctaaaaagtcttcagtctgtggcccagactggagtgcagtggtgcaatcttggctcactgcagcctcctcctcccgggttaaaatgattctcctacctcagcctcccaggtggctggggctacaggcgcgcgccaccacgcccagctaatttttgtatttttagtagagacggggtttctccat

SEQ ID NO: 13311 - DNA, 1462 bp, Homo sapiens
ggtgatgaaaaggctctaaaattgtggttgcacagtcctgtgaatatactgaaaaacactttagatgggagaattgtatggtatgtgaattattaaaatatcccagtaaagctgtttaagaaaaaaaagaatgatttttaaacgtagagaatataggggaaaagagaagttaataggtggtgtctaacaggataaatctataaatattggtataaattggttttttgaattatggaagaatcaccaaaagaaatggctaaaaggcttgggaggttgctgctgaggagtaagactgaggtcgggggagtgcggatgggagtcacctctgcactaccgaagttttttccttgtttggaaatgtatttttaaaaaatggaataatctcagtgcaagtcggcactgggtggaggacacaggtgcccccctgagcagaacttggagtcaaacctgtggagtgtggcttgtgggtgggccacatccctggcaagctgtcctgactgccatttccttcccaagatgcagccgtctgatgaggccacaacccctaggcccctcaggagctttgcagagaggaggacgtgtactccaggcgaggcctctggacctgtgttcctgtgccaaagtcctgtcaggctggtgggcaccaggaaaggcctgcaccctcttcctgctctcccaggaagccagctccctgagctcctgagccagccggaaactcttcctccagccttccggggagaacatccctcccattctgggaaaggaaagcagcctccagggaaatgttttctgccttcctgcttctagaaccacctcaggtactgatgaaccccacttagcacagctgaaggggtttgtgaatactcccgcctaaatcccttctacttcactcctcaggggagtgaagtgccttaagaaacaaagccctgtcctaatttatctagcttgtcagtccggtcttagagataccctctttcctgaagtgaggcgtgcctgtagaaacactatgtggtcagcctgtccccaaggagatcttgtgtctcctctccatctctgcctttgttaccagtgtgcatgtgtttgtgtgttttttaataaaatattgactcggccagttgcacaaggatttcttattgaaccagatgaaggctgtaaaacctggcctgaaacagtttccattcgagcttgtgtctggcccatggccctccacccgtgctctgtgtgtgccccttgctgaactgctggacttcaggttttctctccatcttgggggatagtatagcagggcagagttttaggtaaacatgtgcaggttctcaattatattcacgtcctccttctcctgcaataccaatcttctcattttggaaagagctttagagcaagctaagggttgtgtttacactatgatgattaatgatctcggcctaaatgtgctgtttcgctgatcttgagctgctca

SEQ ID NO: 13312 - DNA, 2180 bp, Homo sapiens
accacacctaaggaccaaagataagaaagactttttgcccaagacagtgaaagtaattataaaaacaagctttgaccacttaccaagtatctgaagagatgagttcatactatgatttagaaagtggttcaattcccctgttggcatatgattatttttactaaaattaatacagctctgtgggtcttccttagtgttttctttgaagccaatctgttttttttaggacaccagcctttggtttttcatctgttcgagatgcctcttctctgtctccttatcagatagaaatggagtcatgtgctgctgcttcatctagcagaggttggcctctggctctgacactttttgtcagttgtctttaggtggtcctgaatcttgggcccttttgattgtgaatactgtgtagcaggatcttgagagtccttgttcttacataggcattgctctagtttgtctttggcaaaaaaaaaaaaaaaaaaaagtaaatatccagggaaccctgcccagactaatactgttggtggcataagagaatcaagccattctcaagagataacttcataaccagaattgtctgttggctagcagctgtcacagataggcagggcacttgggatatgacctttctgtccaggtgattcacagactagacctttcttatcctcctcctagagttttgacttgggactctagtgttaagatgatgagcccgtgcatcaggtccttctgcactttggtggaagtctcccagggtaggtttcctatttgaaacagtggaatcatgtttccagtgataaagtttaatgacctcatccttttttttttttctcatctgccatttgtgtgtcttagatgggttttaattgcatgaatgtggctaatgtggttctcagaaattggtcagtatggcccaacatagcttctgctctgtcttactgactcaatacctttaggatttgtatcagagtttggatactagtgttagtggtggtgtcaccactacttaattgggagataatgaaaccaatcatggatgctgtttttattgggcatgtcatctaagagaggagaaatagctgggttttgggtctaattatgaataaggactgattcagaaaacgagtttatggtaggtagactaaagtttcacatcagactgtaccattgtgatttagacctatctaaaattcagagcatatcatctgggctacctcagggtcaccacccatgtattgggcttagtcaggattgacagatacattctcagctggcctgtcatataaaacatactgtcattgagcttaagctccgcttgttctgaggtttcacctccatgtgtttcattggtgcaaaagtggatctcttagttggtcacttaattctttctttttcagaaagatagtatgttcactggtatatttggtcactcttagaaccttccttcacattgttttttatgggacccatgaatggttagcctttcttttctattgtagaaggaaataaataggagtaaaaagaccattgtagtaaataagttcaaggggaacttgggaccagaaaccactgttatgtacaaaaaaatggcaaattcaataaactcaaatttaaaataatttttaaattaacagttatgataaattttatattttatacaaatagattgcttagaatggttctcaagaattataagagaaatgaactcacagtacaaaaattttataattactatacttgtgttttgtttgggggctgggaaatgtatttttacattgtagccaatcattttatatttgtcaatttaaatcttatgggtcttttttttttatctctcttgatgtcagattttatagtctttttaaataaatccatttaattaaaacgttcttacctttgtaagtgtttattacagaagtgtgatgtttaaatgaaaagctgtctctgtagttgtgggagttggctgcacaatcttgttgagtgcctatatagaatactagattttagatatatctaggatagaaaagaaacaaatccatttcccatccataaactgtccctcttgttggaaagttagaatacacatttaaacaacatttttagggaaccacagaggaagacttacaaatggctttaaatacttccaaagaagcaatttagactccttgtcacatttctag

SEQ ID NO: 13313 - DNA, 1118 bp, Homo sapiens
gactaaatttatgtcgtgtgtgtgtgtgtgtgtgtgtgtggttacccattttttagaaggagccgtacagaagaaaaattattctacattatgtaggattgctgtttgcattgccattttgcataagaaagtaatttttgattttgaaaatctcaaaacttttagatctgaaatacagccatgtgatcgatcatattctaaaggctatttaaaacatgtaaaaggatttggggaacggcagaaaacatgcagtttgggcatttgactgacttggaagtctaagcttattttagttataactattaaaatcatttttaaaaatttgttagttttgctgacagagaaaaatcgtcagttgtcagattttgcacaccacaataaatgtaccaccacacacggaatatgctaagaaaactatcagatagcgtttgatacactagtcattgtctcaatcactgatcctgtaagttgtcatcaaaatatgatttagaaatattggccaaggtgttgctttaactgaggagaaaagaaagcacactgcctaaatgtgtaaaagaaaaatgcagaggttattaaaatgtaaagaagtaacaatctttggatttgtctatacatatatatatatatatatggctttgccttaatatacccccttttttgtttgtgactttcaactgtaatcagttaataaagtatttattctctgcattcaggttcaaataacttgttgcattctcttatgtttaaatttacatgtgtcagctaataaatgagattcattagtacagtcatcccttggtatccatgagggattggttccaggacctgcctcaggtaccaaaatctacagatgcccaagtcccagatataaaatggtgtagtatttgcatataacattcacatcctcctgtttactttaaatcatctctagatgataatacctaattcactgtaaatgctatgtatatacttatactgtattgttcagaggaaaataacaaaaaaagtgcctgtttagatgcaacttttttttcaaatattttccttctgtgattggttcaatccatggatatggaacccacggatacagagggctgactaatttaaaattttcgacc

SEQ ID NO: 13314 - DNA, 1140 bp, Homo sapiens
aaaccccgtctctactaaaaatacaaaaactagccagggatggtggcacatgcctgtaatcccagctactcaggaggctgaggcaggagaatcgcttgaatccaggaggcggaggttgcagtgagccgagatcatgcccctgcactccagcctgggcaacagagcgaggctccatctcaaaaaaaaaaaaaagaaaagaaaagaaaatatgccctctaccttctgagcccgaggagaaaagaaagaaaatatgctctgttgttctgcccctcagatttattttcgtgtttttgtaggatcagacaaaggtgaaaatgaagcaatggaatcctgtaagtaagaagttttgtgatacttaagtagcctggcctgcatcccaaaaatttagattctaaatcttctgtgttcgtttttctgcctgaggaatactgctgtgccaagtggctcctcaaggcgatagattgggttgcttccttgctgttggcacggcctcttcaccagtgtctacactctttttccccagctggtaagcgggcccctcagtgctaccccagttccgtcaactctgccaggactgtgatgctgttcaaccttggcagcgcttactgcctgaggagcgaatatgacaaagcccgaaagtgtctccaccaggtgagtccagagtgggaggaactgaaccttgtaaagcagccaacacaagtttgaggtttatattttttgttactttgtttgaagcatctgatcagtttgttaaatattggaatatcactttcccagatataaaaatattcttgcaaggtaaacaactaatcagcattgtaaatgaacctagacacttaaaggaaagttcttcttgatgattttattttaaaaaaaatttttttttgccaggcacagtggctcatgcctcccagcactttgggaggccgaggcaggcggatcatgaggtcaggagtttgagaccagcctggccaatatggtgaaaccccatctctactaaaaatacaaaaattagccaggttggtggcacgcacctgtagtcccagctactcgggaggctgaagcaggagaatcgcttgaatccgggaggcggaggttgcagtgagccaagattgtgccactgtactccagcctgggcaa

SEQ ID NO: 13315 - DNA, 1208 bp, Homo sapiens
ccattgcactacagcctgggcaacaagagcgaaactctgtctcaaaaaaaaaaaaaaaaaagcctatgtggctttcacataggttcctgcttatgtgagcagccttgttgtgcctagaagtgatgatgctttaccatgtgaaaaataactacaaattctatttagtcaacttagtggcatctggtcagcatttctgatcccagatcagaaaagttaagtgacaggctgtccagggtaacatgtttgatattatctaggcattgagtgtatgagttaaaccagtaagagttaaaatgtttcactcttctcagtaacaaggctagggtgttgagcagcccctctcaaagtgcccccagacctcagtcactgcagcaaacagagcttttgatctaaagttacagtgtgtacagtccagctgaggttctcgtacagcaggtggccatggctgctgccacgctgggagagacagatggggtcaggcctggtttggggtctgaagggggttttgttttggtcccttggtttttaggttaatccaatggctggacctttgttaattgggaggcccaccctgcctgggagggaagaacagtgatgtgaagagttggaaagggctccgagtagatgtttccaaggttgcctgcccaccactaaccattctgaacagccagtaagcaaaatgccattaagtatcataaagatgttgccttgaattcttgtattttaaaaaaagcttcagactgtggtcattgaaaaaaacagtaaataaaatgtgttactagccacttggatggaaaacagagattttactatccacaaaatgggccgggcacagtggctcacatctgtaatcccagcactttgggaggccaaggcgggtggatcatctgaggtgaggagttcaagactagcctggacaacatgatgaaaccccgtctatactaaaaatacaagaaattagctgggcgtggtggcaggagcctgtaatcccagctacttgggaggctgaggcagaagaatcgcttgaacccaggaggcggaggttgcagtgagcctagatcgtgcaattgcactccagcctgggcaacaagagcaaaactccgtctcaaaaaaaaaaaatccacaaaatggtataaagacgatcttgcctatacagcttgcctagaaagctaggcttagatatataaaatctcattttctgaaaagag

SEQ ID NO: 13316 - DNA, 1740 bp, Homo sapiens
ccttcccctcccaagaacagactaaatccgtttaaagaaaagcaacgcaccaaatactcgtggaaccaaattctgctctcgccgggactgggactgcacagcgaactctccttttgggaactcctttcgtctatcgcgaagggaagcctcagctgctccagggagtcttccgacctccctgcccccgctcgcccctcgcctgtcggggcttgttccggcgttccctcttcggaaggcacgcggcccccaagttatccggaggaatctgtgtcgccgctggatagtggcatttaatgcctgcagtgtcgggggtggcagcgctcgggccggacgtggcgaggccaagcgggcagcgctgctctggtgccggctcccggattgcaggcctaatcgatgcatttttctgagtgagtcggtgactcccccacccacctcgtccgctctctcctcctcctcctcctcttcctctctggtctcctccctcctccgggctgggttgcaaatggcttcgttccccgagaccgatttccagatctgcttgctgtgcaaggagatgtgcggctcgccggcgccgctctcctccaactcgtccgcgtcgtcgtcctcctcgcagacgtccacgtcgtcggggggcggcggcgggggccctggggcggcggcgcgccgcctacacgtcctgccctgcctgcacgccttctgccgcccctgcctcgaggcgcaccggctgccggcggcgggcggcggcgcggcgggagagccgctcaagctgcgctgccccgtgtgcgaccagaaagtagtgctagccgaggcggcgggtatggacgcgctgccttcgtccgccttcctgcttagcaacctgctcgacgcggtggtggccactgccgacgagccgccgcccaagaacgggcgcgccggcgctccggcgggagcgggcggccacagcaaccaccggcaccacgctcaccacgcgcacccgcgcgcgtccgcctccgcgccgccactcccgcaggcgccgcagccgcccgcgccttcccgctcggcacccggcggccctgccgcttccccgtcggcgctgctgctccgccgtcctcacggctgcagctcgtgcgatgagggcaacgcagcttcttcgcgctgcctcgactgccaggagcacctgtgcgacaactgcgtccgagcgcaccagcgcgtgcgcctcaccaaggaccactacatcgagcgcggcccgccgggtcccggtgccgcagcagcggcgcagcagctcgggctcgggccgccctttcccggcccgcccttctccatcctctcagtgtttcccgagcgcctcggcttctgccagcaccacgacgacgaggtgagtgcgtgggggcgtgtgtttgtgtccatcggataactgcgtgtgtgctcaacagcgtttcccggccggtcccacagcgaggggaggaggccctctccggatttggtttgtatttcctttggctacgtggcagtccttgctaccaaagtagatcatgacctgggaagtatgtggaagtggattctgtgtacgtgtcgcgaggggctccgaaaaatcccatagcgtggggtcctcccttttctgattttaatttctgtgtggcaaaacgcggcaatcgtcttgagttaggcgtgagttgggaggagataggtgtgtgtgtttgtgtagacgtggcctgctcctgctcttgtgggcacaccagaggcctcccaacgtgctgagaa

SEQ ID NO: 13317 - DNA, 1255 bp, Homo sapiens
ggcaaggagctggctgaccttaccactagctttttgccttcgttccagaaacttaagcctgtagcttgcttgagtgcctgggagaaccatgctttgcactttgcattactacctgtggtgtgaggatggttgttactggctcttaaccttgcttcacacatctaggctagagcagcaaaggaaacttttctggtacattcttacatccaggccactaatatcagactaggtaacacagtcttaacaacttttctggataatgaagctaagattcagggcaaactctcatgccaggaggtttgttttgtttggtttctgccttcgaagtgtctctgttacagttctgaatgagactagagtgggatatggcattcagttgtgttcccccctccattcccccttaatttggggcagagagagtgggagaaaaaaggaagcagatatttttagttatgtttgcagttacgccactgctgcctctccctttggggtgtgcttgctcattggggaagctggtcgttcggttgtgagagccagggccctccagttgctgtcttccctcctcctcccgtcctgcatctccatttatgcctgtaccctctcttgtccccaggtgctgcacctgtactgtgacacttgctctgtacccatctgtcgtgagtgcacaatgggccggcatgggggccacagcttcatctacctccaggaggcactgcaggactcacgggcactcaccatccagctgctggcagatgcccagcagggacgacaggcaatccaggtgagccttccctgcccttctgcagttcccacgtgaatcgagcccccctttctgtcgggtggcatggacagacaattgggcagattccagtgtggggggtggaatagtgacccaaatgagctcaggtgacatccctgcagcagcggtccctttaggggttctggcagtctcgtgaagatgtcagggatgtggccaaagttactggtcagatttctaagcacctagcctgggccccaacataccacctgcacgtgtcccacccagccacctcccgaaatcaaagtggacattggcactttccagccaggactgcagaaaggctgggtgcttaatgcttattactactactactactactactactactactactactactactacaacatattttttgagatgagtcttgccctgtcacccaggctggagtgcagttgtgtgatctcggctaaccacaacctccacctcccggat

SEQ ID NO: 13318 - DNA, 5556 bp, Homo sapiens
taagtaaaaaaacaaaaaactataaaacatggaaaaaataggatttgaaatgcataattatagaatacctgtgttcttgagaatactgtttatatggggtttagattatgttgtgttgttttgatctttttggaaaatcttctctttttaaatgctgcaacagagaaatttcctctgttctctgtttatacctcagtgtgtttaacatcctcttctgcatcgtttcttgatcttagacgttgtggctgtggcttgctagccaagaaaagcagacccttcatattttagggtatataatctttgtttcttttaagggagggtgtgtgcatgtttgtttcaaagccatcttgcacccaagtagtaaagctgaaaatgacacactgcctcccaaagaacctctccttttcacactttggtttcttaaaaaagtatatagatggtagctcaggatttttgattaaacatattctcaaaagttatgctttcttattttgctgttaggttataaagggttaaatggaaggaaaaaggaaattaacctcgttctcagagagagggttttcaggcatgggctgacgtggacatgaatgtgggtggacatgcgtgtgctgagggagtcagggagcacattaaagaacaaggcacccccaaactataggaactccacagaaagggcagggtctgccctgacccgcgagtgcatgttgttctgtagtgctaggggtttcttttcctaagaagagtaggcaaaggaaagaacttttattttacaagcacaattttttcctgctttgaaagttcagggaaatagaaggtttgaaagtcaaattaataccaacagcccagtcccacaccctctgcttgggtcactttttataggattgtttgcacccaggccatgctttaggacctcatggttaacatgaatccccccgccccctctccccccaaggcctttgaccataaaggatctagaaaccaaattgtcccaacctgaaatgtaggatgtaatgtcttttcttaaacctgtaactcggtaccaaagaatgaaaatttaaggctcccactgcagaactgtggggtagaatctgtgtcactttacaggattggttggttgtaagctggacttgggtacaaaacttgtgcttctgggcattgtctgtctttcaagtgcaaagcagatgtagctgataccctgcttgtcagaacccagtgggttcctgcaatgccccaaatactgaaataagaaccaaattctggaggagccctcctcagggaaaagagggactctcaaacaaacgtcagtgacttacaagggagacctcttgtttaaagacttatggatcaacttctgttcctctgtttaagagaaatttctattgcaaaatgggtatcgttttaaatgagcagaacagattaacaaatggagcaatttgtttctgttatcccaatagaaaaggagatgatggggacagtgtgacaagtcaatcaagttgcttttcccgtacacctcttttggacgtttaatttactactactacaagctactctgtctcttcccattgctttaattctagggtttctgagtgaccaaaatgggaaggaaaaaaaaaacctcatctcacagaggagaactgcatgcaataaaagattcaaaagttggaaagtagcttcaaactgctgctggctcccagctgctgttacagggtgggaaggtgttaggaaatgttgtttgttagaagctccttttactgtagaatttaatagtgaatccttccccaatgcctattcagttgccttttggccgttaagctctaagttctttggtaaagagttaatataattaaacatttttactgttttctattttggagtaacttggtgctgatcttccttccctttccccagctgcccaacaagccaccctttaaacaccaaagacaactggttttaaatgcttgaaaaaaattttattgaggagatggatcttgattaaaatcttttcatcatcattttcattctgctcttttctttctaatttccccagatgtaggaaaattttgggacctgaatgagaaatgttcttggtgcataacagtaactagagctccttatttgacattttactatggatgtgatcgaaaagccaagattttcgctccatggctgaaattatcaggtcttaatttacagacttgtaaatttgcaggcttagagcaactagaactatcccctgaaataggtgtgtaggtcagagatactacctctttgtcctcagtggtggtatatctatctccttacctttctgtacccaaaatggtgcatgactggtatttgagaaacatggtcacatttggaaagcttttgtttttaaaacattggcggtttttcctgcccgtggttgactcctgacccatagggattggtgcgaagcactttggagagtgtttattgtatgatgtgaaatgttctaaatcaaagaaagatgataaaagccaacatttggcagtccctagtgtgaaactgtgaaaagtacctgtgtttaaatgcataatctcctgcccgggtaatgccaggtagccaggagttgggtcaaagaagggagtcgtcatcctgatggaaaaaataaggtcctgggtattatgaggtaggagaataaaaaggtttctggggagtaagtatgacaattactagtccccatggaggtctgatctggtcaggtggcaagggttgggtggggtatgatgtaagctcagtttatgtgtggagatgcccattgggtttggatatataggtttgagtattgagatgtttaaaggacatctaacccataggtaaaaactacttttgcttgacactgacttaacatttcaaaagtgttatttttggtcccaagatctaatgctgtctcagaacatgtgccctgttgtggctgcaagtggcactcaagttgactagagcacagtgacctgggttgtaccccaagtgcactaactcctcaatgcccttttaagtctaacttatttgggaaacacataacaaagggtaccataaaccgaatccaaattacgtgttgggccaaaaatgttgccagaactgaggcactttgtgatggagttgcaagagatagcttgagatcggctcagtctgatttattctagttaagccaaagcttaattatttgaggaggaaagtcttttaggcttgaagcagcaaaatactgtttatatatgtgttaccttcctcgttggaagattctacgattgctctgttctggtaggtggtgaaagatatgccaaagttttaggcttgtttttctgatcttatttttttaatccagtggtgccaaaaagtatttagggtatgtttaaggtatatttaaaacatcactctgaatgagtttccaacagtctggggctgtataaaagtcacactcttgtacttgcaggtgatggtgtcacagggccagggcctccagagctctacggctttctctggttttctatagggccaagggcacaggacgcagcattccagaccacactgactgcttttgctgagtttctacctcacttgtggcaagtcatctacctcatgttagcatctgacaggtctcaaaaagaatagtattaatccagtgggcagtgggtgggagtgggaagctacctctaaaagaaatgttaccataaatctacaactgatttctcccaggagaaatgttctacttaccttgaaagagaaatgtcaggcaaatgtagtcataaatccaagtagttcttagcaatctggcttttccccctcaaaaagaattatgcataccattactgttgttcagtattatgaaactactggttaatctgacctattggaggacttaactacaaataaagacctttaggtctctttctcttcaagagaaaaatattttatctgtatttcgaatgtctgcaaataataccctttaggagcaattctaaaggtctagatcttggaaacatcaaatatttgaagggaatgagaatcctcttgacttcatgattgtatttgtagctctctggacccggcaggacgttcatcaccatgatgttgcaacaatcactgttttgactgagcagtgactgttgaagtgtgtattgctcttttgttttgtttttatttttttctaccaaaggtaacatgttgacgggttttttttttccttgtttattaaatacttgataaagttgagaagcacattaccaggatatactgtattgaccctcccacctctcttctgccctaatttttggttgtttggaagagaggagggtcctaagaccactgtcattatcatgaggggcttataaatgtcatggtgaagaaatacctcaatgatgtctatttttaaaactgatcttacgggttaacaagccagcctggtgggatattttccatcatcatttaaccaataatggttctaaaagttttgtgtatccacatggtcttagacctccttttaatgattgtattaacttacaagctcaggtagtatttttcttaagactctatctcagagcacactgactgaatgttgatgtgtgtagcaaagtgtttactttctttaaataaccagctctgtaactctgtaagttctttgtgtttctagcagtctgtgtagttgtctttcttcagaggaagatttttcacatttctggggttttcttgcttttagggtggtaagattcctttctttttttcccttttctcctaaaatcgatgcaggtaagggtgggtgggtaaggggtgttgttttttaactagcatgttagttatacttgggtgggtgggagggttgttaaactgaatcttgcttaatactgtccattagctctcatgccgggtcagcaaaatgctttaatttttaactgcagaacatgtgactcggttgagtctttttgtcttttttttttttaaataaacaattgggggaattaatgtgggcaagttgccttatgttagaatgactaagttaaacctcttaatttgtatttgtccaaggcagacatgatataaggaatatgcactaccgtagtaactcccctggccgcagaaaccacactgcaagcctgtccggggtggggtgctgactgccatttgccacttttaaatgggcactgccgtggtaatgtgaatcccatcaatgcagtagatgggtggggaaatgaagatttccccccaaacctttaggcaaaagtgagtttttgtttggttgattttgggtttttttcccccctcctcttttggctttcacattttaaatcttaaatgttactattgcaggccgcaggcatgacaggcaatgagcaggtgaagaaccaatggaaaagtgttcaaaaactcctgtgttagctaacaggcttctgaatgtatcactgtggtccacagagaaggctggaggaggtagcaaggagatgctgtatcagctactacagccttaaaacaaagttggtgtctctttggactttaaaattgttcctatgcagcttattttatttttgtttaatcaaataaacgagg

SEQ ID NO: 13319 - DNA, 1458 bp, Homo sapiens
aaagtcagggagaggctggtctgtgggtacaggcagcacctgggaaccaggatgaaattcagaaatttccacactgttctctggtaccaacatctgtggccactgaagcccgtcagagggaccaaacctgtattttcctgaagcaggagtgggtctttggggcaagtttttgttgccccaaagaaggtggatgggggcatccaccttcttcccaccttggccagttatcccagcaagaagctaaaaccaaggctggcatgggcctggctgtcagcctcgcctttctgggggcatttctttcctccattgctgctggcctgccctacatcagggcccccaccttcctcagggctttcggtgcatctggggttgatggttctctgtctctctctctccagggccaggtctggattaatggctttaaccttggccgctattggccagcccggggccctcagttgaccttgtttgtgccccagcacatcctgatgacctcggccccaaacaccatcaccgtgctggaactggagtgggcaccctgcagcagtgatgatccagaactatgtgctgtgacgttcgtggacaggccagttattggctcatctgtgacctacgatcatccctccaaacctgttgaaaaaagactcatgcccccacccccgcaaaaaaacaaagattcatggctggaccatgtatgatgatgaaagcctgtgtctttgagggattctaccctgaacatacctcacagatcctccctgtcatgccacatttcactgattggaatgtggaaatggaaaaggaatttaggatgtgcattttcacctgaggtttccctgcatccctgcagtgccaaagccccaccttcagggaccacctggaatgtgtgaggggctgacagcacagtaacgtgcatacatatctgcagggctggaatggaagctttaaaggtggtagtgatttttattttggaagaatcatgttacctttttgttaaataaaatttgtactcaaatgatgatgtcactgtttttaatgtgcaggtattgaattatatggtctgacttaaatcataactagacttgagtgggctgaataaaccacttcactaacttgaagttcaaaaggatggaaaatagtcttggtttgatctgtggactgctgcttttctgatcgttatttgacttgcttttggactagataacctataaatacagctcaaaacaattatgcaaacaatctaaatgattaacagttgcacagtgtacatagtatggtatatctatatagaagcatagtattttagccactaaaatggtgagagatctatacttatatgcaaattttttgatacatgaaaaaacagattaccttaaattggatcccgttttgtgtgtttcaacataagaacttcacatattcacacagtacaggcctatacacatgtcagtagtcaggcat

SEQ ID NO: 13320 - DNA, 1107 bp, Homo sapiens
atctctgggcaatggaattaatggatacttttcctgttttcttttcatttttctagcatttctaccatgggaaggtattatttatgtgatgtttaaagtatctactttctattctagggaagaataccactacaatctgaacaccagtttggtgttttttgtttttcttatttctcagtggtgggagagggttaataggaggtaaacttttatggtgaattgttggtgttttttcttttagtcagttttgaggtctgagtgaaggaaatttttccagcagtcattaagccttgtcatcttagcagatgctcagatattttcccacacaaaagcttgcattagggtggctacattaggatctcctcatttttccctgctcttttttcactcacaggttgaaaatgaatatggcagctactttgcctgtgattttgactacctgcgcttcctgcagaagcgctttcgccaccatctgggggatgatgtggttctgtttaccactgatggagcacataaaacattcctgaaatgtggggccctgcagggcctctacaccacggtggactttggaacaggttggtgtttgtagtaacagaaattgcagcttaaaatcagctttttactcagtcagttgctctgggcagctgttgttataagtgtcatgggcagattgagatttttcatgttttcatttttcaaggaacaggtagaatagaatacttgcacccctcagtaacagagggttatctgtaggccaagagcttccagggtagctgcattttcagcactggtggagctagcctggaaaatggagtactgctatctcaggggctaggctggcccacccaagatgaagaagcaggtaggcatctccagctgtgagaagctctaccttgaggcagtcaccttttaggctgtgtctggggcgcgcttctctgctctttctgccctccctgtcctcccaccttggcaggacactcggggttatgccttggctgtagccaaccttgaggtcagccactggctgggaacttaccttatgctttgttgtctttctgcataacttagaacactgaactgtcagggctggaggtggtttggcagatg

SEQ ID NO: 13321 - DNA, 1197 bp, Homo sapiens
aggtcatatttacatagttttacaactttttgcaactttgtctttctgacaatttgtcgtgaatatttctccatgtcacatccatgtatcatcttaattattatcctttaacagctccctggtagtctcttttgcggatggaccatcatttaattcccttgataggcaaactcaccacttagcatgtgttgtcagtgaaccccattcattatatattactttcaaaagattttttctaattgatctttgctcttgtattttcattgggatttctatatgccatcttgattttcataagtttgtcttccactgagggctggccactcttttttaaaaattgagatataatttatataggatagaattcacctttttaaagtgtacaattcagtggttgttagtatattcagagttgtacagccattaccactatctaattttaaacattttcatcaccttagaaaaaaccccatatcctgttcctccctcctcccagttctaagatgaaaaggttggtcctataaactgttctctgttgtgtctgaacaggaagcagttcagttctttaatgtgaccacactccagaaggagctgtatgactttgctaaggaaaatataatggatgatgatgaggtaagttttcatgcttagcacatgtctggtggctacgagaaaatattactcacatctttgctagaatcactggaaggctgagtcctccctgaagtaagaaacagaggggaccttgagaaagacagttcctgtgggtgtttcagtgacagtcagaatgctggcatgggaaagagcggctttctaggaaacctaggcaggagtgccacatttcctgatagcgaaacgggtgtggggccacactccaggaattcacagtggtcattcttcatcttttcactttatataaaaacagtgaatttttaattgctcagcactctgaagagacatggatactcacaccccaatttttctgctagactattgctattattattttttctaaattgcatctttactgtaagcattttgtcattctctagaattgcttgaaattcctgattccaccttactcagctgaccccttttctgaccctgactcaactggttatggagtggtcattttgtgatgagtctggtcacagaaaagccatcattagcggtagtatttagagtatttgtttggaa

SEQ ID NO: 13322 - DNA, 2150 bp, Homo sapiens
gaggagctagagcaagttaatctgcttgtttctctagaatcatttaaaggtaacctctgaattgggaagggaggttgtagttggcagggagttttccatttaataggcttaatttcctaagcctgactgaagaaatactgtctttcctttttctgcagctgaaagtagtgatggcatccacataattttgaagtgatgtcttatatagactgaactgtattcagtaccaaatagtcacgcttaaaagtgtgtgaagactgaatccaagaagtcttgggattggattttaccatatgaaatgtttcatattgaaaacacaagatgacctttctaatgagctgtatgagaggtgaatctcctcactgtcactgccatagccaagcatcctcatgagagtgagcacatcggcacagcatgcatccagctctggaggccacggtgcaggcatagctgcctgctgctctggcagaggccagtaaatacagttcctagaagcagcctttgctgtctttttacactgtatgcggtttggaaatgaatgtagaaacttactgtgggcatttacctttctgtgccagtttggcttttattgcctgaaccttatgctgacctggagaggagatgggggacagtgctgttgtggggccagcagtgaatctgtatgcggagagttgtgttgtgctgatgtggccgttggtggtcaggtaagaggctcggcaccttcttggaagaaatcatgtctgagggtgtacgtttgatatgatcatgccagattggagaagatccaagccaggaagatgggcttgaagcaaactgcattatcaggagtaccttggtgagaggatcagtgtaaatcctaataggtacaaagacttttgtgttttggctttgtcacagatttattgaaaaacttttttgcttctgcttccatttttagcattttagtttctggttttcatttttggagattccttgccttttaaactcgtggtttttctctcattttcttccctctctccctccatctctgaccacccccaccctaaccccccacccccaccatcctattaaacatttttaaagccctaccccagacattggaaataggtgacccaagtagggggagaaagtattattgttgatagcttctgactaggtgttaagggatcttcattatgaacaagatgaatttttttctggaaacactagatgttatcaatcaaacactaaaatgtaccatacaaatcccttaagcctctcaaatattgagctttagtacaatcatggatagacattctggtgatgatttaggggctttttatacaccacatactagcttctttctctataagagtgcctctttcataaaaccaaatgcttgtctgctagcatacttttcaaagggaatccactgttttctcactttcctcccatatctccgtccttcatccaaaaccttcccagaatccatcagcaagcatgtttgaggcctgtggtgtaggggactgaattttttttttaacttctattccattttaattgtaggatatctttgtccatatacccaggtgtcctgatttgaatgtactatttgatcctcattgtgttcaggcaaaaaataggaaatgagtaattttgagtttgaaatctctcccagaagacaaactacttcagtgagtaaaagctttgacattttatgttttattcataaagggggttaattatttgctacaaagaagcacgatctattttcatcatcgatttgaaaatatctgtaactcctatagatcctataggcagagagttttcctttctgactttttccctttgctttcgtgtgaccacatgttttctgtaccagtcactggggaaagaagtgagtttatctcgtttgttttaaaagttttgcttgtctatttagcattcctttttgggtctcaagatttatggaacaataaatgtcatttaatgctgtgtgcttattttgaattcctcatcaggttttagaagcggggtaaaaatacttagatgcttatcagacttgaaattatactgagtggcattgaacgtgagtttgtcccagtgaaacaggctaaataaattttggcaccagcaaatttgttactttgtttttttaatagtaggatgta

SEQ ID NO: 13323 - DNA, 1269 bp, Homo sapiens
ccactactgatgtttctggacaaagttagtgaagctcatcacagcgaaccaggtctctcaaaagaaaggacagatagaccaccctcatcaatgaaaggaagttctcaaacacatcctttggaacttactattgtttcccagttttagttttttgtttcgtttcgttttgtattttctgtaacagaggactatcctcagtctgcatgtaacttttatgatagttattccaaattcaagaagaagcagtattaacatcaattgatcgacacaaagtaatttttaatttaattcatcatttcacatgtttgtactttgtcttcccattaacctttgccagtgttatgattgtataaatttttttaaatgctggttaaacaggaatgcttaaagctttaaaagtttaacagtctaaaacatttttgcttttattcaactgcagaataatatttttattgctactttgagttttgtttcgtatcatgtcctatgctagaaatatttaaatgatgtgaaacaaagcaggactaatttgaactacagctggactccgtttgtgtgatggtgatacatgtcattagttgcaacttctttggggtgatctatagtttgaaaactaaaacctcaaagacagatgttacagaatcagccagttctgtaaaactgatattgtctattggttattgatcttgccatctttatttaaaaccatgtcccttctatgatcccttaagaaagctgcaccaaatcatctgcctgttttttcttgatacttactgaaatagaaggttttattgcagggtttattttggtttgtttatatctttgttgtgaatgatgcttttttgtatttattaatatcaaattcacttatgaataaacttgataatggaaacggacaaaaaaaatcaagtgcgtgtgtgtccttgaccgtcttctgtttctcacgtaataaacaaattatcgagacatgggagtgaccagcaccttttctttaaatggtggaacctggtttccttttaccatgaaattgtcttacttgaaaatattgatcctgatgagagagaagatggtgccaaggctgtctttgtataatgggctcaaattctctacctcttcagggctaatacttttaactgagctgctgcctatagtgtcttttggaaaactacttaaagggtgattttctgttactttttagcaaatttttttaatcacctcttgctacacccattcttttcatgtgcagccgactcaaaaattaccagtttt

SEQ ID NO: 13324 - DNA, 1146 bp, Homo sapiens
aaattggataatttaccagttaaattctgcttacataaatgttacgaattgattgggtttttcttgaactattacttagaacactgagatggtgtgtttgaattatatgaggaatgtttaactaccaaggctaaagtttgactcccagtaatctgattctgaatacttccattatttgcagagcacagaagttccacttacaactaccaatttttaggaaaaaactttccagctagtaagcctaatttgtgctggagaaaatcatagaaatacacttaactttggaaatgacaaaaggatccaaataggaagaacatttaggtttctttgagaaaactggttatgggaatattttttgtagcatcactatttctctttgaactaaagaatattgacaagattaaagacacagcctgctaataagcagttctttgtacctatgtgtgaaaaaaacgtaatgtttctgatcataggcattgttaatgcctatttcactgtgctgattagcaaaatgttcttcattattttcaatttttctctttaaaaatttactgctctcagctcttaggagacatacggactaaggtatagacattgctattttctgacatcttatgataccataacttttttttctttcatcaatttaacaaatgatggtcttctattaaaaatcaaagtagaagtaaaatccttagacatacatctatttttctgtaaatatggttatcgagagagatactgcttgaataatgtcctctggaggtgctcattctttcagcttgactacttcatacaaattaaatgaggtcattcacactgaattattgtgtttaatctgttttatagacatcttcaccactcatcagccaaaattcaagtatcagataacataaagatttgttttcagctcttttaaggaaatcttaaataaactattctttctcatttcacttgaaatatgcaaggtataactggcatttacatatattaaacaaataagatttagatgtaaagaaatcaaaggaatctgaatatgctttcttatatttattgaattaaacaatatagatacattgagaaaagcatagagggctctcaaggagttcgcctccttaaaataatagtagactaaatagtttttca

SEQ ID NO: 13325 - DNA, 1279 bp, Homo sapiens
tgagtatccagggaaatgaaagtaggacttgaaaataccccatgaattgctctgtctcagctgtgtcctaactccaatgtgagaatgacagggacagggtaccctgaagctggatgaggcagaggctctggatcctcttaactttcctttctccttcctttttcactcccagctcctgggcaaaaataaaaataaaaaataacttactaagcactcgacagcatgctaggtgccaggctggatgccagagatttggaggtacaatagacctgtccagccctccaagagctgcaaggaggaagcagaccctacatttcactatgaagcaagaatggagcttaggtaaacaactagagagggctgcccaaggaaacgtaggcatgtttaagatgtgtttggctgggaggtgaaggtgggaggtattactgaaaggtgatagaaaagaaggttataaaggaaggtaaaggattgcctttagacttcagtgccaggcaaagggtattgcaaagccattgaggttttttgagcaatacagagaagtatctcatatgcactgtggtagattacattttgaaggccaattttttacacctccctatgtccacaccctttcccacgtgattttccagttccctgtgttgacaccagtggagtgtatttcaccaccccttgattttgggatcagctctcaaagttaccaatgggatctgagcagatatgtcatgaagctgaggcttgaaatatgcttttgtagtggagtattcctgtgtacttctgccattgccataataaggacatgccctggatagactgctggcccaggaagcatgagagacactgcccaagagacctacagacttgcagtgagaagtagagcttccccagctattgcagtcaaagcagatccactcagctgtgttacatcagtcaatcctcagccaactcatgatacatgggcaaacccagctgagatcaacagacacatccactaacctgcagatgaatgttcctgttgtatattcctgagatttttgtggttgctcattacatgtaatagctgactaacacactaccatatttccctccaaaaaaatttaaaaatactttgtcaaggaaactaatcactccgtgatcaaccgtgggtacttgtgaggttaaggctaggaagtatttccctcctttttttgtggaaggaagggcaggagagtgctggaaacaactgtggagaagtcatggttctgggtaagacaatgtgctcatacgcctcctatgtatctga

SEQ ID NO: 13326 - DNA, 1228 bp, Homo sapiens
atcaagaagaaaatcatccttgccattcagcagctgggaaatggcgagtggacccagggcctgcagaagcgactgaagcacctgaaaggaagcatccagctcttcgaagctaagctggacaaaggagcccggatgctctgggagctcgccattgacttctcccctcgatgcagtgagaaccctgagaagatcattgccacggagcagaacacgtgtgcaatggagaaatcagggcggatctacacggaaatcatccggatttgggacatcgtcttagatcactgcaaactggctgattccatcaaggccatctgcaatgcctacaaccggggcttgtcctgtgtcctgcggaagaagctgaaaggtatcaataaaggccaagtgtcagctaacatgaaaattcaaaagcgtatacctcgctgctatgtggaggacacagaggccgagaagggcagggagcatgtcaatcctgagtactttcccccagccagtgcagtggagacagaatataacatcatgaagttccacagcttcagcaccaacatggcctttaacatcctcaatgacacgacagccacagtggagtaccccttccgggtgggtgagcttgagtacgcggtgatcgacctcaatcccaggccactggagcccatcatccttattgggcgaagtggcactgggaagacaacctgctgcttgtacagattgtggaagaaattccacgtttactgggaaaaagctgagcaggcaggaagcccattgctggccaaacaggtctggctgaagagaaggttggaagtggaacccggaaaagagagtccaggtggggaggaagaggaggaggaagaggacgaggaagaggaagattctattgaagtggaaacagtagaaagcatagatgagcaggagtatgaagcctgcgcaggaggagccggtgtggagccagcaggggacggccaagctgcagaagtatgtgcaccagaacatccccaccagctggagcatttacatcagatctttgtgaccaagaaccatgtgctgtgccaggaggtacaaaggaatttcattgagctttccaagtccaccaaggccactagtcattacaaaccactggaccccaacattcacaaactccaggacctgagggacgagaactttcctctgtttgtcacttccaagcagctgcttcttctgcttgatgcttctctgcccaaaccattttttctga

SEQ ID NO: 13327 - DNA, 1162 bp, Homo sapiens
tacccagtaagtacttgaatttgaattctcttccttttcatttttgcctgcaaactgaccagtcttttctgagttcatctcttctgtacgttttgtcaagtgcagtgaacagcaactacaaaatattttgtttttctgtctttttctttagtaaagggtagatgatctgcctttcaggttatctcaaggggcagtttcacctttccataatataaattacccttgtgtaagttatttcttccatcttctgatagcaatttcctgaatgcctgccagctaaccattaagccagtgttcagtattttagcattttaaaaaacaagggaccaatttctgtgtcagcatgggctagcttgccattgaataacaaaggcaaaatctcactgtctcacacaacttttctattgcaacttgcctagggactttggtttagatcataggttggccatgatcaaactatggtccatgggcaaaatctgtctagctccttatttatctaaataaagttttactggaatatagccttgtccatttatttattatctgtggctactttggttctacaatggcacagctgagtagttgctacagagtgtgtacatctcacaaaacctaaaatacttattctgtggccctttacagagaaagttcaccaatttgtgctctaagttgccttcattctgggtctcaggctgacaaagcagataccatcaggagtgtgggtgctaactttgggaaatgaaaaaagagtatggcaaatcacttaaggactcttaaaggactttcattggccaaagcaaatcacatagccacattaaagttctaggaggagtgtgatccttgcatatacctgggagaaaaaccagaaatatttggaagacaacaccactgattaacatcttcatttatatgctttcttccaatatattttcaacttgttactgaggtaaaatttaaaagtgtaccgatattaagtgtacacctcagtgggtttttatatatgcccttgaatgcaccacccaggtcaaaatatagaatatttctagcacttcagtaggtgtccttatgttccccaggcccccaccaaccccttttatcaccacggattagttttgcctgttttaaaactttatgtaagtgaaataattatatgcactcttcc

SEQ ID NO: 13328 - DNA, 1200 bp, Homo sapiens
gcctccggagggcgatggggccctgtgcctggtctgtcgccgcctcatcgtagctacccgcgaacgcgacgtcaggcgccactacgaggctgagcacgaatactacgagcggtatgtggcggacggcgagcgcgcggccctggtggagcgtctgcgtcagggcgacttgcccgtggcctccttcactcctgaagagagagctgctcgtgcaggcctcgggctctgccgcctcttggccttgaagggtcgcggctggggtgagggggactttgtataccagtgcatggaggtgttgctgagagaggtactgcccgagcatgtaagcgtcctgcaaggcgttgacttatctccagatatcacaaggcagaggatcctgagcattgacaggaatctacgcaaccagctttttaaccgagccagggactttaaagcctattctcttgccttggacgaccaggcttttgtggcctatgagaactacctcctggtctttatccgcggtgtaggccctgagttggaggtgcaagaagatcttctgaccataatcaacctgactcatcatttcagtgttggtgcgctcatgtcggcaatcctagagtccctgcagacagcagggcttagcttgcagagaatggttggactgaccacgacccatactttgaggatgattggtgagaactcaggactcgtctcatacatgagagaaaaggccgtaagccccaactgttggaatgtcattcattattcaggatttcttcacttggaactgttgagctcctatgatgtagatgttaatcagatcataaataccatatccgaatggatagttttgattaagaccagaggcgttaggcgacctgaatttcagactttactaacggaatctgaatcagagcatggtgaaagggttaatggacgatgtctgaacaattggcttaggagagggaaaactttaaaactaatattctctctaagaaaagaaatggaagcgttcttggtttcagtaggggcaacaacagtccacttctcagacaaacaatggctttgtgactttggcttcttggtggacattatggaacaccttcgagaactcagtgaagaattacgagttagtaaagtctttgctgctgctgcctttgaccatatttgtactttcgaagttaagctgaatttatttcaaagacatattgaggaaaaaaa

SEQ ID NO: 13329 - DNA, 1185 bp, Homo sapiens
ccttgacgaaaagaagaaagaacctgcaattacatcgcagaacagccctgaggcaagagaagaaagtacttccagcggcaatgtaagcaacagaaaggatgagacaaatgctcgagatacttatgtttcatcctttcctcgggcaccaagcacttctgattctgtgcagttgaagtgtagggagatgcttgctgcagctcttcgaacaggggatgactacattgcaattggagctgatgaggaagaattaggatctcaaattgaagaagctatatatcaagaaataaggaatacagacatgaaatacaaaaatagagtacgaagtaggatatcaaatcttaaagatgcaaaaaatccaaatttaaggaaaaatgtcctctgtgggaatattcctcctgacttatttgctagaatgacagcagaggaaatggctagtgatgagctgaaagagatgtggaaaaacttgaccaaagaagccatcagagagcatcagatggccaagactggtgggacccagactgacttgttcacatgtggcaaatgtaaaaagaagaattgcacttacacacaggtacaaacccgtagtgctgatgaaccagtgacaacatttgttgtctgtaatgaatgtggaaatcgatggaagttctgttgagttggaagaattggcaaaatatctggaccattaagaaaacggattttgtaactagctttaaactaggccaagcaactagttttcctgcaaatcaaatttttaaagcaacttgagttagactttgtttttgacctaacatcccttccttaaatgccttctgtagtttcagatcagtagggagaccatataataattgtatggtacctgtttcaaaacatattttttctgtttttataagtaagttgatattaattaaactcttggcaatatttcttctttcttaaaggaaaatacaccttaactttttttcttttacactgtgaaacatacacagtagaaattctgttactctctgttattaatacataaatgaaaatacttttttttccatattggcatgtagctacaaatattaaaggaggagaaaaggtaatataattttaggtttaccaaatatggtgtgtattcaaataatacttgaccagcttatctaaaatgtacataattttgaggtagcttatgaatttgatttt

SEQ ID NO: 13330 - DNA, 1185 bp, Homo sapiens
ctgttacagatggtgtatggagatggtcactaccttcaaggatctcacagtttagtggatgaatcctcacaatacacctgtgaggtcggctgggaaagtactgtgtttttctttcttccagatgtgcaaactgaaggaaagtgacttactgaagggcattctacctctaggtgacagacctgggacctgcaccccagtcctctgactccaggtccaacactgtttcagcaataaccaagtgttttgtttttcagaaaacaatgtattatgtaaaatgtcaggaatataaattcaacttgttagaacttttattagattattgctggtgatggggtaatggaagtctaaatgtatgtattttaatccacacattctgttgggttttggttgcagtcaggtgacacacagtcttttgcacagaagctccagctccgggtgccctccgtggagtctttgtttcgaagtccgataaaggaatctctattccggtcttcttctaaagagtctttggtacgaacatcttccagagaatccctgaatcgacttgacctggacagttctactgccagttttgatccaccctctgatatggatagcgaggctgaagacttggtagggaattcagacagtctcaacaaagaacagttgattcagcggttgcgaagaatggaacgaagcttaagtagctacaggggaaaatattctgaggtaggagcatgacctttttgcctgtacaaaaatttcttccccttgttctctcattcatattactgtattgctttactcctgtgattggctaaactgttaattctctggatatatcctggttactaatggtatgtagtctgtggcattatctagttaaagactctcaatatctagttaagtaaagacagaggccctttggcaagactcagtaaaattttggagaagattgttgtctgtagccttctggttcttatattctgttcccctctcctttcgtagtccctctgttcaaggtcacttggacacccagtgtggagttcatcttctggctcatatcctctcctttattcctctctaactgatgcggctccaaaatgacctcatctgccagtgagagtcccattattactgattctaaaattgttttaggtagcctgattatttgacagatttggttcattctcattgtacctacat

SEQ ID NO: 13331 - DNA, 1195 bp, Homo sapiens
ttgtctttttttttttttttttttttttccaagacagaggagtctcgctttgttgcccaggctggagtgtagtggcatgatctcggctcactgcagcctctgcctcctgggttcaagggattccccaacctcagcctcccgagtagctgggactacagccgcatgctaccatgcccggctaatttttgtatgttttggtagagacagggctttgccatgttggtcaggctgggtctcaaactcccggcttcaagtgatctgctcacctcggcctcccaaactgttggactgtgccttgccataatcttttctttgttatatgattcctttagtaattgagcatagattctttgtcttttctagtgtttggtatgataattttgatcttcaggtaggtggtagacatcatgtctgtgtatcattgttagtagacaagtacgtactttaataaaaatgcatctgtttttaattaacagagaattcttgaattggaaagttctttggaaaaaagcttacaagaaaacaaaaatcagtcaaaagatttggctgttcatctggaagctgaaaaaaataagcacaataaggagattacagtcatggttgaaaaacacaagacagaattggaaagccttaagcatcagcaggatgccctttggactgaaaaactccaagtcttaaagcaacaatatcagactgaaatggaaaaacttagggaaaagtgtgaacaagaaaaagaaacattgttgaaagacaaagagattatcttccaggcccacatagaagaaatgaatgaaaagactttagaaaagcttgatgtgaagcaaacagaactagaatcattatcttctgaactgtcagaagtattaaaagcccgtcacaaactagaagaggaactttctgttctgaaagatcaaacagataaaatgaagcaggaattagaggccaagatggatgaacagaaaaatcatcaccagcagcaagttgacagtatcattaaagaacacgaggtatctatccagaggactgagaaggcattaaaagatcaaattaatcaacttgagcttctcttgaaggaaagggacaagcatttgaaagagcatcaggctcatgtagaaaatttagaggcagatattaaaaggtctgaaggggaactccagcaggcatctgctaagctggacgtttttcagtcttacca

SEQ ID NO: 13332 - DNA, 1330 bp, Homo sapiens
aagcagaaagcaaaggagatgcaagaaacgttaaagaaaaaattactggatcaggaagccaaacttaagaaagagcttgaaaatactgctctagagcttagtcagaaagaaaaacagtttaatgccaaaatgctggaaatggcacaggctaactcagctggaatcagtgatgcagtgtcaagactggaaacaaaccaaaaagaacaaatagaaagtcttactgaggttcatcgacgagaactcaatgatgtcatatcaatctgggaaaagaaacttaatcagcaagctgaagaacttcaggaaatacatgaaatccaattacaggaaaaagaacaagaggtagcagaactgaaacaaaagatcctcctatttgggtgtgaaaaagaagagatgaacaaggaaataacatggctgaaggaagaaggtgttaagcaggatacaacattaaatgaattacaggaacagttaaagcagaagtctgcccatgtgaattctcttgcacaagatgaaactaaactgaaagctcatcttgaaaagctagaggttgacttgaataagtctctgaaggaaaatacttttcttcaagagcagctagttgaactgaagatgctggcagaagaagataagcggaaggtttctgagttgactagcaagttgaaaaccacagatgaagaattccagagtttgaaatcttcacatgaaaaaagtaacaaaagcctagaggacaagagcttggaatttaaaaaactgtctgaggaactagcgattcagctagatatttgctgtaagaaaaccgaagccttattagaagctaaaacaaatgagctaatcaacattagtagtagtaaaactaatgccattctttctaggatttctcattgtcagcaccgtacaactaaagttaaggaggcactgttaattaaaacttgcacagtttctgaattagaagcacaacttagacagttgacagaggagcaaaatacactaaatatttcttttcaacaggctactcatcagttagaagaaaaagaaaatcaaattaagagcatgaaggctgatattgaaagtcttgtaacagaaaaagaagccttacagaaggaaggaggcaatcagcaacaggctgcttctgaaaaggagtcttgtataacacagttgaagaaagagttatctgaaaacatcaatgctgtcacattgatgaaagaagagcttaaagaaaaaaaagttgagattagcagtcttagtaaacaactaactgatttgaatgttcagcttcaaaatagcatcagcctatccgaaaaagaagcagccatttcatcactaagaaagcagt

SEQ ID NO: 13333 - DNA, 1160 bp, Homo sapiens
aaggaggcaacacatggtaggcagggaagaattcatttgggagaagggcatggtgacttgcaagttggagactcacaagtaggggtgcttaccaaatagcctaatcccaatctcagagcagtctcacttgcagagtagctcgtaaggctatattagatacaaaattggtttctttttaacattgactgtattttagtgattttgttttggcataataactagtcttcaaaacataacctgttatgtatatacataaagattcaacttagtttttcttagtgtttttacttcaaagcaacaatatactttttttttaaatcttaaaataagactagaaggcttttataaaggaaattacataactgttccttaaattagaaatgacacatcaaagattcttttctaattattgggggggcttgctttagattagtatcccacagatgtcaaaggaaatgtcagacatagctaattgtcatattagaaactgagcctgactaaataagtagctatagaggttattctttcaaacaaggctaaaccacattgacacagccatacaagaaatgtcaacaaaccaagacagagaacagtgatgcatttacaacaattttcggttgatggtgttttagaggtggaggccaaattcacgtgtgcctcggtgggaagatatctaagatatctaaggatatctagtagagatctctgctgtacttatgttgagaaaagggatttgtttttgcaattaagtctaagaaaatttcatgacaagtggtatttaaaattagattttctaaatgtcgtatgattcattgccttattttgtgccatagggcctaactatgtttgcatttgtttttgagaatggtgtttctgtttttggtaagtcaatgtctattaaatcagatacctgtttgtggttatttttcctgttaagtctcttgctcagcaaacacttgccctcattactcaaatcagatcaatattccaattccaaatattattttagcacaaaggttattgcagggtttataagaataaagagaagtctgggttgccctgtacaataaatcatggcaatgaccaagacaaatgagggaatgtaaggatggaaaacagccttttaccagggcagtcaagacaagagaggacaatttgta

SEQ ID NO: 13334 - DNA, 1149 bp, Homo sapiens
tgctgcttggaaaactgtccacacttgctactctttgagaatgaagttgtcattcagggcccctcatgtagccaaaagaccaagaaaaatctggcccacagataagttgcagactgcctttaaaatagattttatcagtggagaaatggtgatagttttttcttcagttttctcttgggaagagttttatgttgtttaaaagatattttgataacttaacctgctttatgggcttacataatattcctttcatccattctttttaaagaacggcttacctttcctatttatttttagggtgattttttaaaaagacttgtgcaatacattttgaggtgaaacttagtggattttttctgataaattagagcatttaattgactattttattcaggttgatctgttgaatatttgctaaagaccagttctttaagctaagacatgtaaaaaatcccaaatggcagtacctcattgtttacttagcttttgtacttatatttttcagaggaaaaaacactactgtaaattgtgaatagccaatacataactgtattgtatgcaaatctgtgattgttggcagtgtcatctctgagaaacagataaataaagtttatttactatataacatttgtttattgtacttgttcctcagttgaaatctattttaaaatgtttaagaatgcatattctatttggatgaatttagtgaggaattatttgtcaatataactaaatgctgagcatttgaaaagaattttcacgttcaaatttggtatgaccaagttagaaggagcatggaaataaatactccatgatgtctgctttaggattctgacaacttgggaatgcctcctctctctggaatagaccatacttgaattattttttaacttggtgaaagagaaatttctgcacactgagagatgggtactgttcagagggcttcacacacccttcatattctaggaaatacaatactcaatatctaggtattatctaatctctgcctcaaggtagaatctcagttttccagccagtctggaccttagctcctgatgtatcttacattgtgatagagtggggagttctgggggatagataaacaaggggtctgcccataacccacagctgactcatttactgttccag

SEQ ID NO: 13335 - DNA, 1027 bp, Homo sapiens
gcctctgcctgcctcccgcctgtgcactctggaacctctggcctcaggggacctgcctgtcctcagctccctgggagctgaaagtgaggatactccgtgctccaggccacagggtgaatgtggccatgcctacctgttttgtttttttaagaacagaaacaactattttaaaagaactcttttaagaaatttcataaagggacatgcattttactgggtttgcttttcttaaaacataccaaaaaagaaaaaaatagaaaaaaaaaaaaaaaaagcttgatctctatcagacttcctttcaactgtcctcccctccaagcagaccacctgtccccttctatcccagctcagagcagctgacccaactcagaatctctttcctacaggatgaagtgccttttgaatgttattttaagccgagagttaatttttctacacaacatatttccagacatcttttagtcttttattgtcttagatactataagaagatgaacatgacaattttctagaacctggtagcgtgtgtgtgtgtggcggggggtgctgagggaggggagtgagtcacaggagcctgtcccccaacaggtgtgactgctctgacaacctgtggcatgctgcagggtcaggctcctgataggaggatttcatgactatgtcattgtctccactcatttttgacccagtttggaatgtatctgcaattgtgtggctcaacactttaggaaacaatagattattttatattattatttctgatggtgacaagtttgtcttgaggtcacattttctccttgaaaagtgacatcctgtcacttctgctctcacactactgccatacatttgtgttttttgttgttattgtttgggtagagcagttacaagaaaccctaaaacccttggatataaaagaaatctgtttattgatttttaaatctttcctttccaaaagctggatacacatggagctgtttgggaattttccttgctgctaccgcgctgccaccaaatggaattgaccagcggc

SEQ ID NO: 13336 - DNA, 1178 bp, Homo sapiens
tgaccacactccaaaattctgtttttattttaacccttgaatctgctttatgtacataatcaaaatatctatatctatatctatatctatatctatatatttttaatcatctacatgtaaatgaagcaatagaattctaacataaggccaagaaatgagacgaatgtttggggtttatgttttttaaggtaaatacgggtattgtttttaattattaccatgtattaaattgtgggctttgaaacctaatgaaacctgttagccacttctctgtgccatatacttcccatgttaccaaaatacccccaactctttagccaaaagagaaccctgacctcctgagtttccatgctcctttctgtaccaggtttaaatgtagtcttctggagaagtatttttgacattgagctctgggacaggacaccttgggtttgtggactgcagcccactatgatgttattacttctctggccaggcctccagtggaagtgcacaggcactcccaatgttgttaatgctctgtcttccatttgttctggaatcctacgtgttggtctgtggttccatgcattagctgtttgtaaataatgcatttgcatactgaaaaaggaatgccacctgccacagttgatggtgaggaagctcctttgacgtggtgcaattttgatgagatgtctctggggacacgaggatgccctaatgatgctgacttgtcatggttgcagcatttgaacttttggtgttaaaaaaaaaaacctgtaagtctgtaacctggcaacattttacaaccctgtatttttaaagatggctttctaataaaaaatccagaaccacacagccctatggtcaaacaatcctacgtttgtgcctctgcttttaaaggtgctgtgctggacagttggcatgccagggttcgagaagagtgaatggcttgacgtacttgcagttaactgtgcaaaattggctggctgcctctgttcctactgtactgtaactttgatcatgtctgttcctgttccattctcccaggagcttctctgcagactgacacaccctcccccaccccgggtagtggagatgctggtgtctgggtagtcatggatttctgctggacatttgaatgtgataaacaatccagcattacttaggaaatgctacatgcggaatgtgcacgtttc

SEQ ID NO: 13337 - DNA, 1172 bp, Homo sapiens
agatattttttttgcactggtatttattggcagtacatatgaaatggttgaggcttttgttttaactgacactctttagagcatttttctctatctgttatgcgctgtaggaacaagataaggattactcttgtttaaattgtatgggaattagaaatgtcatgtttttatatatccatctacttatttactcttttatgtatttgtttttagggagtggagcaactgctgtagtccaagcagcttattgtgcccctaaaaaggagaaagtggcaatcaaacggataaaccttgagaaatgtcaaactagcatggatgaactcctggtatgcacatcttatacttctgaaatggagagatatactcatatattcacattacaatgggaaataacttgaagtttttgatttgtttctttttaaaaaagtttatgatttcttcattaataaataatattcattgtaaaatttataaagtctggataagtagaaaaaaattagttataatattcttactctgagactaacatttaatatgtaacctttcagagtgaacatttgaatatatttgtatttttatgataatgtagtcagattcttgctcttttcatttaataatttatcatagaactttttctgtgtctgtaaatatggatcagtatcatttacagtgtgtttatagtattctgttgaatagaccacactttattaactatgatatttgctaattactttgtttcctcttttttattgttataaacaatgcttgcttttctattcccttaaaataataccatggaattgtgattcctgggtcaagtggaatatcctttgaaaggctctggccttttaaactttcattctaatgctggatataagacaagagatagaatgacccccaggcagcattagcttcttcaaaggctagggaaaggaagaagaaagggaagtcccaagcaatagctgtaagaatgttctgtgacattaaaatgtaaccatacagggattgtattgtattttttttaggcattgtgctacccagaatagttttaagtatatagtaagtgctcagcaagggaaattagtttttaaaattacttattattgtttcaaaattttcagtttctttggcttaatgaaaataataatacttgctttggataccttttgagg

SEQ ID NO: 13338 - DNA, 2064 bp, Homo sapiens
agctaaaccacaaccctggaagaggcggcctaaggagattccacacatgcgtatctctgttgcttctattggcctaaacccactactgccaaagaacccagcaacaaacctcccggctaggagctttagaagtctttatgttcttcctgccatcattcctccttttcccacagggaaagaaaagttggatcactagtggccagcatccccagagttccgttagtaaacttacttcatatgtcccctgtcttcctccatctgagaagtggcccatgtgcttcaaggcccaggagggagatctgtcagctcattcttgccttactccaatgatggcccaggtggaaaagtagcagctgtatcgggcttcctcatcctgcctgttcccccacacctgccaggatatggacatcttgggatatctctttaccactgaagtagaattgattgttcagctggagcccagagaatttaatttaatgttttttctttgtacctgatgtgaattctagcaacctttgttaggaaaaagcacagcctcagatggaggcagcctaaactgtgttcttgttttgttcatggtgtttctaagcgttttgctgaagctgctctcaggcacccccttcttcattgctctctccagaaagggttgctagccttaacttcagctggtgcaaaacatctgactgtagccgaacttcagccatcagatccttcaaagtggaactttggattgtttttacagacaacatcgagtaatggcttgtaaatgtgaattttgccagaggtggtttttgaacaggaaaatcataattcatatcattggagaagtatttattttcaaatatcaaattgaagaaaaactcaatcctcccatgaaaatcagttcgcctggcctccaagtcgtgaggaaatgggtatgcaaggctgagatttctacagcaataaaggagacacacactgggccagagaggcctgccttctgcctgctctcctgcactgaccctttggagggggtctctgtgtgctgaagctaactcaagatggaaagtgaaaccacatgtgccgtgacctttaggttttatgagtagacagtgttcatttgattttctacagaaataatataaattattctttaggtttaaaaaagagcactcataatgcaatatgtgaataatcagtgaggttgatttttcttttttcctaccgtttcatagtctttgtctaactgctagtaaccctaccgagttttatatatgagtgggatactcaatctggccttaaaaagatacacaaagatgggctgtgggtccctggaaagggggagagttgccctttacagaatcactcgagccctttccagcactgttggtctgatgaacaaggttgttttaccttattttctcttggaacatatctgaaaaccttccccacaaataacttgtcacaccttttgtttcattctgagtctttagttttagtcatgggctttcttcacctgctctaggtgcaaaggcatgttgggaaagagatggatgttggggaggaagagaggagatggatttcagttgggagttaggaggagagtaggtgagatgatcagacaccggagttcaacgtcccagcagtcttggtaaaaggagggagcctgctgagccaggagggagaaaagaagattgaccagcttgctagaaaaatacttagcttttctttttctttttttgtggaggggggacggagaggaacaaggatggggaggtaggaatgaggtatagaaaagagatagcatcttctttggcacaagactagtggcttaccgcttaccttagagttttgttttttttttttcaaacccatcaaaatctacttatttatgaatccaaggggtggcagcatcactctgttctagcattctttgtggagatggtctggtgcctagctgggagtgagcagcagcccatcccctgttcactttctctagcccatcattacctgtgaactgcagtggggcagtcatggcaaatagaattgggctggggtttctccttcttttcagttcattgtttg

SEQ ID NO: 13339 - DNA, 2191 bp, Homo sapiens
gaatgaacactgctcccctttcccacacctgcaacatacagtgattccgatgtgcactggggttttaagggggcctcttcatcggtttctgctgcagcagggaagtagcccccacccccacgcaggagcctcaggtgttggtgccctttctgtgcatctggactctgtctgtctggctgtttatccatccttctgtggcattaggtttcctgcctcctcccttttgcttaggcctaggggcagctgtgatgggctgcagaatgaggtgggggctggtgccagctggcacacgtaaattaagaggtgtgggacggatgggtggcctacgtccaggggtgagtgcaggaggttggtgaccccaacccaccacccggcctccctccctcagggtggcctggcacccaggactgggagtaggggtttgggtggtggtcccaggggcatgctcagtggttctcttttctctggggcacaggctctgggcgtggggaggctgagacacgggagtgcatctactacaacgccaactgggagctggagcgcaccaaccagagcggcctggagcgctgcgaaggcgagcaggacaagcggctgcactgctacgcctcctggcgcaacagctctggcaccatcgagctcgtgaagaagggctgctggctagatgacttcaactgctacgataggtaccccaagacttgccctcctttcctcttggacccacctgcgcttatactgcccactgggccatttgggtctcaggatgtctgagtgggagataaaggaccaagaaggggctcttgagatggtagccatggccccacgcccttccacaccctatttgtcctaccttagccctgaggaggggtctcagtgtcaacccctggctgttcttccttggctttgggtctcctgtaggggaggtgagttcacaccgtccccctggtgttgcccatgaggtgctctgtctgtgaggaggggttggcagggcaggcctgggggagtcttgcatcccccaggtgaggggtatatggaaaattctgtgcctccaggcaggagtgtgtggccactgaggagaacccccaggtgtacttctgctgctgtgaaggcaacttctgcaacgaacgcttcactcatttgccagaggctgggggcccggaaggtaagggggcagtgtggaagtggggccttgagtcagccgacctgggcttctttggcttggagcgcttggctcctcagttgggtggggtgtggctacagggccctgtagtctggctctggaagtgtgagggtgggcagactgtttgacacagggctctgtgtgtcccccagtcacgtacgagccacccccgacagcccccaccctgctcacggtgctggcctactcactgctgcccatcgggggcctttccctcatcgtcctgctggccttttggatgtaccggcatcgcaagcccccctacggtcatgtggacatccatgaggtgagacagtgctggcttggggcagggcaggatagaggtggggaggacaggccagacctttttaagccttgctctcccccaggaccctgggcctccaccaccatcccctctggtgggcctgaagccactgcagctgctggagatcaaggctcgggggcgctttggctgtgtctggaaggcccagctcatgaatgactttgtagctgtcaagatcttcccactccaggtgagtgtttgaggggctccatccaggtcctctgcctccactgtagcttgaactggaggctctcctgacctggggcaatccaaaccccaaataatattgtggtatgagagaaaagtgagccttactgggcctagttactcatgttacacttggctggtctgtagatttcatgcaactatggaattttatcataggactagggtagggctttgcaaaaccttgatttgccccggttaccagggttttgtttttgacattgggttctttccagcggccctggacaccaggtctggctctgcctcatttgttgggtgatacggggtcactcacaccccatgcatggaccttagtggccccatttgtaaatcgaagtgctagccttaagtgatctcagggatcactgttggcctcatgctctggggcctagcttaatacaggtcttctcctggtccccttacaaatgctgaagctgggaggctggggg

SEQ ID NO: 13340 - DNA, 2669 bp, Homo sapiens
ttcttagcaaagggaagggtctctcatctccaggccacagagatagttcttccattgccctaagaggctaggctaaccctcttgacataacttagacagcaaagcacttcatcctgtagttgggctctgtcacctttctcttcagttggccacattctcgtttcctccatcctgctatgctttgtgtgctcgggctgtgtgtggggtttttccctggtggaaggaagcccagctgtgtattgaatgtccttcatgtgttgtgtgtggctcagaaagcctgtcacttggcccctgtgctctgagccgtgagggtggggaggtggctgttccattaaagtgggagtattggatggccctcttgaaactagaattttgccttttttagtatgcagtataaagtttccagcatctattggtaacacaaagatttgctggtttttaaaataatacagtaagcataagtatgtaagtttttagaattggtactagaagttggacagctagttattctcgagaactttatttcactagaaaaatatactaattggaaagcagtttccaggagttaactcagtttaattttcagtctcagttattttagcctgttgagtttttgatggcacacctttggagagatggccacgcctgattcccatttcaggggcatcagaccatacctttttaagaagctccgtgaatctagtcatctacccttcatcctgggcgaacagccaaaaagagaaggggacaaggtgtctttttctccttctcactggggtgacatgaattcttttagttaatggctgtttgcaaattctaaactaatgaaatacttagcagctaacatgttcaatctagtaatgatgagtttaaatctcaattgacagtaatgttttagataaacaggcccagtaattcagttgatgaactgtatatcttctcagtctagatttgtaaatgtttaatgaattcagggttataagcatagttctttaagtaagattccagatagttgatttgcaaccagcagtctacctatgaatgtatcccaaacctttagaagattggaaaagatttttgaaataatgatttagttttgtaggaaaaacacccccttgaaaattaattcggttgacccagtaacattttttaaaacaattggtggctccaaaaggcctgccaacaaagaaaagtccaaattatctagtgggacattttgaatgttttatgtttattttgggtccactgtaaactttggttcaaaaaagaatttgaatttaaagaatttaccattatttaaattattaccaagtttttacattttcatgatggtattttccaggtatgaatgaaacatgactttttgattgtggtacttcctgtatcccctgtagtgccaaaaccagtgatactttatttgctcctatggcagctcatagaggtaaccgaagtgatttttcctcagtaattgaaacacatattctctaaatgccaatgtgtggtgatgggccctgcactgccttcatttctctagggcagtgtctttggattgtctagggcctaggtaattctgagaactactgtaaaccaaccacagggcactaaagcaatgtacacaccactctttgtgtgtatggaaggggttatataaacctgggctatgctggacatctacagaagagtattacattcacttgcaaagtttacatttttgagctcacagttatgaaaaatatgacccacaagtttttcaggcaggtgaggatgggtcttcttgcaaatgcatgagttctgtcttgagtcctgggaacttctctgttggttgagtgtgggctcattccctgactctcctaatcatgtttgcgtcagaatgttagcattgtaaataaaagaataggttgtataatagatacacaacacttgaaactttactttaaaaaaatcgatagttctacatatatatttagttatatcacttgacagatttcttctacacagtgtggagattgttttataccacagattatttttataaagttagtgaatttgaatgattttgtaatcagagctaatgagctttacctttcaagagaaacgtacactggagcatgagtggtgtggaacttttacttagtgtttatatggattcttgtgatacactggcagactggagtcaatttgcgggtcttttttggccaaaactccacttgtggttgtgtaggacagtgatattcagctcagcttcttgtggattgggaggagagagggcctgcaatgtgttttacattggtgcttcctcctgagatttctgttgaacaaagggttctgaggtcaaaaattagtttgtaagcctttgccataggacatagtcatgtgagagtgtttgggggaacagaaattgtataggggtgcctattggggtgggatgggactcgaataagattcaggtacaaaaactttgaaatgagaatctggtggtttgagtaatccaccagactgaattatctaagatcacattatccaggttggggggcagaattacccagttaagtaattgttcagaaaagtggggagggtggcatgtggatgcagtgatccaattaaatggagagctgccaggcacattttgtcctctctggtcagtgagaatggttgggttggctcgctgc

SEQ ID NO: 13341 - DNA, 2112 bp, Homo sapiens
tcttaagtgtttgttctctgccccattcagtggactgttgacttcagtccctgcaagtgctttagcccgagtggggttttctcagagcactgccacgagttaagtgtgtgtttagccaaataatttctccgtaagggaaaaatgcagtcacccaaattttaccaacaatgacagagatgagagtagaaaagattaggcaacatctgagttttaacttgaaaagtgtccaagtcatcatgaaaggccgactgggagcaagtgattattagagattcttcaggagacctcatctgaaaatgttaagactgccagtgagggaaggaattgttaaaatgccagcggcttttttttcctctttttttctgtaattctgtaaaaatgcagagaaagttgagtggtacttcagaattgagggagagggttaccgcagagtagaaatatatttctagatttcagttccacaccacaaatccacaacaatgccatttttcaactgtacaaaaatctgcttatgaactggacatgatcttaatggtagtgtcaaaggccaagtttttcacctgttaatatttttccacatttgtccttgaatctgaataactttatacagtactgtaaatttaacttacatcgagtttgttgtcaattcttatgaaaagagctttctgcatgtaacacatacggttaaagaacacagcaaaggacaaaatttgcaggaacagttttggaaccaacagaaaatgtcaccttttatttgccatcttatatatatctatcagttttaccagctacttctaaatttgtacattatttgtaagggaaagaaggaaaaccctaagacttgtctaacttagtggagaatgtgtgtgttgggcttaggatggatagctaagtcttattgagctgtgttacctaacttgtatataaaaattgtaattaaaagtttgggttcacctgtttctcacagtttaaaatgatgagtaattgcaaactctggaaatgtgactagtatatgatttaaggctgtagaagcaaggaagctctttcaagtgctaaaactaaagacttctagtttttggctcaaataagtactgtttgtataccaggatatgtgagatgtaaatgtagtaggtcacttttcacccttgtagctataaaataaaaattttgtagaacagaaatagcttgtactactgaattaacaaaagttatactaaagtatcatgtttaaaaaaaatatatatatatatacagagttaagcttgttgctgttaccctgtctggatttgaaaagtgtgctgatttatatatatatattacacacacacacacacacacacacacacacacacacacacacacacacacacacacacacacacacacacacatacacctaaaatggcctaaagcagacatccatgtaattacagttgcaaaatgaaaacattttggaaagaacattgtatcatagttcattcatttgcagtggatctttgttcctttttactgtggtaattttagaaatgagtgtcaagtttgaaattagatctgctaagttggggttttgctgcttgaactctgcactgggtcctcaaataaaccgatgtgaatgtagttttttccccctgtgtgaagaagcagttacaccccaacaataggaggaaaaatctagaactatttcaagttttatctttttgtatatgaaaataaaataataataaaacaatcttgtctttcttaattacgtggcaggggattggagtttcctttcatgaggattagacatgaaatgaaatggcgttcggctgcttagagggctgactcaagtcagttcctgtttggtatgtgtaacattaacagatgttaatggctgaatgcctagtctgccatggtcctgtggggctggagctaagcacaggtctccatttctgccattcagaagtccagggtctagttggggacattatgaatggggaccattctcctgaacgaactgttctgggattttgagtaagtttctgcaggttagcatattttccaaatgtccaagacactccccattccctcatcctctgccaccagtcctgtactttgcagacaaccctgagc

SEQ ID NO: 13342 - DNA, 1166 bp, Homo sapiens
cattttgcttggcaagtcagggaaggccttctaaaggaagtattgtttaaatggaaacctgaaggctgcaacaagagttagccagacaggtcggaggaagagcttccaaacagagaggaccagcatgtgtgatggtctggaggcacaatgcaccagaacctggagcagagatgagtggccagaaagacaaacagggtacttgagaccatgttaaggaatttacatccaatcatgagtctagtagtcagcaactggaggtttttgagcagagctgagatagatttttaaataattactctagctgctttgtgaaaaatggactaaagactgggaaaggagtccagtcaggaagcagttatagtagtttagcaacttactcatgttggactaggctatcattgataccatccttctcttcagccctttagtctttaaggagtaaaatttaaatttgtattgggttgaaaaagtacatattggaaaacatgggattttctgtttcagattggccactagtagactatattttattactgcatggcttgtactttataaaaagcatatgttgacacatttgtcaggtttcctatgttattcgagatgaagtggagaagtacaaccgaaatggagtcaatgctctgcagctggatccagcactaaatagacttttcacagccggtcgagactctatcataagaatatggagtgtcaatcagcacaaggtaatgcagggattaaaatctgtacccagcaaattctggacaaatggcttttactgtctaatatgacacttttcacagtttcagatttaatctctctgaatgctgagttatttggtacactctataaagacatcgcaaccagaattctgtaagcctctgagaaaaaccatccctaggaaagtttcagaagtgtttcagctaagacaaggactccctaaactaggtttgccttacagagttctttgccacaaaggaacaaagtgatttggctagtagggggattactttcaacaattaatttttttgctttaaatatgttccccaacaacctcttggtaaccttactaaaaaaagattgaatattcttttacatttctaattaatcttgaaaaaatattttattttcctcacttaaaagtaattaggatcctcacaaaccccaca

SEQ ID NO: 13343 - DNA, 1159 bp, Homo sapiens
aattgtgctttcaaattagttttctttttcctcatagcatgaagaacagggatagagatagaggataaacagaagtcatccaaagtgcaccgttaattcttaaatcttaatttaaaaagacttaagttttcttgcttaccagactatctgtaggtaacaaaagagaaggtgtttgcatttattcctgttgacatgcaggtcaagtgttctttctgtatacttattttttaaatgttgtatatcttgtgttaatttcatcatgccaacttatgaccaatacaattttacctggaagagcactcctgctttcatgcatagttttctctcccaaagacaatattcccttcttaaaatttgtttctttctaaacgatgatagataattgtactgtgaccaaatatttttcggttgatgtagtggttgttgaggttttcttgtttgttttttgactttatttttcttgccactttaaacaggctggcaaagcttgtagagcataacatgatcaaataacaaattttgtaattttagactttgaaaggaattcataattttagagcctctggagattatgacaatgactgtacaaatcctataacacctctttgtacacaacctgaccaggttattaaaggtaagaaaatggaaggtactgtaccccttattgaagttagcgatagttacttagagattgacaaaaatcaagacaatgacctttctttaaatataatcctgatgtaaacaaaagataatacattggtttatttttaatataaggaaaaggtttttttttgtttgtttgttttgctttttgttttgttttgtttttttgagatggagtgttgctctgtcacccaggctggactgcagtgacgggatcttggctcactgcaacccctgcctcccgggttcaagccattatcttgcctcatcctcctgagcagctggaattacaggtgtgagctaccatgcccagctactttttatatttttagtagagatggggtttcatcttgttggccaggctggtctcaaactcctgacctcaaatgatctgcccgcctcagcctcccaaagtactgggattacgggcgtgagccaccacgcccagccagaaaaagttattttaaaaaatgctgttaatgggccgggcgcggtg

SEQ ID NO: 13344 - DNA, 1195 bp, Homo sapiens
gcttgctgtgcctgtgagttgtggcaaaactggacaaagggctaggccttcagagccacagttgggatggttgtctagccaagtctgcagggaagtgctggccctgccttcacagctgatgagtgggtcctctgagagcacctttgggcactgggctggtgccttgggtctaggccagggagtattcaaggatgttctccaggtatgcctgaattcaaggaagcccctctcttctaatgagtcattgatggggcaaagggaatgtgttggggccaggtgggcacctgggattccttgtctgagtgcaaagagtgctccctctcagtgccaacactgcagggaggccaggccaggcccctcaggcctgacttcctatcaccaatagaagaaggggtggtttattaaggccatttccttcctttaggcagagcagtgttcctgggacaagtggggactggtggttaggttggactgcaaaattcttcaccttgaggcactgtcctgattgtcccctacccatttcttcttctttcctaggccctgctgcaggcacctggctcctccatggaggatccccttcctgggcctgggagtcccagccacagtgctccagaccctgatggacttccccatttcatggagactcctcttcagcccccacctccagtgcagcgagttatggacccaggtactgggcaggccctggagaggagtgggccccaggcttggggctggactttggcagctatgtcaaaactttccccaggccttgctgacccctcatatctcatgtataccaagatatttaatagttgcatatcatccaatctagtatacagatggggagtctgtagtccagagaagagaggtagcctccttcaggtcacacagcaaattggacacagagcagagtctatgcctactgccactgtgctattcacatgatgaccaactccaggcccctttctttcctcagaaacaggcagtgtgggaacctctttgaggttgggtgaggggtatcaccaggggctgaggagattacagtctcacaggctgggccagatgccctaggcaaggtgagcccagggtgctgctttccagcagtcagggtttcttgctggcaaagaactgcaccaccctcccctaggcttcctggacgtgtcgggaatttctctcttggacaacagcaatgcca

SEQ ID NO: 13345 - DNA, 1237 bp, Homo sapiens
tagttctacccctggggtctgcttctctgccagtggctttcattacctgctggactgagcctgggtctcccaccccagaggctggggtgcaagctgggacctggctgcaagctgcttttcccactccctctttctgggtacagccctgggtgtatccctcccgaggcctgcccacttccactgcacgtcagggccctcccttctggtccagtctaaacctttctggtaaacccttttggctttccggccaaccctagcctagccctctagagcagcattcccacaggcctgggccagcctgtctccatattgcctcctgggagcccctaaggatgtcctgggctgtgagccatttctgaaagcatctgtggatcataatcaggaaggagccattttcctaagaggaaaatttgtgcccaggaaggtagcaagaggccatggagtgaaccctgagaatgtccggaacagttcatgccagacatgtgttctggctggcacactgggagtgctgatggttcctgaaatgggggagagggctacttggagagtcccagggttggcgcagtgactgtggtctttgctgtgggataggtgcaggagaactccccagcccagcaggcgggcctggagccctactttgacttcatcatcaccattgggcactcgaggctggtgagttccccaacctgcctctgctttgcttgcttatgtgtgtttgtgtgtcttcatctgtcccacagggggccccagtctacccttccctccctttttttctaaagggagtcccagccctgtctccccttcttccagggctgtactcagagcctgactggggccctgcccagtgctcagcttctgagctctgtggggtggacagaggacatatggcctcttggaggtggcaacaaggcccaaggggcctgcctcctggggcatgagggatatgagggccctggccaaggggcagctcagagtggggcagcactggaatgctgtggatctgggaggctttttgcttgctttgttttttctggcaggctgaggaaggtttggcagtgcttggggaaggtgggggtcccagtggctgcaggctcaaccctggtctgtgaacctggcccatccactaccttggcccatccccacagtgaccctgctgagggctgctgcccactaaggcccttgccccatctcaggcccagacttgtctgagggtcctagcctgggcatgaggtggcct

SEQ ID NO: 13346 - DNA, 1222 bp, Homo sapiens
tagtctggggcctcactacacatcacagaaggtgtctgacagcctggacaacatcgaggcacctcacttccccctgcctggcctgtctccacctggggatgccagcagttgcttcctggagtccctcatgggcttctccgagccagccgccgaagccctagatccctttattgacagccagtttgaggacactgtcccagcatctctaatggagcctgtgccggtgtgaggaccaggatgtcttttcccagccccaagagacctgttgctgctttcttgtaattatggggctccccagagtctgcgtaacagtctcccactggctggctcacccacaggtgccatgtgcacactcctggttttcaaacaattctctggatttatttatttgttttaacttttctgtgctgaagagaggactggggggagggggcttcccctttcagctgcccggccccccacacccacagcttgctcttctatctccacaacgtgagcctggaagaggagaaaatgtggctcctctggagcttggcagaccacttttcggtctttgcgtgatgttccttagcccaaagacggtgagacagggctgaaatcaggtggcttctgccaccctgagccctagacccatgggtggctaaatccactggactgtgaagactataatttatttccataatttatttggagattgaggaggctttggttgcacttctttggctggtgggtaatgccaggggtggggtgggcacaggccctcaagagccccttttgccttgtagtcctacaccttgccctgcctgggctttggtgcagactaggtgtggatttgagctctgtgatctatgtctgctgcctggctcctagatggctctgtgggcaggtgctggccaaggacatcatctaggcagggggagagcctgggctgaacagctgtgaccaaaactcccttctgccccaccctgccccctccacttcctgccctctgttccatcttcccccttcccaaaggccacagcctttattccaggcccagggatgtaggagggggaaggaggaaacaggaagcccagagagggcaaagggcctacctcggggcgcgaaccatgccccagactattatctcagggctttctgggcactgcacttcagcgtggcccacctgcccatgccctgaggccagttggcgaggggtggctcctgagggtttttataccct
